United States Patent Application Publication US 2011/0183924 A1 - sequence listing, part 117

SEQ ID NO: 336483 - DNA, 2566 bp, Homo sapiens
aaagttgctagctgggggcagagacggccacgcggttgcaggagtaagagatccctctgtggcgaattggccaacggctcctttcaaccctgcctcgttggtggccactggagaagcgcggggggctcccccagacagccgtggggacaagttagagccagcactttaccccgggccttgcgtgtagcttcccctcccctactctcggtgccctggtgtctggaggggggttgtgggggtgtgcccgccttacatggtccaccacccgggcaaccctctgggcttgtgttccatctcactcttgcttcctgtactgtggtcaaggggaaccactgcatcatgtcccggtatagctaccagagtctcctggactggctctatgggggcgtggaccccagttttgcaggcaatgggggccccgactgtgctgccttcctctcttggcagcagcggctgctggaaagtgtggtggtcctgaccctggctctgttggagatcctggtggccctgcggcacatcctgaggcagacgaaggaggacggtaggggtagccctggcagccagccagagcaggtgacccagcggccagaggaaggcaaggagagcctgagcaagaatctgctcttagtagccctgtgcctgaccttcggggtggaggtgggctttaagttcgccaccaagaccgtcatctacctgctcaacccctgtcacctggtcaccatgatgcatctcccctttgaattggagatttactacattcagcatgttatgctctacgtggtacccatctacctgctttggaaaggaggtgcttacactccagagcccctcagcagtttccggtgggctcttctctcaactggcctcatgttcttttatcacttcagcgtcttgcagatcctcggcctggtcaccgaagtgaatttgaacaacatgctgtgtccggccatctcagacccattctacggcccctggtatcgcatctgggcctcgggacaccagactctcatgaccatgacccacgggaagctggtcatcctgttctcatacatggctgggcccttgtgtaaatatctgctggatttgctccggcttccagccaagaaaatagactgaaggtgcttattttttttttttttcctccctgaggaagcaagtcgtgacttgacttggagaacacccagttcttgataaaatcatgggagagggcagtaggatgtttggtgtatttctttttcctcctttctgtccctttcttctaccactcttcctttcccagctcttccccctacgatgtctccttgagcctggggtgtagtgctgggcgctggattttcctccttccctttggctctctcctcaaacttcatcgcattcatagaagctgcttgcagggtcgccgggctaaccagggtgatcggcgaactttaccgtacagtacctcagtctagctgtcagatcaccccttttgctgtagcctctgttgaggtttttatatttgtgatcattggtaattcagtgtcctatgaagtgggcacagctccccacagagagcaagttgtcagcaggtctctgtgcactggtattggggcagggcagtgccctgggggtaagctaggtggctcagggagtggcagaagggccatttttccctctgccaaaaagacttccttggatttgtagatgttgacccagagtcctctgtcccctcctgaagaggattttcttactggtttctactgaaggggaggtaggggaggaggaaaaaaggaccatgtgtgatgctgttagacaagacactgacgctgattatggagggtctcctgcaggcccttgtgggctccttggcaaggccccaggctgggaaggagctccccccactgcccatcctgcccgctttgtggcgggtagagtcagtgacagggaggcagccctccttttgtgtatatagagtgagctgatttgggctcaggaaaacctagtcgcttgttgctctcgtctgtgacatttttgtacactggtttgctactcatggcaagaaacagacaaagccccatgaaaaataaaacaaaacaaaagtcatttcaaacaaagctgttgttttgaaaactcttgctttcttttggtgtccattttgtgttctattttaaagaatctttcatttatattggtgttattgtagtgaagagaatgtgataggctgatctgtaatggtttctgtcaggagcttagcaaatgcctctgcccctcttcccctacccctgtccttcctcagttcccagctgggattgctatgcactgggcagacccgtcactgtctcccctgaacccccacacagtggcttcccttagaaccagtctttgtactctccctaaacagcagcaggcttaggatttttgtcaggctggttcttgcgtgctctgtgcccccaccagtttgctcacctcttggggcattttgtaatgtgttttctctgtcttgtaaaaccttttgattgtaccgaaatggtatctgcagtcgcctttggaaataaatggtcattaatttgtgtacttagcattctga

SEQ ID NO: 336484 - DNA, 3590 bp, Homo sapiens
gctaggtggctgggtgaatcggacgaggctgtcacctggtcaccatgatgcatatctttctcctggcctgccctccatgtcggggagctatcgtcgtcttcaagctacagatgcacatgttgaatggagctcttctggcattgctgtttcctgtggtaaacactcggctgctcccctttgaattggagatttactacattcagcatgttatgctctacgtggtacccatctacctgctttggaaaggaggtgcttacactccagagcccctcagcagtttccggtgggctcttctctcaactggcctcatgttcttttatcacttcagcgtcttgcagatcctcggcctggtcaccgaagtgaatttgaacaacatgctgtgtccggccatctcagacccatttctggaagattctgtagatctgtttcttggttttacagggccagtgttgtttccctagggccagatttcttcagtgtatccacactcagtgctgaattgtttaatgtgggggacatcacgtcctcctcatcctgtctacccccaaatcccatgtctaggttgaaagggggctgccaaagaattaagtcctcatgggtggaggttcaggtgctccacaaggaggagcttttgttgaaggacttcagctcagttatgcacggacctcaagcaggcaggaagtggctgggcattgctgactccacattgactcccactaggaacagatttgcttaagaacagaaaagctcatttggtgattttgtctgatgagcctccctttcccctgtcccactctaggcaaccacagttgacctagaccagttccagtattccagtttgaccgtgttgacctacactgagcttcggtgcctcagtggtcataattttagcaagtggacctataggaagcaaccctgggagggaccgtccttctgcagaggcctgcgggcattgaggctatcaatccccagggcttggggagcaggaggggagggcaccaagtgctcttactctcctgagctccttttgatgcgtaagctttgtttttggccctctttgaaggcagggccaaacttttcttagtgcctctcaccttagggtggccctccagggaaggtgctccttgaatggctggattggccctgcccaccgtcaaactgctacatgtaggaatagctgatgaggaaatacacaaggcctcagtgccccttggcctctttacaaaaggagaagttggaaggggattgtgggaggagcccctgggggcctggtctgtcctccaccagaacttggagttgctgccagcagaggatctgtgcctcagctgaagactagctccggaatgtcataggggtgtgactgtgtaggccttctcctcctcctcgtttctgtggcatggcacaggttgcctggttgctcgagccttccccatgttgacatcctccacaagcttgcctttgctctgtctacagcttagtaccccattctggagggcactttctggtgcttggaaggagagaagaaagcaaaagccacatgcctggcatggccaagccagagacagatccacctgtcagaggaaggaagaagtaaagggggcatgcagggcttttgggggccagattggctcagaaacatgtaggtcaaaagaatagagggggcccagtctataggcttcacaaggagccatggcctgtatttggggcattggggagcataaggcatctgaactggtccagatctcactcttatcttgggccaagccaacgtggagagaagcaacccaaccagactcttggcagcctgccttacagggtagcccaccttatagggtagccctcatatctgccctgtgccggccctctactgccccagctttggtacaggagtgagggagaagctggagcttgcacacccagtggccagtggggctgtcttcccagctcctcctcagggctttcctgtcagtgccaagccagttccccagccaggtttccgtgtgccatttgccagcgtgtgggagctctgcgcgtgtgtgagggtgtttgtagaagagggcagtttcctttcaaatggccttaggaagggaaaagagtactccctccagcccctaggtagccttggccagggatgtgggccaagaacagtctgtggagctggccaacttgtggcatccactccaaatagcagagacccagtcacgcctgcttctggtcctccctgccctcagtatttggttttgtacaccaaagatgatctggcccatcttcctcccagaggcacaacagtaacatgttcctctgtcagcctgtgaaggcatgcagggttctgaagccacagactcagtctccccaagtcagcaatctctttctctctctctcctcaaacttcatcgcattcatagaagctgcttgcagggtcgccgggctaaccagggtgatcggcgaactttaccgtacagtacctcagtctagctgtcagatcaccccttttgctgtagcctctgttgaggtttttatatttgtgatcattggtaattcagtgtcctatgaagtgggcacagctccccacagagagcaagttgtcagcaggtctctgtgcactggtattggggcagggcagtgccctgggggtaagctaggtggctcagggagtggcagaagggccatttttccctctgccaaaaagacttccttggatttgtagatgttgacccagagtcctctgtcccctcctgaagaggattttcttactggtttctactgaaggggaggtaggggaggaggaaaaaaggaccatgtgtgatgctgttagacaagacactgacgctgattatggagggtctcctgcaggcccttgtgggctccttggcaaggccccaggctgggaaggagctccccccactgcccatcctgcccgctttgtggcgggtagagtcagtgacagggaggcagccctccttttgtgtatatagagtgagctgatttgggctcaggaaaacctagtcgcttgttgctctcgtctgtgacatttttgtacactggtttgctactcatggcaagaaacagacaaagccccatgaaaaataaaacaaaacaaaagtcatttcaaacaaagctgttgttttgaaaactcttgctttcttttggtgtccattttgtgttctattttaaagaatctttcatttatattggtgttattgtagtgaagagaatgtgataggctgatctgtaatggtttctgtcaggagcttagcaaatgcctctgcccctcttcccctacccctgtccttcctcagttcccagctgggattgctatgcactgggcagacccgtcactgtctcccctgaacccccacacagtggcttcccttagaaccagtctttgtactctccctaaacagcagcaggcttaggatttttgtcaggctggttcttgcgtgctctgtgcccccaccagtttgctcacctcttggggcattttgtaatgtgttttctctgtcttgtaaaaccttttgattgtaccgaaatggtatctgcagtcgcctttggaaataaatggtcattaatttgtgtacttagcattctga

SEQ ID NO: 336485 - DNA, 4266 bp, Homo sapiens
aaagttgctagctgggggcagagacggccacgcggttgcaggagtaagagatccctctgtggcgaattggccaacggctcctttcaaccctgcctcgttggtggccactggagaagcgcggggggctcccccagacagccgtggggacaagttagagccagcactttaccccgggccttgcgtgtagcttcccctcccctactctcggtgccctggtgtctggaggggggttgtgggggtgtgcccgccttacatggtccaccacccgggcaaccctctgggcttgtgttccatctcactcttgcttcctgtactgtggtcaaggggaaccactgcatcatgtcccggtatagctaccagagtctcctggactggctctatgggggcgtggaccccagttttgcaggcaatgggggccccgactgtgctgccttcctctcttggcagcagcggctgctggaaagtgtggtggtcctgaccctggctctgttggagatcctggtggccctgcggcacatcctgaggcagacgaaggaggacggtaggggtagccctggcagccagccagagcaggtgacccagcggccagaggaaggcaaggagagcctgagcaagaatctgctcttagtagccctgtgcctgaccttcggggtggaggtgggctttaagttcgccaccaagaccgtcatctacctgctcaacccctgtcacctggtcaccatgatgcatatctttctcctggcctgccctccatgtcggggagctatcgtcgtcttcaagctacagatgcacatgttgaatggagctcttctggcattgctgtttcctgtggtaaacactcggctgctcccctttgaattggagatttactacattcagcatgttatgctctacgtggtacccatctacctgctttggaaaggaggtgcttacactccagagcccctcagcagtttccggtgggctcttctctcaactggcctcatgttcttttatcacttcagcgtcttgcagatcctcggcctggtcaccgaagtgaatttgaacaacatgctgtgtccggccatctcagacccatttctggaagattctgtagatctgtttcttggttttacagggccagtgttgtttccctagggccagatttcttcagtgtatccacactcagtgctgaattgtttaatgtgggggacatcacgtcctcctcatcctgtctacccccaaatcccatgtctaggttgaaagggggctgccaaagaattaagtcctcatgggtggaggttcaggtgctccacaaggaggagcttttgttgaaggacttcagctcagttatgcacggacctcaagcaggcaggaagtggctgggcattgctgactccacattgactcccactaggaacagatttgcttaagaacagaaaagctcatttggtgattttgtctgatgagcctccctttcccctgtcccactctaggcaaccacagttgacctagaccagttccagtattccagtttgaccgtgttgacctacactgagcttcggtgcctcagtggtcataattttagcaagtggacctataggaagcaaccctgggagggaccgtccttctgcagaggcctgcgggcattgaggctatcaatccccagggcttggggagcaggaggggagggcaccaagtgctcttactctcctgagctccttttgatgcgtaagctttgtttttggccctctttgaaggcagggccaaacttttcttagtgcctctcaccttagggtggccctccagggaaggtgctccttgaatggctggattggccctgcccaccgtcaaactgctacatgtaggaatagctgatgaggaaatacacaaggcctcagtgccccttggcctctttacaaaaggagaagttggaaggggattgtgggaggagcccctgggggcctggtctgtcctccaccagaacttggagttgctgccagcagaggatctgtgcctcagctgaagactagctccggaatgtcataggggtgtgactgtgtaggccttctcctcctcctcgtttctgtggcatggcacaggttgcctggttgctcgagccttccccatgttgacatcctccacaagcttgcctttgctctgtctacagcttagtaccccattctggagggcactttctggtgcttggaaggagagaagaaagcaaaagccacatgcctggcatggccaagccagagacagatccacctgtcagaggaaggaagaagtaaagggggcatgcagggcttttgggggccagattggctcagaaacatgtaggtcaaaagaatagagggggcccagtctataggcttcacaaggagccatggcctgtatttggggcattggggagcataaggcatctgaactggtccagatctcactcttatcttgggccaagccaacgtggagagaagcaacccaaccagactcttggcagcctgccttacagggtagcccaccttatagggtagccctcatatctgccctgtgccggccctctactgccccagctttggtacaggagtgagggagaagctggagcttgcacacccagtggccagtggggctgtcttcccagctcctcctcagggctttcctgtcagtgccaagccagttccccagccaggtttccgtgtgccatttgccagcgtgtgggagctctgcgcgtgtgtgagggtgtttgtagaagagggcagtttcctttcaaatggccttaggaagggaaaagagtactccctccagcccctaggtagccttggccagggatgtgggccaagaacagtctgtggagctggccaacttgtggcatccactccaaatagcagagacccagtcacgcctgcttctggtcctccctgccctcagtatttggttttgtacaccaaagatgatctggcccatcttcctcccagaggcacaacagtaacatgttcctctgtcagcctgtgaaggcatgcagggttctgaagccacagactcagtctccccaagtcagcaatctctttctctctctctcctcaaacttcatcgcattcatagaagctgcttgcagggtcgccgggctaaccagggtgatcggcgaactttaccgtacagtacctcagtctagctgtcagatcaccccttttgctgtagcctctgttgaggtttttatatttgtgatcattggtaattcagtgtcctatgaagtgggcacagctccccacagagagcaagttgtcagcaggtctctgtgcactggtattggggcagggcagtgccctgggggtaagctaggtggctcagggagtggcagaagggccatttttccctctgccaaaaagacttccttggatttgtagatgttgacccagagtcctctgtcccctcctgaagaggattttcttactggtttctactgaaggggaggtaggggaggaggaaaaaaggaccatgtgtgatgctgttagacaagacactgacgctgattatggagggtctcctgcaggcccttgtgggctccttggcaaggccccaggctgggaaggagctccccccactgcccatcctgcccgctttgtggcgggtagagtcagtgacagggaggcagccctccttttgtgtatatagagtgagctgatttgggctcaggaaaacctagtcgcttgttgctctcgtctgtgacatttttgtacactggtttgctactcatggcaagaaacagacaaagccccatgaaaaataaaacaaaacaaaagtcatttcaaacaaagctgttgttttgaaaactcttgctttcttttggtgtccattttgtgttctattttaaagaatctttcatttatattggtgttattgtagtgaagagaatgtgataggctgatctgtaatggtttctgtcaggagcttagcaaatgcctctgcccctcttcccctacccctgtccttcctcagttcccagctgggattgctatgcactgggcagacccgtcactgtctcccctgaacccccacacagtggcttcccttagaaccagtctttgtactctccctaaacagcagcaggcttaggatttttgtcaggctggttcttgcgtgctctgtgcccccaccagtttgctcacctcttggggcattttgtaatgtgttttctctgtcttgtaaaaccttttgattgtaccgaaatggtatctgcagtcgcctttggaaataaatggtcattaatttgtgtacttagcattctga

SEQ ID NO: 336486 - DNA, 3623 bp, Homo sapiens
gcggccgccaggggaaccgagcgcccggcgcggagagcgcgggagcggagcagtagcccgatccggggccgcgggccgagctgccgatctttctcctggcctgccctccatgtcggggagctatcgtcgtcttcaagctacagatgcacatgttgaatggagctcttctggcattgctgtttcctgtggtaaacactcggctgctcccctttgaattggagatttactacattcagcatgttatgctctacgtggtacccatctacctgctttggaaaggaggtgcttacactccagagcccctcagcagtttccggtgggctcttctctcaactggcctcatgttcttttatcacttcagcgtcttgcagatcctcggcctggtcaccgaagtgaatttgaacaacatgctgtgtccggccatctcagacccatttctggaagattctgtagatctgtttcttggttttacagggccagtgttgtttccctagggccagatttcttcagtgtatccacactcagtgctgaattgtttaatgtgggggacatcacgtcctcctcatcctgtctacccccaaatcccatgtctaggttgaaagggggctgccaaagaattaagtcctcatgggtggaggttcaggtgctccacaaggaggagcttttgttgaaggacttcagctcagttatgcacggacctcaagcaggcaggaagtggctgggcattgctgactccacattgactcccactaggaacagatttgcttaagaacagaaaagctcatttggtgattttgtctgatgagcctccctttcccctgtcccactctaggcaaccacagttgacctagaccagttccagtattccagtttgaccgtgttgacctacactgagcttcggtgcctcagtggtcataattttagcaagtggacctataggaagcaaccctgggagggaccgtccttctgcagaggcctgcgggcattgaggctatcaatccccagggcttggggagcaggaggggagggcaccaagtgctcttactctcctgagctccttttgatgcgtaagctttgtttttggccctctttgaaggcagggccaaacttttcttagtgcctctcaccttagggtggccctccagggaaggtgctccttgaatggctggattggccctgcccaccgtcaaactgctacatgtaggaatagctgatgaggaaatacacaaggcctcagtgccccttggcctctttacaaaaggagaagttggaaggggattgtgggaggagcccctgggggcctggtctgtcctccaccagaacttggagttgctgccagcagaggatctgtgcctcagctgaagactagctccggaatgtcataggggtgtgactgtgtaggccttctcctcctcctcgtttctgtggcatggcacaggttgcctggttgctcgagccttccccatgttgacatcctccacaagcttgcctttgctctgtctacagcttagtaccccattctggagggcactttctggtgcttggaaggagagaagaaagcaaaagccacatgcctggcatggccaagccagagacagatccacctgtcagaggaaggaagaagtaaagggggcatgcagggcttttgggggccagattggctcagaaacatgtaggtcaaaagaatagagggggcccagtctataggcttcacaaggagccatggcctgtatttggggcattggggagcataaggcatctgaactggtccagatctcactcttatcttgggccaagccaacgtggagagaagcaacccaaccagactcttggcagcctgccttacagggtagcccaccttatagggtagccctcatatctgccctgtgccggccctctactgccccagctttggtacaggagtgagggagaagctggagcttgcacacccagtggccagtggggctgtcttcccagctcctcctcagggctttcctgtcagtgccaagccagttccccagccaggtttccgtgtgccatttgccagcgtgtgggagctctgcgcgtgtgtgagggtgtttgtagaagagggcagtttcctttcaaatggccttaggaagggaaaagagtactccctccagcccctaggtagccttggccagggatgtgggccaagaacagtctgtggagctggccaacttgtggcatccactccaaatagcagagacccagtcacgcctgcttctggtcctccctgccctcagtatttggttttgtacaccaaagatgatctggcccatcttcctcccagaggcacaacagtaacatgttcctctgtcagcctgtgaaggcatgcagggttctgaagccacagactcagtctccccaagtcagcaatctctttctctctctctcctcaaacttcatcgcattcatagaagctgcttgcagggtcgccgggctaaccagggtgatcggcgaactttaccgtacagtacctcagtctagctgtcagatcaccccttttgctgtagcctctgttgaggtttttatatttgtgatcattggtaattcagtgtcctatgaagtgggcacagctccccacagagagcaagttgtcagcaggtctctgtgcactggtattggggcagggcagtgccctgggggtaagctaggtggctcagggagtggcagaagggccatttttccctctgccaaaaagacttccttggatttgtagatgttgacccagagtcctctgtcccctcctgaagaggattttcttactggtttctactgaaggggaggtaggggaggaggaaaaaaggaccatgtgtgatgctgttagacaagacactgacgctgattatggagggtctcctgcaggcccttgtgggctccttggcaaggccccaggctgggaaggagctccccccactgcccatcctgcccgctttgtggcgggtagagtcagtgacagggaggcagccctccttttgtgtatatagagtgagctgatttgggctcaggaaaacctagtcgcttgttgctctcgtctgtgacatttttgtacactggtttgctactcatggcaagaaacagacaaagccccatgaaaaataaaacaaaacaaaagtcatttcaaacaaagctgttgttttgaaaactcttgctttcttttggtgtccattttgtgttctattttaaagaatctttcatttatattggtgttattgtagtgaagagaatgtgataggctgatctgtaatggtttctgtcaggagcttagcaaatgcctctgcccctcttcccctacccctgtccttcctcagttcccagctgggattgctatgcactgggcagacccgtcactgtctcccctgaacccccacacagtggcttcccttagaaccagtctttgtactctccctaaacagcagcaggcttaggatttttgtcaggctggttcttgcgtgctctgtgcccccaccagtttgctcacctcttggggcattttgtaatgtgttttctctgtcttgtaaaaccttttgattgtaccgaaatggtatctgcagtcgcctttggaaataaatggtcattaatttgtgtacttagcattctga

SEQ ID NO: 336487 - DNA, 3740 bp, Homo sapiens
ctataccagcggcaagcccagagccgagggatttcacagctcgtggtcaagacagaaccagccagattctggtcactggtgtcccatgactcaaagtaaacagccaaccagccactccctccaggatgctgcctggggtgggaggtgagagcaccacccagcccaagggctagattccattgagagggttggagatctattgcaatgacaaatccaaagtgaagagggtcaagatatatacagtactaggccagaccctgtgtaagttctgcctgtgagagttgagaactgatgcatatcccaatcagaagtgagcacagaaaactgtgatttgaatcatacactctgttttaggaaaatgttgataatagataccattttaatcttgagtgccccttaaatgtgttccctctccctttccctctccccccacccctccccctcccccctccctccctctttccctctctcaggcagcttcagggaagaatgagctggaattggctggttggttggtttttgagtttggagaatcctcgcatcagggcccatttctggaagattctgtagatctgtttcttggttttacagggccagtgttgtttccctagggccagatttcttcagtgtatccacactcagtgctgaattgtttaatgtgggggacatcacgtcctcctcatcctgtctacccccaaatcccatgtctaggttgaaagggggctgccaaagaattaagtcctcatgggtggaggttcaggtgctccacaaggaggagcttttgttgaaggacttcagctcagttatgcacggacctcaagcaggcaggaagtggctgggcattgctgactccacattgactcccactaggaacagatttgcttaagaacagaaaagctcatttggtgattttgtctgatgagcctccctttcccctgtcccactctaggcaaccacagttgacctagaccagttccagtattccagtttgaccgtgttgacctacactgagcttcggtgcctcagtggtcataattttagcaagtggacctataggaagcaaccctgggagggaccgtccttctgcagaggcctgcgggcattgaggctatcaatccccagggcttggggagcaggaggggagggcaccaagtgctcttactctcctgagctccttttgatgcgtaagctttgtttttggccctctttgaaggcagggccaaacttttcttagtgcctctcaccttagggtggccctccagggaaggtgctccttgaatggctggattggccctgcccaccgtcaaactgctacatgtaggaatagctgatgaggaaatacacaaggcctcagtgccccttggcctctttacaaaaggagaagttggaaggggattgtgggaggagcccctgggggcctggtctgtcctccaccagaacttggagttgctgccagcagaggatctgtgcctcagctgaagactagctccggaatgtcataggggtgtgactgtgtaggccttctcctcctcctcgtttctgtggcatggcacaggttgcctggttgctcgagccttccccatgttgacatcctccacaagcttgcctttgctctgtctacagcttagtaccccattctggagggcactttctggtgcttggaaggagagaagaaagcaaaagccacatgcctggcatggccaagccagagacagatccacctgtcagaggaaggaagaagtaaagggggcatgcagggcttttgggggccagattggctcagaaacatgtaggtcaaaagaatagagggggcccagtctataggcttcacaaggagccatggcctgtatttggggcattggggagcataaggcatctgaactggtccagatctcactcttatcttgggccaagccaacgtggagagaagcaacccaaccagactcttggcagcctgccttacagggtagcccaccttatagggtagccctcatatctgccctgtgccggccctctactgccccagctttggtacaggagtgagggagaagctggagcttgcacacccagtggccagtggggctgtcttcccagctcctcctcagggctttcctgtcagtgccaagccagttccccagccaggtttccgtgtgccatttgccagcgtgtgggagctctgcgcgtgtgtgagggtgtttgtagaagagggcagtttcctttcaaatggccttaggaagggaaaagagtactccctccagcccctaggtagccttggccagggatgtgggccaagaacagtctgtggagctggccaacttgtggcatccactccaaatagcagagacccagtcacgcctgcttctggtcctccctgccctcagtatttggttttgtacaccaaagatgatctggcccatcttcctcccagaggcacaacagtaacatgttcctctgtcagcctgtgaaggcatgcagggttctgaagccacagactcagtctccccaagtcagcaatctctttctctctctctcctcaaacttcatcgcattcatagaagctgcttgcagggtcgccgggctaaccagggtgatcggcgaactttaccgtacagtacctcagtctagctgtcagatcaccccttttgctgtagcctctgttgaggtttttatatttgtgatcattggtaattcagtgtcctatgaagtgggcacagctccccacagagagcaagttgtcagcaggtctctgtgcactggtattggggcagggcagtgccctgggggtaagctaggtggctcagggagtggcagaagggccatttttccctctgccaaaaagacttccttggatttgtagatgttgacccagagtcctctgtcccctcctgaagaggattttcttactggtttctactgaaggggaggtaggggaggaggaaaaaaggaccatgtgtgatgctgttagacaagacactgacgctgattatggagggtctcctgcaggcccttgtgggctccttggcaaggccccaggctgggaaggagctccccccactgcccatcctgcccgctttgtggcgggtagagtcagtgacagggaggcagccctccttttgtgtatatagagtgagctgatttgggctcaggaaaacctagtcgcttgttgctctcgtctgtgacatttttgtacactggtttgctactcatggcaagaaacagacaaagccccatgaaaaataaaacaaaacaaaagtcatttcaaacaaagctgttgttttgaaaactcttgctttcttttggtgtccattttgtgttctattttaaagaatctttcatttatattggtgttattgtagtgaagagaatgtgataggctgatctgtaatggtttctgtcaggagcttagcaaatgcctctgcccctcttcccctacccctgtccttcctcagttcccagctgggattgctatgcactgggcagacccgtcactgtctcccctgaacccccacacagtggcttcccttagaaccagtctttgtactctccctaaacagcagcaggcttaggatttttgtcaggctggttcttgcgtgctctgtgcccccaccagtttgctcacctcttggggcattttgtaatgtgttttctctgtcttgtaaaaccttttgattgtaccgaaatggtatctgcagtcgcctttggaaataaatggtcattaatttgtgtacttagcattctga

SEQ ID NO: 336488 - DNA, 2584 bp, Homo sapiens
ggaccacatggcaggacagcccggtgttatcgcgacatagctcttcgagggttatctcgtgtgctagaagcactcacttatggtgcactctccatagctggttgctcgtgccagttggtgtagtgcaccgtttgcagcgtccgccgtgctccctataggagatatcgtattaatgacgttaaacgcacaggctcagcgtgccttgatgctactcgacaaaaggagaagttggaaggggattgtgggaggagcccctgggggcctggtctgtcctccaccagaacttggagttgctgccagcagaggatctgtgcctcagctgaagactagctccggaatgtcataggggtgtgactgtgtaggccttctcctcctcctcgtttctgtggcatggcacaggttgcctggttgctcgagccttccccatgttgacatcctccacaagcttgcctttgctctgtctacagcttagtaccccattctggagggcactttctggtgcttggaaggagagaagaaagcaaaagccacatgcctggcatggccaagccagagacagatccacctgtcagaggaaggaagaagtaaagggggcatgcagggcttttgggggccagattggctcagaaacatgtaggtcaaaagaatagagggggcccagtctataggcttcacaaggagccatggcctgtatttggggcattggggagcataaggcatctgaactggtccagatctcactcttatcttgggccaagccaacgtggagagaagcaacccaaccagactcttggcagcctgccttacagggtagcccaccttatagggtagccctcatatctgccctgtgccggccctctactgccccagctttggtacaggagtgagggagaagctggagcttgcacacccagtggccagtggggctgtcttcccagctcctcctcagggctttcctgtcagtgccaagccagttccccagccaggtttccgtgtgccatttgccagcgtgtgggagctctgcgcgtgtgtgagggtgtttgtagaagagggcagtttcctttcaaatggccttaggaagggaaaagagtactccctccagcccctaggtagccttggccagggatgtgggccaagaacagtctgtggagctggccaacttgtggcatccactccaaatagcagagacccagtcacgcctgcttctggtcctccctgccctcagtatttggttttgtacaccaaagatgatctggcccatcttcctcccagaggcacaacagtaacatgttcctctgtcagcctgtgaaggcatgcagggttctgaagccacagactcagtctccccaagtcagcaatctctttctctctctctcctcaaacttcatcgcattcatagaagctgcttgcagggtcgccgggctaaccagggtgatcggcgaactttaccgtacagtacctcagtctagctgtcagatcaccccttttgctgtagcctctgttgaggtttttatatttgtgatcattggtaattcagtgtcctatgaagtgggcacagctccccacagagagcaagttgtcagcaggtctctgtgcactggtattggggcagggcagtgccctgggggtaagctaggtggctcagggagtggcagaagggccatttttccctctgccaaaaagacttccttggatttgtagatgttgacccagagtcctctgtcccctcctgaagaggattttcttactggtttctactgaaggggaggtaggggaggaggaaaaaaggaccatgtgtgatgctgttagacaagacactgacgctgattatggagggtctcctgcaggcccttgtgggctccttggcaaggccccaggctgggaaggagctccccccactgcccatcctgcccgctttgtggcgggtagagtcagtgacagggaggcagccctccttttgtgtatatagagtgagctgatttgggctcaggaaaacctagtcgcttgttgctctcgtctgtgacatttttgtacactggtttgctactcatggcaagaaacagacaaagccccatgaaaaataaaacaaaacaaaagtcatttcaaacaaagctgttgttttgaaaactcttgctttcttttggtgtccattttgtgttctattttaaagaatctttcatttatattggtgttattgtagtgaagagaatgtgataggctgatctgtaatggtttctgtcaggagcttagcaaatgcctctgcccctcttcccctacccctgtccttcctcagttcccagctgggattgctatgcactgggcagacccgtcactgtctcccctgaacccccacacagtggcttcccttagaaccagtctttgtactctccctaaacagcagcaggcttaggatttttgtcaggctggttcttgcgtgctctgtgcccccaccagtttgctcacctcttggggcattttgtaatgtgttttctctgtcttgtaaaaccttttgattgtaccgaaatggtatctgcagtcgcctttggaaataaatggtcattaatttgtgtacttagcattctga

SEQ ID NO: 336489 - DNA, 3115 bp, Homo sapiens
gctaggtggctgggtgaatcggacgaggctgtcacctggtcaccatgatgcatatctttctcctggcctgccctccatgtcggggagctatcgtcgtcttcaagctacagatgcacatgttgaatggagctcttctggcattgctgtttcctgtggtaaacactcggctgctcccctttgaattggagatttactacattcagcatgttatgctctacgtggtacccatctacctgctttggaaaggaggtgcttacactccagagcccctcagcagtttccggtgggctcttctctcaactggcctcatgttcttttatcacttcagcgtcttgcagatcctcggcctggtcaccgaagtgaatttgaacaacatgctgtgtccggccatctcagacccatttctggaagattctgtagatctgtttcttggttttacagggccagtgttgtttccctagggccagatttcttcagtgtatccacactcagtgctgaattgtttaatgtgggggacatcacgtcctcctcatcctgtctacccccaaatcccatgtctaggttgaaagggggctgccaaagaattaagtcctcatgggtggaggttcaggtgctccacaaggaggagcttttgttgaaggacttcagctcagttatgcacggacctcaagcaggcaggaagtggctgggcattgctgactccacattgactcccactaggaacagatttgcttaagaacagaaaagctcatttggtgattttgtctgatgagcctccctttcccctgtcccactctaggcaaccacagttgacctagaccagttccagtattccagtttgaccgtgttgacctacactgagcttcggtgcctcagtggtcataattttagcaagtggacctataggaagcaaccctgggagggaccgtccttctgcagaggcctgcgggcattgaggctatcaatccccagggcttggggagcaggaggggagggcaccaagtgctcttactctcctgagctccttttgatgcgtaagctttgtttttggccctctttgaaggcagggccaaacttttcttagtgcctctcaccttagggtggccctccagggaaggtgctccttgaatggctggattggccctgcccaccgtcaaactgctacatgtaggaatagctgatgaggaaatacacaaggcctcagtgccccttggcctctttacaaaaggagaagttggaaggggattgtgggaggagcccctgggggcctggtctgtcctccaccagaacttggagttgctgccagcagaggatctgtgcctcagctgaagactagctccggaatgtcataggggtgtgactgtgtaggccttctcctcctcctcgtttctgtggcatggcacaggttgcctggttgctcgagccttccccatgttgacatcctccacaagcttgcctttgctctgtctacagcttagtaccccattctggagggcactttctggtgcttggaaggagagaagaaagcaaaagccacatgcctggcatggccaagccagagacagatccacctgtcagaggaaggaagaagtaaagggggcatgcagggcttttgggggccagattggctcagaaacatgtaggtcaaaagaatagagggggcccagtctataggcttcacaaggagccatggcctgtatttggggcattggggagcataaggcatctgaactggtccagatctcactcttatcttgggccaagccaacgtggagagaagcaacccaaccagactcttggcagcctgccttacagggtagcccaccttatagggtagccctcatatctgccctgtgccggccctctactgccccagctttggtacaggagtgagggagaagctggagcttgcacacccagtggccagtggggctgtcttcccagctcctcctcagggctttcctgtcagtgccaagccagttccccagccaggtttccgtgtgccatttgccagcgtgtgggagctctgcgcgtgtgtgagggtgtttgtagaagagggcagtttcctttcaaatggccttaggaagggaaaagagtactccctccagcccctaggtagccttggccagggatgtgggccaagaacagtctgtggagctggccaacttgtggcatccactccaaatagcagagacccagtcacgcctgcttctggtcctccctgccctcagtatttggttttgtacaccaaagatgatctggcccatcttcctcccagaggcacaacagtaacatgttcctctgtcagcctgtgaaggcatgcagggttctgaagccacagactcagtctccccaagtcagcaatctctttctctctctctcctcaaacttcatcgcattcatagaagctgcttgcagggtcgccgggctaaccagggtgatcggcgaactttaccgtacagtacctcagtctagctgtcagatcaccccttttgctgtagcctctgttgaggtttttatatttgtgatcattggtaattcagtgtcctatgaagtgggcacagctccccacagagagcaagttgtcagcaggtctctgtgcactggtattggggcagggcagtgccctgggggtaagctaggtggctcagggagtggcagaagggccatttttccctctgccaaaaagacttccttggatttgtagatgttgacccagagtcctctgtcccctcctgaagaggattttcttactggtttctactgaaggggaggtaggggaggaggaaaaaaggaccatgtgtgatgctgttagacaagacactgacgctgattatggagggtctcctgcaggcccttgtgggctccttggcaaggccccaggctgggaaggagctccccccactgcccatcctgcccgctttgtggcgggtagagtcagtgacagggaggcagccctccttttgtgtatatagagtgagctgatttgggctcaggaaaacctagtcgcttgttgctctcgtctgtgacatttttgtacactggtttgctactcatggcaagaaacagacaaagccccatgaaaaataaaacaaaacaaaagtcatttcaaaca

SEQ ID NO: 336490 - DNA, 4198 bp, Homo sapiens
gctaggtggctgggtgaatcggacgaggctgtcacctggtcaccatgatgcatatctttctcctggcctgccctccatgtcggggagctatcgtcgtcttcaagctacagatgcacatgttgaatggagctcttctggcattgctgtttcctgtggtaaacactcggctgctcccctttgaattggagatttactacattcagcatgttatgctctacgtggtacccatctacctgctttggaaaggaggtgcttacactccagagcccctcagcagtttccggtgggctcttctctcaactggcctcatgttcttttatcacttcagcgtcttgcagatcctcggcctggtcaccgaagtgaatttgaacaacatgctgtgtccggccatctcagacccatttctggaagattctgtagatctgtttcttggttttacagggccagtgttgtttccctagggccagatttcttcagtgtatccacactcagtgctgaattgtttaatgtgggggacatcacgtcctcctcatcctgtctacccccaaatcccatgtctaggttgaaagggggctgccaaagaattaagtcctcatgggtggaggttcaggtgctccacaaggaggagcttttgttgaaggacttcagctcagttatgcacggacctcaagcaggcaggaagtggctgggcattgctgactccacattgactcccactaggaacagatttgcttaagaacagaaaagctcatttggtgattttgtctgatgagcctccctttcccctgtcccactctaggcaaccacagttgacctagaccagttccagtattccagtttgaccgtgttgacctacactgagcttcggtgcctcagtggtcataattttagcaagtggacctataggaagcaaccctgggagggaccgtccttctgcagaggcctgcgggcattgaggctatcaatccccagggcttggggagcaggaggggagggcaccaagtgctcttactctcctgagctccttttgatgcgtaagctttgtttttggccctctttgaaggcagggccaaacttttcttagtgcctctcaccttagggtggccctccagggaaggtgctccttgaatggctggattggccctgcccaccgtcaaactgctacatgtaggaatagctgatgaggaaatacacaaggcctcagtgccccttggcctctttacaaaaggagaagttggaaggggattgtgggaggagcccctgggggcctggtctgtcctccaccagaacttggagttgctgccagcagaggatctgtgcctcagctgaagactagctccggaatgtcataggggtgtgactgtgtaggccttctcctcctcctcgtttctgtggcatggcacaggttgcctggttgctcgagccttccccatgttgacatcctccacaagcttgcctttgctctgtctacagcttagtaccccattctggagggcactttctggtgcttggaaggagagaagaaagcaaaagccacatgcctggcatggccaagccagagacagatccacctgtcagaggaaggaagaagtaaagggggcatgcagggcttttgggggccagattggctcagaaacatgtaggtcaaaagaatagagggggcccagtctataggcttcacaaggagccatggcctgtatttggggcattggggagcataaggcatctgaactggtccagatctcactcttatcttgggccaagccaacgtggagagaagcaacccaaccagactcttggcagcctgccttacagggtagcccaccttatagggtagccctcatatctgccctgtgccggccctctactgccccagctttggtacaggagtgagggagaagctggagcttgcacacccagtggccagtggggctgtcttcccagctcctcctcagggctttcctgtcagtgccaagccagttccccagccaggtttccgtgtgccatttgccagcgtgtgggagctctgcgcgtgtgtgagggtgtttgtagaagagggcagtttcctttcaaatggccttaggaagggaaaagagtactccctccagcccctaggtagccttggccagggatgtgggccaagaacagtctgtggagctggccaacttgtggcatccactccaaatagcagagacccagtcacgcctgcttctggtcctccctgccctcagtatttggttttgtacaccaaagatgatctggcccatcttcctcccagaggcacaacagtaacatgttcctctgtcagcctgtgaaggcatgcagggttctgaagccacagactcagtctccccaagtcagcaatctctttctctctctctcctcaaacttcatcgcattcatagaagctgcttgcagggtcgccgggctaaccagggtgatcggcgaactttaccgtacagtacctcagtctagctgtcagatcaccccttttgctgtagcctctgttgaggtttttatatttgtgatcattggtaattcagtgtcctatgaagtgggcacagctccccacagagagcaagttgtcagcaggtctctgtgcactggtattggggcagggcagtgccctgggggtaagctaggtggctcagggagtggcagaagggccatttttccctctgccaaaaagacttccttggatttgtagatgttgacccagagtcctctgtcccctcctgaagaggattttcttactggtttctactgaaggggaggtaggggaggaggaaaaaaggaccatgtgtgatgctgttagacaagacactgacgctgattatggagggtctcctgcaggcccttgtgggctccttggcaaggccccaggctgggaaggagctccccccactgcccatcctgcccgctttgtggcgggtagagtcagtgacagggaggcagccctccttttgtgtatatagagtgagctgatttgggctcaggaaaacctagtcgcttgttgctctcgtctgtgacatttttgtacactggtttgctactcatggcaagaaacagacaaagccccatgaaaaataaaacaaaacaaaagtcatttcaaacaaagctgttgttttgaaaactcttgctttcttttggtgtccattttgtgttctattttaaagaatctttcatttatattggtgttattgtagtgaagagaatgtgataggctgatctgtaatggtttctgtcaggagcttagcaaatgcctctgcccctcttcccctacccctgtccttcctcagttcccagctgggattgctatgcactgggcagacccgtcactgtctcccctgaacccccacacagtggcttcccttagaaccagtctttgtactctccctaaacagcagcaggcttaggatttttgtcaggctggttcttgcgtgctctgtgcccccaccagtttgctcacctcttggggcattttgtaatgtgttttctctgtcttgtaaaaccttttgattgtaccgaaatggtatctgcagtcgcctttggaaataaatggtcattaatttgtgtacttagcattctgaattttagtctcaggtgtttctgttgttgaagatccttgaatgaaaaggaaccctcaccatggggcttactgttataatgtttcttcatttactgttattaaaagatttatgagaacccaggagtcctggccttgcttcccagaaccctctcagaaggccctctgctttgaaaaatagacaaaaggggcctctggccctccgtactgtggaagaccctcaaaggacagctgggctttctcagcacacttttgtcctgggagctgcgtggctggttgcccttgaattcccacacattgcctacttctgccagggacccagcaggccatttgctcttagcagagggcttgtctgccgggcacgtttgctgggctctctggtacccaaagtgcattgggctaggctggaggactgagctggagaaggcaaacacattcaggcccactcaacctagatttcctgagggccagctctgcaccagcacttctcagcacaggcctgcacccagcatgggtcggaccatgaacaagatagccttaccctttggaagcagacctgcttttccaaggctacctgctgagcagcccatgatgactgtgattggccctttt

SEQ ID NO: 336491 - DNA, 1483 bp, Homo sapiens
aaagttgctagctgggggcagagacggccacgcggttgcaggagtaagagatccctctgtggcgaattggccaacggctcctttcaaccctgcctcgttggtggccactggagaagcgcggggggctcccccagacagccgtggggacaagttagagccagcactttaccccgggccttgcgtgtagcttcccctcccctactctcggtgccctggtgtctggaggggggttgtgggggtgtgcccgccttacatggtccaccacccgggcaaccctctgggcttgtgttccatctcactcttgcttcctgtactgtggtcaaggggaaccactgcatcatgtcccggtatagctaccagagtctcctggactggctctatgggggcgtggaccccagttttgcaggcaatgggggccccgactgtgctgccttcctctcttggcagcagcggctgctggaaagtgtggtggtcctgaccctggctctgttggagatcctggtggccctgcggcacatcctgaggcagacgaaggaggacggtaggggtagccctggcagccagccagagcaggtgacccagcggccagaggaaggcaaggagagcctgagcaagaatctgctcttagtagccctgtgcctgaccttcggggtggaggtgggctttaagttcgccaccaagaccgtcatctacctgctcaacccctgtcacctggtcaccatgatgcatctcccctttgaattggagatttactacattcagcatgttatgctctacgtggtacccatctacctgctttggaaaggaggtgcttacactccagagcccctcagcagtttccggtgggctcttctctcaactggcctcatgttcttttatcacttcagcgtcttgcagatcctcggcctggtcaccgaagtgaatttgaacaacatgctgtgtccggccatctcagacccattctacggcccctggtatcgcatctgggcctcgggacaccagactctcatgaccatgacccacgggaagctggtcatcctgttctcatacatggctgggcccttgtgtaaatatctgctggatttgctccggcttccagccaagaaaatagactgaaggtgcttattttttttttttttcctccctgaggaagcaagtcgtgacttgacttggagaacacccagttcttgataaaatcatgggagagggcagtaggatgtttggtgtatttctttttcctcctttctgtccctttcttctaccactcttcctttcccagctcttccccctacgatgtctccttgagcctggggtgtagtgctgggcgctggattttcctccttccctttggctctctctctgctcctagtggccttacatggggagattgcagtgagcggctctttcactctgcttgtcggtgctttaacaacagctggttgaggagaaagggaacaacaagtagtagttcttttggcatcga

SEQ ID NO: 336492 - DNA, 418 bp, Homo sapiens
atggagctcttctggcattgctgtttcctgtggtaaacactcggctggtaagtagcctcttctaggaatgtaacagcaacatgcaaagcagtacttgcctatatgcccatgtgattttaaaaatatacatatagctggccaggcgcggtggctcacacctgtaatcccagcactttgggaggccaaggcgggtggatcacttgaggtcaggagtttgagaccagtctggccgacatggtgaagccctatctctactaataatacaaaaattagccaagcatggtggtatttgcctgcaatcccagctactcgggaggctaaggcagaagaatcgcttgaacctgggtggcagaggttgcagtgagtcaacattgtgccactgcactccagcctgggcgacagagcgagactcggtctc

SEQ ID NO: 336493 - DNA, 1165 bp, Homo sapiens
gcggccgccaggggaaccgagcgcccggcgcggagagcgcgggagcggagcagtagcccgatccggggccgcgggccgagctgccgcagcggctgctggaaagtgtggtggtcctgaccctggctctgttggagatcctggtggccctgcggcacatcctgaggcagacgaaggaggacggtaggggtagccctggcagccagccagagcaggtgacccagcggccagaggaaggcaaggagagcctgagcaagaatctgctcttagtagccctgtgcctgaccttcggggtggaggtgggctttaagttcgccaccaagaccgtcatctacctgctcaacccctgtcacctggtcaccatgatgcatatctttctcctggcctgccctccatgtcggggagctatcgtcgtcttcaagtaagagaaaattggcttttgctctgttgctcttcagagtatttttgtctgtttgctaacaagactgataacacattgctgtgaacaccttgggattgtaccattttgtctttgcacttcccaaagggatgaaggtctgtgagggcctactgaaacagggaaatattgtttgtgaagacctggtttttgtcaagccgtcaaatcctttttagcaaatccttccagtaggggatgtatggccaaggcatgctcccttggaaggttgctgccctgctaaaatttctcttgagagcatgctaggggccagacagcttcctttctctcaagaatctttgctttgtgagcctactgctccactgagcatatggttcttcacattgaagggcattgttcttatgtttttatggggttttcccccctaaagtgcaaattaaagtgaggagaggaaaatgtccactattacaagttcagactttcataaaaatagcaagcatcaaatctattaaagtatattgcaggcaaatagtgtttctctgaaggcaggtttatttaaatgaaattatcaagagtcctggaaccctcattttaaccgtgagttgtgaccacctcacttatcaaaccttttattagagttgctaatgagaagccaaatcgactgaattaatttcatctcttttctccttccctggccccgattctggagatgttcctgagcagtgaaatggctgcaagccagaggaagggaac

SEQ ID NO: 336494 - DNA, 3960 bp, Homo sapiens
atggaggataacaggacaaccaactgggttgaaactggaggcttgttctctttaatagttttctgggcttctagcctagggaaattgtggatcagaaccagccaaatggacttataagggaaatttgtccccgaaaatcagcttacctcctcttgtctgtgggtatagaaaagtaagatttaactgtggtgcccagtgttgcatttttacatctctgtttagcatgttggaagtgtcttgggtattccagaagctcaggaaggctgctggcatgactctggtgactccagaagtattgaggacctttctaaggtggttggggccccttcctcttctctgtgtactgtagcttctgagtgtagcctttgatgggcctgatgctgggtaactatgtgcagcctccaacttggtcccttacctaagatctttctcctggcctgccctccatgtcggggagctatcgtcgtcttcaagctacagatgcacatgttgaatggagctcttctggcattgctgtttcctgtggtaaacactcggctgctcccctttgaattggagatttactacattcagcatgttatgctctacgtggtacccatctacctgctttggaaaggaggtgcttacactccagagcccctcagcagtttccggtgggctcttctctcaactggcctcatgttcttttatcacttcagcgtcttgcagatcctcggcctggtcaccgaagtgaatttgaacaacatgctgtgtccggccatctcagacccatttctggaagattctgtagatctgtttcttggttttacagggccagtgttgtttccctagggccagatttcttcagtgtatccacactcagtgctgaattgtttaatgtgggggacatcacgtcctcctcatcctgtctacccccaaatcccatgtctaggttgaaagggggctgccaaagaattaagtcctcatgggtggaggttcaggtgctccacaaggaggagcttttgttgaaggacttcagctcagttatgcacggacctcaagcaggcaggaagtggctgggcattgctgactccacattgactcccactaggaacagatttgcttaagaacagaaaagctcatttggtgattttgtctgatgagcctccctttcccctgtcccactctaggcaaccacagttgacctagaccagttccagtattccagtttgaccgtgttgacctacactgagcttcggtgcctcagtggtcataattttagcaagtggacctataggaagcaaccctgggagggaccgtccttctgcagaggcctgcgggcattgaggctatcaatccccagggcttggggagcaggaggggagggcaccaagtgctcttactctcctgagctccttttgatgcgtaagctttgtttttggccctctttgaaggcagggccaaacttttcttagtgcctctcaccttagggtggccctccagggaaggtgctccttgaatggctggattggccctgcccaccgtcaaactgctacatgtaggaatagctgatgaggaaatacacaaggcctcagtgccccttggcctctttacaaaaggagaagttggaaggggattgtgggaggagcccctgggggcctggtctgtcctccaccagaacttggagttgctgccagcagaggatctgtgcctcagctgaagactagctccggaatgtcataggggtgtgactgtgtaggccttctcctcctcctcgtttctgtggcatggcacaggttgcctggttgctcgagccttccccatgttgacatcctccacaagcttgcctttgctctgtctacagcttagtaccccattctggagggcactttctggtgcttggaaggagagaagaaagcaaaagccacatgcctggcatggccaagccagagacagatccacctgtcagaggaaggaagaagtaaagggggcatgcagggcttttgggggccagattggctcagaaacatgtaggtcaaaagaatagagggggcccagtctataggcttcacaaggagccatggcctgtatttggggcattggggagcataaggcatctgaactggtccagatctcactcttatcttgggccaagccaacgtggagagaagcaacccaaccagactcttggcagcctgccttacagggtagcccaccttatagggtagccctcatatctgccctgtgccggccctctactgccccagctttggtacaggagtgagggagaagctggagcttgcacacccagtggccagtggggctgtcttcccagctcctcctcagggctttcctgtcagtgccaagccagttccccagccaggtttccgtgtgccatttgccagcgtgtgggagctctgcgcgtgtgtgagggtgtttgtagaagagggcagtttcctttcaaatggccttaggaagggaaaagagtactccctccagcccctaggtagccttggccagggatgtgggccaagaacagtctgtggagctggccaacttgtggcatccactccaaatagcagagacccagtcacgcctgcttctggtcctccctgccctcagtatttggttttgtacaccaaagatgatctggcccatcttcctcccagaggcacaacagtaacatgttcctctgtcagcctgtgaaggcatgcagggttctgaagccacagactcagtctccccaagtcagcaatctctttctctctctctcctcaaacttcatcgcattcatagaagctgcttgcagggtcgccgggctaaccagggtgatcggcgaactttaccgtacagtacctcagtctagctgtcagatcaccccttttgctgtagcctctgttgaggtttttatatttgtgatcattggtaattcagtgtcctatgaagtgggcacagctccccacagagagcaagttgtcagcaggtctctgtgcactggtattggggcagggcagtgccctgggggtaagctaggtggctcagggagtggcagaagggccatttttccctctgccaaaaagacttccttggatttgtagatgttgacccagagtcctctgtcccctcctgaagaggattttcttactggtttctactgaaggggaggtaggggaggaggaaaaaaggaccatgtgtgatgctgttagacaagacactgacgctgattatggagggtctcctgcaggcccttgtgggctccttggcaaggccccaggctgggaaggagctccccccactgcccatcctgcccgctttgtggcgggtagagtcagtgacagggaggcagccctccttttgtgtatatagagtgagctgatttgggctcaggaaaacctagtcgcttgttgctctcgtctgtgacatttttgtacactggtttgctactcatggcaagaaacagacaaagccccatgaaaaataaaacaaaacaaaagtcatttcaaacaaagctgttgttttgaaaactcttgctttcttttggtgtccattttgtgttctattttaaagaatctttcatttatattggtgttattgtagtgaagagaatgtgataggctgatctgtaatggtttctgtcaggagcttagcaaatgcctctgcccctcttcccctacccctgtccttcctcagttcccagctgggattgctatgcactgggcagacccgtcactgtctcccctgaacccccacacagtggcttcccttagaaccagtctttgtactctccctaaacagcagcaggcttaggatttttgtcaggctggttcttgcgtgctctgtgcccccaccagtttgctcacctcttggggcattttgtaatgtgttttctctgtcttgtaaaaccttttgattgtaccgaaatggtatctgcagtcgcctttggaaataaatggtcattaatttgtgtacttagcattctga

SEQ ID NO: 336495 - DNA, 3712 bp, Homo sapiens
gctaggtggctgggtgaatcggacgaggctgtcacctggtcaccatgatgcatatctttctcctggcctgccctccatgtcggggagctatcgtcgtcttcaagctacagatgcacatgttgaatggagctcttctggcattgctgtttcctgtggtaaacactcggctgctcccctttgaattggagatttactacattcagcatgttatgctctacgtggtacccatctacctgctttggaaaggaggtgcttacactccagagcccctcagcagtttccggtgggctcttctctcaactggcctcatgttcttttatcacttcagcgtcttgcagatcctcggcctggtcaccgaagtgaatttgaacaacatgctgtgtccggccatctcagacccatttctggaagattctgtagatctgtttcttggttttacagggccagtgttgtttccctagggccagatttcttcagtgtatccacactcagtgctgaattgtttaatgtgggggacatcacgtcctcctcatcctgtctacccccaaatcccatgtctaggttgaaagggggctgccaaagaattaagtcctcatgggtggaggttcaggtgctccacaaggaggagcttttgttgaaggacttcagctcagttatgcacggacctcaagcaggcaggaagtggctgggcattgctgactccacattgactcccactaggaacagatttgcttaagaacagaaaagctcatttggtgattttgtctgatgagcctccctttcccctgtcccactctaggcaaccacagttgacctagaccagttccagtattccagtttgaccgtgttgacctacactgagcttcggtgcctcagtggtcataattttagcaagtggacctataggaagcaaccctgggagggaccgtccttctgcagaggcctgcgggcattgaggctatcaatccccagggcttggggagcaggaggggagggcaccaagtgctcttactctcctgagctccttttgatgcgtaagctttgtttttggccctctttgaaggcagggccaaacttttcttagtgcctctcaccttagggtggccctccagggaaggtgctccttgaatggctggattggccctgcccaccgtcaaactgctacatgtaggaatagctgatgaggaaatacacaaggcctcagtgccccttggcctctttacaaaaggagaagttggaaggggattgtgggaggagcccctgggggcctggtctgtcctccaccagaacttggagttgctgccagcagaggatctgtgcctcagctgaagactagctccggaatgtcataggggtgtgactgtgtaggccttctcctcctcctcgtttctgtggcatggcacaggttgcctggttgctcgagccttccccatgttgacatcctccacaagcttgcctttgctctgtctacagcttagtaccccattctggagggcactttctggtgcttggaaggagagaagaaagcaaaagccacatgcctggcatggccaagccagagacagatccacctgtcagaggaaggaagaagtaaagggggcatgcagggcttttgggggccagattggctcagaaacatgtaggtcaaaagaatagagggggcccagtctataggcttcacaaggagccatggcctgtatttggggcattggggagcataaggcatctgaactggtccagatctcactcttatcttgggccaagccaacgtggagagaagcaacccaaccagactcttggcagcctgccttacagggtagcccaccttatagggtagccctcatatctgccctgtgccggccctctactgccccagctttggtacaggagtgagggagaagctggagcttgcacacccagtggccagtggggctgtcttcccagctcctcctcagggctttcctgtcagtgccaagccagttccccagccaggtttccgtgtgccatttgccagcgtgtgggagctctgcgcgtgtgtgagggtgtttgtagaagagggcagtttcctttcaaatggccttaggaagggaaaagagtactccctccagcccctaggtagccttggccagggatgtgggccaagaacagtctgtggagctggccaacttgtggcatccactccaaatagcagagacccagtcacgcctgcttctggtcctccctgccctcagtatttggttttgtacaccaaagatgatctggcccatcttcctcccagaggcacaacagtaacatgttcctctgtcagcctgtgaaggcatgcagggttctgaagccacagactcagtctccccaagtcagcaatctctttctctctctctcctcaaacttcatcgcattcatagaagctgcttgcagggtcgccgggctaaccagggtgatcggcgaactttaccgtacagtacctcagtctagctgtcagatcaccccttttgctgtagcctctgttgaggtttttatatttgtgatcattggtaattcagtgtcctatgaagtgggcacagctccccacagagagcaagttgtcagcaggtctctgtgcactggtattggggcagggcagtgccctgggggtaagctaggtggctcagggagtggcagaagggccatttttccctctgccaaaaagacttccttggatttgtagatgttgacccagagtcctctgtcccctcctgaagaggattttcttactggtttctactgaaggggaggtaggggaggaggaaaaaaggaccatgtgtgatgctgttagacaagacactgacgctgattatggagggtctcctgcaggcccttgtgggctccttggcaaggccccaggctgggaaggagctccccccactgcccatcctgcccgctttgtggcgggtagagtcagtgacagggaggcagccctccttttgtgtatatagagtgagctgatttgggctcaggaaaacctagtcgcttgttgctctcgtctgtgacatttttgtacactggtttgctactcatggcaagaaacagacaaagccccatgaaaaataaaacaaaacaaaagtcatttcaaacaaagctgttgttttgaaaactcttgctttcttttggtgtccattttgtgttctattttaaagaatctttcatttatattggtgttattgtagtgaagagaatgtgataggctgatctgtaatggtttctgtcaggagcttagcaaatgcctctgcccctcttcccctacccctgtccttcctcagttcccagctgggattgctatgcactgggcagacccgtcactgtctcccctgaacccccacacagtggcttcccttagaaccagtctttgtactctccctaaacagcagcaggcttaggatttttgtcaggctggttcttgcgtgctctgtgcccccaccagtttgctcacctcttggggcattttgtaatgtgttttctctgtcttgtaaaaccttttgattgtaccgaaatggtatctgcagtcgcctttggaaataaatggtcattaatttgtgtacttagcattctgaattttagtctcaggtgtttctgttgttgaagatccttgaatgaaaaggaaccctcaccatggggcttactgttataatgtttcttcatttactgttattaaaagatttatgagaacccagga

SEQ ID NO: 336496 - DNA, 2928 bp, Homo sapiens
gctaggtggctgggtgaatcggacgaggctgtcacctggtcaccatgatgcatatctttctcctggcctgccctccatgtcggggagctatcgtcgtcttcaagctacagatgcacatgttgaatggagctcttctggcattgctgtttcctgtggtaaacactcggctgctcccctttgaattggagatttactacattcagcatgttatgctctacgtggtacccatctacctgctttggaaaggaggtgcttacactccagagcccctcagcagtttccggtgggctcttctctcaactggcctcatgttcttttatcacttcagcgtcttgcagatcctcggcctggtcaccgaagtgaatttgaacaacatgctgtgtccggccatctcagacccatttctggaagattctgtagatctgtttcttggttttacagggccagtgttgtttccctagggccagatttcttcagtgtatccacactcagtgctgaattgtttaatgtgggggacatcacgtcctcctcatcctgtctacccccaaatcccatgtctaggttgaaagggggctgccaaagaattaagtcctcatgggtggaggttcaggtgctccacaaggaggagcttttgttgaaggacttcagctcagttatgcacggacctcaagcaggcaggaagtggctgggcattgctgactccacattgactcccactaggaacagatttgcttaagaacagaaaagctcatttggtgattttgtctgatgagcctccctttcccctgtcccactctaggcaaccacagttgacctagaccagttccagtattccagtttgaccgtgttgacctacactgagcttcggtgcctcagtggtcataattttagcaagtggacctataggaagcaaccctgggagggaccgtccttctgcagaggcctgcgggcattgaggctatcaatccccagggcttggggagcaggaggggagggcaccaagtgctcttactctcctgagctccttttgatgcgtaagctttgtttttggccctctttgaaggcagggccaaacttttcttagtgcctctcaccttagggtggccctccagggaaggtgctccttgaatggctggattggccctgcccaccgtcaaactgctacatgtaggaatagctgatgaggaaatacacaaggcctcagtgccccttggcctctttacaaaaggagaagttggaaggggattgtgggaggagcccctgggggcctggtctgtcctccaccagaacttggagttgctgccagcagaggatctgtgcctcagctgaagactagctccggaatgtcataggggtgtgactgtgtaggccttctcctcctcctcgtttctgtggcatggcacaggttgcctggttgctcgagccttccccatgttgacatcctccacaagcttgcctttgctctgtctacagcttagtaccccattctggagggcactttctggtgcttggaaggagagaagaaagcaaaagccacatgcctggcatggccaagccagagacagatccacctgtcagaggaaggaagaagtaaagggggcatgcagggcttttgggggccagattggctcagaaacatgtaggtcaaaagaatagagggggcccagtctataggcttcacaaggagccatggcctgtatttggggcattggggagcataaggcatctgaactggtccagatctcactcttatcttgggccaagccaacgtggagagaagcaacccaaccagactcttggcagcctgccttacagggtagcccaccttatagggtagccctcatatctgccctgtgccggccctctactgccccagctttggtacaggagtgagggagaagctggagcttgcacacccagtggccagtggggctgtcttcccagctcctcctcagggctttcctgtcagtgccaagccagttccccagccaggtttccgtgtgccatttgccagcgtgtgggagctctgcgcgtgtgtgagggtgtttgtagaagagggcagtttcctttcaaatggccttaggaagggaaaagagtactccctccagcccctaggtagccttggccagggatgtgggccaagaacagtctgtggagctggccaacttgtggcatccactccaaatagcagagacccagtcacgcctgcttctggtcctccctgccctcagtatttggttttgtacaccaaagatgatctggcccatcttcctcccagaggcacaacagtaacatgttcctctgtcagcctgtgaaggcatgcagggttctgaagccacagactcagtctccccaagtcagcaatctctttctctctctctcctcaaacttcatcgcattcatagaagctgcttgcagggtcgccgggctaaccagggtgatcggcgaactttaccgtacagtacctcagtctagctgtcagatcaccccttttgctgtagcctctgttgaggtttttatatttgtgatcattggtaattcagtgtcctatgaagtgggcacagctccccacagagagcaagttgtcagcaggtctctgtgcactggtattggggcagggcagtgccctgggggtaagctaggtggctcagggagtggcagaagggccatttttccctctgccaaaaagacttccttggatttgtagatgttgacccagagtcctctgtcccctcctgaagaggattttcttactggtttctactgaaggggaggtaggggaggcttgaccaacggaacaagttaccctaaggataccgtgcattcctattctagagtccatatcaacaatagggtctacgacctcgatgttggatcaggacatcccgatggtgcagccgatattataggttcgtttgtccaacgatt

SEQ ID NO: 336497 - DNA, 1526 bp, Homo sapiens
aaagttgctagctgggggcagagacggccacgcggttgcaggagtaagagatccctctgtggcgaattggccaacggctcctttcaaccctgcctcgttggtggccactggagaagcgcggggggctcccccagacagccgtggggacaagttagagccagcactttaccccgggccttgcgtgtagcttcccctcccctactctcggtgccctggtgtctggaggggggttgtgggggtgtgcccgccttacatggtccaccacccgggcaaccctctgggcttgtgttccatctcactcttgcttcctgtactgtggtcaaggggaaccactgcatcatgtcccggtatagctaccagagtctcctggactggctctatgggggcgtggaccccagttttgcaggcaatgggggccccgactgtgctgccttcctctcttggcagcagcggctgctggaaagtgtggtggtcctgaccctggctctgttggagatcctggtggccctgcggcacatcctgaggcagacgaaggaggacggtaggggtagccctggcagccagccagagcaggtgacccagcggccagaggaaggcaaggagagcctgagcaagaatctgctcttagtagccctgtgcctgaccttcggggtggaggtgggctttaagttcgccaccaagaccgtcatctacctgctcaacccctgtcacctggtcaccatgatgcatatctttctcctggcctgccctccatgtcggggagctatcgtcgtcttcaagtaagagaaaattggcttttgctctgttgctcttcagagtatttttgtctgtttgctaacaagactgataacacattgctgtgaacaccttgggattgtaccattttgtctttgcacttcccaaagggatgaaggtctgtgagggcctactgaaacagggaaatattgtttgtgaagacctggtttttgtcaagccgtcaaatcctttttagcaaatccttccagtaggggatgtatggccaaggcatgctcccttggaaggttgctgccctgctaaaatttctcttgagagcatgctaggggccagacagcttcctttctctcaagaatctttgctttgtgagcctactgctccactgagcatatggttcttcacattgaagggcattgttcttatgtttttatggggttttcccccctaaagtgcaaattaaagtgaggagaggaaaatgtccactattacaagttcagactttcataaaaatagcaagcatcaaatctattaaagtatattgcaggcaaatagtgtttctctgaaggcaggtttatttaaatgaaattatcaagagtcctggaaccctcattttaaccgtgagttgtgaccacctcacttatcaaaccttttattagagttgctaatgagaagccaaatcgactgaattaatttcatctcttttctccttccctggccccgattctggagatgttcctgagcagtgaaatggctgcaagccagaggaagggaac

SEQ ID NO: 336498 - DNA, 124 bp, Homo sapiens
tgaatatcccacagtggaaagggttgaccggttggcggaaggcgcttgttgtgattcagttgggccacataatgaattctggtttgtttctgtaatagaaaatgcagccttcgctcttctatca

SEQ ID NO: 336499 - DNA, 198 bp, Homo sapiens
acggttcctgccctgatgagttaatgttataggggcagaggctgacaataagcaagtaacagaatcatggacacaatgattccaggtggtgatgtgtgttctgaggacagtgatgcagggtagcggtaggtagtgtgtgtctgtgcatgtgtgtgtaagtgtgtagatgtgtgtttatgtgcaaacttaagtgcagtt

SEQ ID NO: 336500 - DNA, 283 bp, Homo sapiens
agaaattaatgcagagaactcctagttgggcaatcagttccagactccacagaccccaggacacaaactctattcaagaatctgtttgtgatggttcagaagttttcaagcttgctttgggtacaaactgtatttccaacacttctagccctatatatacctgtcaatgatattatacttataaatacaaaagtccttattatggatgaagaaatagattaattaaaattgtatagattatatattagcatatgatattatacatcattataaaaacgaagaa

SEQ ID NO: 336501 - DNA, 203 bp, Homo sapiens
taggagagggagaggtgttttggaaatataaactaacctctttattgacagataggaattaagacttgagtttactttttcacctgtatagatttatcctcttgaaagggctgggtatcttctacagttgctgaagtttagaatagttaatgtttttgtgctgttttgcaaggaagtgtggacctgttggggggaaagaaggg

SEQ ID NO: 336502 - DNA, 537 bp, Homo sapiens
agggtgggtttttgtctttttggcccaagacagagatggtggatgaagcttctccttcaaatcttcaagatttaaagaaattgctccgcctctttgcctggaggaatgccgtgctgctcaaaacacacttttggacacggcacatttttctgtcacagtggaaagacctgactccctcaaaagggtgtttgcaaaaagcatcgcgttctcagaatgacaaaacagttttaaaagaaaaaaacattgtgtcagccctgcagcttatcaatataaaatgaagactaagattcatttatgtgaatggatcattttttgggggagggagttgttaaaaattcatatatcttggctaatggaaccacttccatatccacaatgaaaaaaattaaaaaggaggcttataaaacctttcctggaacaaccagaaaaggagtgagtccctgaaaatacaaattggtggtgttatctttgcatatttgcaaaattctttgaacttctgaatagtctgttgtggacctagtctgctgttactttgac

SEQ ID NO: 336503 - DNA, 419 bp, Homo sapiens
gaattagctagtcctgtgagggcagtctctcaaggatcaaggccccagatgccagagcatcaagaatatggaaaatcagagaacatgatcaatataccagctcatccctggatgaagctccctgcctttcctcatacagacaaaaaagtgcaatcctcaattttccggcctaccttgtagctgggagctataaaatgaagttcatcaggcatgagcggtctgctggtactgcttcttcccgcttccccttcttcttgctttgggatgggatgcgatgtttgctgctgtaacagccatttgcagccataaggaaaaggccaaatgaattgcagtggtgtccattgaaccaattctgtatttttctggacttcttgttttgtgagaaaaataaactgctatttaaaccactgtagtcagat

SEQ ID NO: 336504 - DNA, 617 bp, Homo sapiens
aacagcctggacaatggcatggagaggggaaggactcattgagactagctgttgtattgctgaagagttaagcctttattttatagatgtcagggatacagggaagaggtaaaacctagggatatggttcctggtctttggactagctgaaagcatttgggacacatagaacttcatatacagcagctcattctctttcttgagaatctatccagaatcatgttgcaggaaacatcaagccatcaaggggaggaaagatggagcaagaaacttgggggaagcagaagacagtccagtacacagtaaggaatggcatggagtaagagattcggaaccaggactctgaaaagttaggtaattttgcagttcctcctttgcatgggtttggcacagaaccaggcaatggtgacttaaaagtcatttagatctagatcataagtttccattgaaacagcctccagagtgcaggggactggatcaatgggggattgagctgggggaaggggaaaatgggaagccaaaagcggagaaattcagagaatcccctgcagtaacactgaagtatctgcagacagcagggtgtataatgatgcatgataaatagctgtttcctttcc

SEQ ID NO: 336505 - DNA, 1399 bp, Homo sapiens
atcaaattgctgcagccccttttgttgaaaagactatcctttcatcaatgaatttattttgcacctatgtcaaaagtgttatctgcctgaatattcatgaatgggagactactgagtaaattatgccaccaccacaaaattgactactatgaggtcattgaaagcagagtaagaggagaaggaggagctggaggaagaagaggaagagatggaggaggaggaggaaggaagagaaaggaggaagaataatatacatataaagttatctacacagaaaatacctgtgaaattggttttctctggggaaaggaactatctgggaaatgaggtggaaggaagattttcactacattcctttcagtgccttttgaatttcatatcacatgcatgtattacccatatgaaaaacagaataacttttaaaagttatagtgcccttcattttataatcacaggctattgacgcctgttcatggtgtttatcccttccatatcttgctttcttgattctcagaacaagaagacagtgggccaagtcctcaggacaagtgatgcttggttgttttaattgttgcctttttgtcaaaagcagaaaagcaggtgagaagttttgagccaccccaaagagaagtttgattctgctggtgctgtcaaagatgactgcaatgatagttttggccaaagctccaaaaagttccctgagagactcagagacttgtgtgtttgtggttgcaaggggttagcaaagggagccctgtatgatgagaactggccaccctaaaggttttaccttccaagtgcagcccatgcacaccaacagcatagagctgcagccaagacagtctgtgatgagcagattggagcaacactgtctggaattgatactctcaacagaaattcccttaatagtgtgggattccaaggagggaagaccccttttgttcagagtgataaatcaaggtgagctcttttatcccaatatatattaaattgtagtaatttctctttttcctgtcctgggtgttccacatcactaactgaagcaaggtgaatatccagttaactcagtccaacctaagaacactctgtcttccaaaataatcacttgagttcatctacaaaaggttgaaactttctaataaaagcaaatacaaagacctgctttaactaactgtgtgtgccttctcatagtttcctatgtcggattcccagagaaagcacataattcctccaaatgagttttctgatcacttaaaccaatggagcattccgttcctctcattacttgtcataatgaatattttcaaattaatgtatcacacagttaatatgtatgacattgttgttttcttatcaatttgctgtcaaactttgaaataaacagtcccataacagcaga

SEQ ID NO: 336506 - DNA, 120 bp, Homo sapiens
caagtattagaaaaggtttaattataccctctgggtaaagtaggtgaatgttttgtgactcaagcaaaagagaaataggctgagaaaatttgtagttgaatgtattcttttttttttttt

SEQ ID NO: 336507 - DNA, 259 bp, Homo sapiens
ctgactggatcacttatcccccgagtgcgcaccgcggggaagacagaaagctgaacctctttttttttctttttgaaccgtgtctttgacctttgtgttttttaagcagcagcttactttcctgagagatcttctagtgtttttagtggcctttagatgtttgacccttctctgtgtgtgagaacatggaagtaactttgtaagacacgagttttttctctcatttcctcattgttcttatatcttgtcacttaatctc

SEQ ID NO: 336508 - DNA, 353 bp, Homo sapiens
ccacaatcttcctctcccaagatgtgaactctccctctctgtgttcctttctctccatcagtatctcctggctatggtcatagcgtatttcagccgggccggcctcccctcctggcaataccaacgcattcatttcttcctggctctgtgagtggtttgctgcctcctatccgtcaatatccaatgccctgggacagcgggggaagtgggattccagcctttcatttattctttcacctatttgtcctctttactctgtgtacaaaaaagacaggattatagtctcaaaaaaaaaaaaaaaagaacaaaaaacaaaaggaaccatgaaccgctcctaaggggagaagaaaagg

SEQ ID NO: 336509 - DNA, 918 bp, Homo sapiens
aggtggagctagtgctgagtataggaagaccatgtagaaataccaaagtcagacccattggaggtttgagcagattgtgagattttcaggtacaccagggaggcaagatagtacatctctagtgctggacttaaactgaaggcagtccttctttaaattgttttggtgccctctgggcattaaacagatgcagtcttccacttatggccaatagttagagccacaaagagtctatttcaagtttcaggagatgaatggcatctctgctgctctttgagagactttaaggtatttttcccctgaattgtgattgggttcccaggcagggttcagaacattgtgtttattgtctgccgtattatcttttaagcaatgctgtactgcctgatggtatggaggaggtaacatagatgtttgtaaacatacagtcatttgatggctgaggaagttttgccacccagctagaagtaatttacgtattgttagctagaagaatttcaacctgaaattgacccaatttttcactctttaaaacagagcagttgctagaatagtgggtaggtttctagatttaacctggtttatcttacattttagttggtcaaaccttaatggctttttcaaagacttagagaaagtttaaaagcaatagtgactaaatagatggtggagcagaagggagcatggtttcatccacgagcctgagttttctttttgaattttcctctactaaattatatctttagttttggaatcatacgtcacatcaaattttagattagagatggtaaactgtttggcctgtgagccagatacggcttgcaggtatgtattttttggcctgcccagtttgttaaattctgaataaagccatcatttaaaaaccacaagttttaggcggggcgtggtggctcacag

SEQ ID NO: 336510 - DNA, 506 bp, Homo sapiens
gggtagtgcacttgccattagtccttttaagttgcaattcttcccaccactagaagtaatttacgtattgttagctagaagaatttcaacctgaaattgacccaatttttcactctttaaaacagagcagttgctagaatagtgggtaggtttctagatttaacctggtttatcttacattttagttggtcaaaccttaatggctttttcaaagacttagagaaagtttaaaagcaatagtgactaaatagatggtggagcagaagggagcatggtttcatccacgagcctgagttttctttttgaattttcctctactaaattatatctttagttttggaatcatacgtcacatcaaattttagattagagatggtaaactgtttggcctgtgagccagatacggcttgcaggtatgtattttttggcctgcccagtttgttaaattctgaataaagccatcatttaaaaaccacaagttttaggcggggcgtggtggctcacag

SEQ ID NO: 336511 - DNA, 721 bp, Homo sapiens
tggcccgagtgtgaaaaatgactcttcttttaaggactcgtaataaagcagaggtgacacagaacactcaaacaagacttttctaaaggttggcactaataaaagggaagtagacagaaagtaccattttagacaataggacaaaatcccttttgtcctccatgcctctgagcccaaagagagactctaggacccttctgtctcagctcccccatcaggggcataccaggggtccccaaaggccaaggagcacaagctcagagagacagcacactcaaggtctccacaccaaagctaagaagccgagccctcctgcttgcctgtctacgatctgtccttgcagttcttgttcctgtactcacagcggggctgccttacccgggcaggcctcaactgaacaccacagtcccacaaaagtcccccactgttcacaagacaatcacatggacagaaacaggaaaaacagatgtatttccttacactgaactagccccctgtctaattaatcctccatactccctccctccctccagaattgtttccttaaggcagatctcatctggtcacttctgaggaacagtggtgaaattgtttgttcctgacagcagacagccccattgcagagctctggtttcatgttacattaagtattagtgctgttctttcaggagctattatattgtgacatcaaagatttcactgacggcagtggcaatcgata

SEQ ID NO: 336512 - DNA, 421 bp, Homo sapiens
agatgtactagctgcaactgtgactttgtcatagtggaaatcacagacatttcaatatcacattccagtcatttcagagaccttgaaataacattgctgctcaccacaccttcaaaacattagctctgatttaatgcttggaaaagtataattttgttttttcagtactgtaataggtgcattttaatatcattggtgtcttctgtaatctttgtgactttacttttatctgtttaaacactttattctgagaaggcaggcatgtgtctcactagtccaccaaaaaagaccataacataaaatgttaagagcccctgagctaatatcttaaaaatgagacaaacttcttagcttttctgacacctctggtaagccatgcatgaaaaggctgcacccccatcccgcagtggttagatttgtt

SEQ ID NO: 336513 - DNA, 412 bp, Homo sapiens
tgagtgctgtgcttgttccagagctttctggggatcactgtgctcagtgcggtgagagacagaagaatggataattcaatcatgctgattgttcattatagtcagcagcaagcatttattgggaccattctgggtgctaaacagtggaactagagaaaggcacatgtcacagcctccagttctgagacgaaggatacaccacgatcatagcctccacttctgagatggatacaccatggagacaggcctgtggtgccgtgagcaagaggtgaactcagggtttgagtggtgtgggagtgactcccagcgctgctgcttcagagctgtggcaccctggacgtgccctctcagcccattttctagggaaactacttcctcatcagcacttcctctctacctggtggtgaggagg

SEQ ID NO: 336514 - DNA, 175 bp, Homo sapiens
tgtcttctctggtgggttaagtttgctgccagaacatgaggttttgtgggtggaggatgcaaatggggagtggacattgcacattgaagcccacacgtgcaggtgcaggccaccagggcagcccttgcttggaaatctgtcatctcaccttgccacactcacagccatttaggta

SEQ ID NO: 336515 - DNA, 443 bp, Homo sapiens
tcaagtttcgcccaagatgtaggggctgaagcagacaggaagatgagcactgctccaggaagcctcccaccagtgcagaagagctcttttctggaagacagggctggatgccacagtgaggcaagtccagccccagccctaggtcagtgtctttttttggttttgtgtctattcttaaggaggtgtaaagagctcttttctggaagacagggctggatgccacagtgaggcaagtccagccccagccctgggtcagtgtctttttttggttttgtgtctattcttaaggaggtgcttctggtacacaggcagtgccaaggccccctacaatgaagctacatggctacagggagttctgaaggttatagaagactatacagcctttgggatcttagctctgccatgcactcgctgtgtgttttgagcctgtgacttgacctctc

SEQ ID NO: 336516 - DNA, 247 bp, Homo sapiens
  misc_feature (10)..(10): n is a, c, g, or t
gttgaattantattataaatattttttttattttattatatttttttgtatgtcccgcctggtgaacagtaaccttccagaaagaggtaaagcagagcatgaagaggaagaagatgatataaagccctaaaatgtgcactcattgtattcaatagtttgttttaaaacaattatgaaatgacttgttttaactgaagttgagttgcttttgcataatcctagttgtgaataaaaagttttcaaaagc

SEQ ID NO: 336517 - DNA, 231 bp, Homo sapiens
ggtgtaggtgtgaatttttatatttagtgttttaaccacattttttgttttggtaaccttccagaaagaggtaaagcagagcatgaagaggaagaagatgatataaagccctaaaatgtgcactcattgtattcaatagtttgttttaaaacaattatgaaatgacttgttttaactgaagttgagttgcttttgcataatcctagttgtgaataaaaagttttcaaaagc

SEQ ID NO: 336518 - DNA, 389 bp, Homo sapiens
tcaggactcatgggcttcctctcactctccacctctctattgtcattccctctgagagtaggattcaatttaaggcacatgctccccacatggtgggaaaaacaaatgccagcagcccagactatatcttcagggcttgcaatccaaaggaagggagctctctctctcccagcatctatgtttcaaatctcagaggagaatgggattctcagacactaaatgggaagagataggatgtggctcctcttctgcttaaaacccttcactggagtcccaacatctacttacgccacaggataaaagccattgtgcacttaactccatggtgctacacaccattacctttgcacaagctcctctctctacagaaccctcatccccaacttgtc

SEQ ID NO: 336519 - DNA, 643 bp, Homo sapiens
cacagtggctcatacatgtaatcccagcactttgggaggctaaggcaggaggatcacttgaggctaggagctctagaccagcctgggcaacataatgagaccccatttcataaataagtaagtaagtaagtaaataaatgtgggatgcagcaaagcaggactaagagattaatttttagcattgaatgtatatgttaaaaaagaagaaaggtaaaattaatcatctaagcttttaatttaggaaaccagaaaatgaacaaattaaatccaaaggaagcagaagaaaacaacaaaaatcagagcaaaattgaaaacaggaaaacaaagaaaatcaacaagactcaaagctggttctatgcccttaaatttgataacttaggtgaaatggaccaatcccttaaaagacacaatctaccaaaattcacacaagaagaaacaaataatctgaataagcctaaatcaatttttaaaacctgaataaataattaataatcttccaaaacagaaagcaccacactcaagataattcattcgtgaattctatcaaatatttaaggaacagatgataccaatattctacaatctgtagaagcagagtgagcacttctaactcattctcagaggccaacattaccccgatcat

SEQ ID NO: 336520 - DNA, 1777 bp, Homo sapiens
gtaatatatatacatatatatataaatatttttttcttctttgtgataagtaaaccttacttatctgtcatactagggaatttctcgtgattcttaaccttttctcttgagcctttgttagataagtttagcatgccaaattccaaacagtaattaaaatggtagaactttggaactttttaaattctaaagctctcagctataaagttattgataaaatttcatacttcagttttcttctctgatctttaacaaacaacttttggtgcttcctctggcaaaacgctcctaacttcaatgaagtaaataacaaaactggcaattcatattttaatgtatagtttcaaataatttattatttcttttgcttccccaaataacccagctaggtgggtaaggcattaccccattttatatagagggagacattgaggtttagagatgttgactgagttgctgaagtttttgtggattatagcgatttgcctggaattgaatccaggtcatcagttcttagttaagtgttctttttcagtgaaccattaggtcattttatgacctaataagacgattgtggacacctaaggtttgggaaagctaaacctttactgaacttatttgcatatatttagaaataaattaagtatataatttgatttaattaattggtttccttgactttttctaatcacaaagtcgctttctataaattttaatgagtttatgtaacaaatgagtagaggcagaattggtttagagttgtatgctaggcttctcactgctgtgtagaaaagtggaaatgctggaatagactctttagaaaataaagcaggtcacagccagatggaggacccaaataattggccaagggggttaaagtttaaatataaacatagccacattaattttgttaagaaacactaatgtcgcttgagtgaagttgtaaaaacttaaatatacttcactgtatttaatgtcttgctgggttctgtggggattatatgtcatcgtggtctctgtcttcaatcaatctgaagtttcattggggagataaatctcacatgaaataaatagcagtatgcatgatatactctgtggtggaatgccaaaatgacagtaccgtatcaaacataaatactctagcagtgtgagaaccaaagacttagagaaggaaagggtttatggaggatgggcattggtttttgttaggtattataaatgtacaagtttcctaaagcttattaaattttgaagccattatttgcaaatgtgacatttactaattttaagtgtaaaataattgaagattagatctgaagattagtcaccaagcaactttaaggagtgacctcttctttattgcattatagtaatcttttacacaaaagaagaaaactaagggttttcaattttactccttgttttgcttatttaattcattgtaagccccctaaaggctcattctaacaaaaaagaatatgatactagactgggcatggtggctcacacctgtaatcccagcactttgggaggccgaggcaggcggatcacaaggtcaggagatcgagactatcctgactaacacagtgaaaccccgtctctactaaaaaatacagaaaacaaaaaattagccgggcgtggtggcaggtgcctgtagtcccagctactcgggaggctgaggcgagagagtggcgtgaacccgggaggcagagcttgcagtgagccgagatcacaccactgcactccagcctgggcaacagagcgagactccgtctca

SEQ ID NO: 336521 - DNA, 386 bp, Homo sapiens
ggaggcggggtccactggggaagaagtggggcagggcagggaggcaggaactctgctccaccgagatttatttgggggaaactttcctcggttaatcccttggaaaagaccatccaagctgtcttgtcctagcgcagaatctttctttagaaaatgacactgaaattatttgaaacataagttgcaaagaactacctcttttttggagcaagagactttgtaactaaactttcattggtaaggaaggttaatacctgtttcaagttgtttctgtaccaacagctcagggagggcatcaacagaaatttgcaagaaggattccagggcaagtgcttcattacagctgcacactgtgcaggtactgctcagctcagtcgaacggactg

SEQ ID NO: 336522 - DNA, 743 bp, Homo sapiens
tgggatgtgtggctactccagtaataatacctgggcatcgaagttcagttcaagtccagggccggggcagacttctccatctgtgccatccttctcccttcttccctgcatcctttcttctctctgccccttcctgaggcaccattcccctcagtgtctgataaaatgtcagcctccaccccagttgataatttttatatagaaaaaacatctgaaaacgtggagttggaagactcaggatgtcaactgtcagtgacttggctttgaataggcctttttatcactccgagctttggttttctcatctgcagtatggggataacattcctaactttatgggttttgctgggcagatcaaacaaaagaatttacatgaaaatgattcatgactaatgaagggttaatacaaatgtaaattattattaataagattatagaggggtcttggacaaagcaacccaatgaacgactttatagtgggagaatttctagcttcaggggaagagacattttggaagaggttggttggtcttttctggggccccaactcttatcatgggggcattcatccatgtaaataattgaccttcaggtagagtggattgtggagacagacctgctcaagtttgaatctgttctctgcctacttgtgtgatcttgggcaagatttttaacttctctgggtcttggggttactcatctgtataatgggggaccaataaacctgtaatttagggtcttgg

SEQ ID NO: 336523 - DNA, 149 bp, Homo sapiens
ctcatgcaccactgtctagacctgcacccactgttcagaatggcagccatgagccacgtgtggcaactgggtactcaagtgaggcagccgtgaattgagatgtgctatgaaagtaaaatacacctgctattgaaacttctaaaactagg

SEQ ID NO: 336524 - DNA, 702 bp, Homo sapiens
accaaccaaacaaacaacaacaacaacaaataaagactcatttcctggaagcctctgatttaactcgtggagatcattcccttctccaaattgtggcccttaccatagagttatttatttgtgactaaactatgtcatcttgcattgttatctgttttcacacagtctcttacagcccaagtagactgtaagcctcttgagatcagagataatttacatttctttatatttttcagaattcaccatctttccctttggccttcccacattcctgtacactctcgacattccctggttatctggcagttcatattggggaattatggttagctgtggatcaggcctcctctccccactttcctctcagtaatgcatgtagtctctgagggcagacactacattctcctgtgtcttttctggtttattcaatgatagaggctgtaccctttatccttttcaatttcatctacattcttttccttctcctgctcagttcttggaactcccatttctgagtgtctacgactacagtcatggtgaatagaaggtaatgaaactgtgagtcagtgtatcctctagctggagtgtgaaggtgagtcagcagacagcagcagtggatctcttccaccctgaggaaaggcaggagcctgcctggtgatcagggaaggaggccctcctccccacattgtttcctggaactga

SEQ ID NO: 336525 - DNA, 394 bp, Homo sapiens
tgtgggaggaggagggggtgtcctggtctaggggatgtgccatgaagatggctccatcatggagtgactgtagtcttcatggcccaagtctgtagccacctctggtgggtgtcactctagataggatggagatgtgcctgatggagtctttggaaataacagccaacagaacagctggggggtggagaatgggtatcagtgagctctgggggcctggttcagtgtacaaacttaaggagacgaatgcacgtgaaaggtcacaacccctgcagagatgtctggtcacttatgtgtatgtgtgtaactgagggattgtggggaggctggcagcatgtgtacatgcttgtgtgttgttaagtgtagacacgtgcatgtgtgtggggtgcatgtgagc

SEQ ID NO: 336526 - DNA, 526 bp, Homo sapiens
ctcagcctcccaagtaactgggaccgctggcacacaccctataaggtggacaccaccacacctggttaatttattttttgtagataaagggttttgccatgttgcccaagctggtctcaaactcctgggctcaagcaatcctcccaactcggcctcccaaagtgctaggattatagataggcatgagccaccatgtccagcctttacaaattttttgcagataatctcttctttccattcctattgctgcttaccccagttcaggccttcaaaaactttcacttggtctattatcaatagcctcctggctgatgtccccaatgacagttcctcataaatacagctacaaggtttatcttcccaaagcataattctagtcttgccactctccttgctcaaaaacattaaatgtctccccgtagccttccaactagatagagcataaattccttagcttagtatccaaggccagctcctttcatttgtaccctaatccaaaacattttttgagtcatacttaggttag

SEQ ID NO: 336527 - DNA, 481 bp, Homo sapiens
cagtgcattatggccaggatcaaatgccacctccttaataaactcatccctgattcctcattgtgaattttccttccagtaaatgacatatttgcaattttttcacattagcttaaaacattgttttcacatttacaaatttgtatacttagacaatgaggcagaaaactagacttcatttttaaattcccagtggtaacttgcagaccatcttggacacagtcaaaaagtttagaaggcgaaaagaaataattgtgggggcttatatgtgttttactctctttctcatatgctttatggtttatttggtgctttttggatagtcaatttatatatactttcattacaattaatgttatatttaggtattattattctttctttacacttaaaaatcatggcacataccccagactgtacatagtaagtgaacagagctgggattaatatctagatccacctccaaatttcttttacttcc

SEQ ID NO: 336528 - DNA, 289 bp, Homo sapiens
gtcttggccctcagacaactttcctgtgtttgattaagacagctagagaagggctctgccgtggaccctggcagttttgcttgacttgaatgtgtgtgacagttatttaatttgttcatcattaggatggcctcagatttgcaatcagaccttgtagacactgagtcatgtattctgggcaggagatgactttgccgattactacctccccagcagtcatgaaaaaaagataccaccccagtggttgaaatcacaaattgaaatacctgattccaagaagtcaggtatg

SEQ ID NO: 336529 - DNA, 472 bp, Homo sapiens
ctcccatcagaacagacagtaaagacaggaatggcatgtctccagttgtggggcaaggcccctcctagtgtgaagaaaatatacttcctggatctatcattatctctagcatatcagaggggggaataaaaacaactggggtggcaaggccctgctgaaagagaaactcattgttctgcacattcagagacttcctagttgtaaagccgttcagagctcttggaggtgaaggggcagccagggaatcacatagagtgaaagacctgtgtgcagcggccaggtcagagggcgtgtagaagacgacatgaagcattcccacagggcagttccctgaggttctgtcctccagctcttgctgcaaggaattctagaagccttggcctgatgtgtgggaaaggaaaacaaggtgaagaggatgcaggtaggaaaagaagagctgtgacaaggtagtcagatgggaggactgcatgag

SEQ ID NO: 336530 - DNA, 184 bp, Homo sapiens
attggcagatccagaaccaagactgtgtttttctctttgattctggatctgcattagtaaggaaggatgagattcacaagctgacagttccaattttttccctttattagaaatgtaatagttgttcatttacaaaatacagaaaaagggccgggtgtggtggctcacgtctataatcccagca

SEQ ID NO: 336531 - DNA, 328 bp, Homo sapiens
cttctcacacaaacatatcacatttaatcacacattctgacacaatcatacacatacatatgtgcatgcgtgcgtgcatgtagtgcacattcacacgggcacacacaccgcctctactactcgcacctctccatctcttcaggagggttcaggcagggttcattggtgaaatggcttccctagttctattggatcctcatcctctcctggtatttttgtggacccatacagcaatgacaagtgaggtttaattctgccctgtcccatctccaatagttgcctgtagcactgttgaggatttgcaggctgcatctgggctcttcaggaa

SEQ ID NO: 336532 - DNA, 248 bp, Homo sapiens
tattttcttaccatcaagaaattacaatggtcacatacttagtaactgccacataaatactgtttgcttgtaaatacgtgaacttccccctctgaatttttagcatagaaatacaacataaactacatgggttggccacatactcctggaatctggaaatatgtgagaggaaaatttgataaattattttatgcaagcaaaacaaaagcgctggttgctccagaatactttagatgtcgcgaaaggag

SEQ ID NO: 336533 - DNA, 474 bp, Homo sapiens
gctgggatctcttattttgaaactcaccacaaccatttggtcagagtgcttcactggcctccactctgactgctgccgaggggctgatcagaagacaatgagattgcaacagcttctaccagttgtatgctgacaaaatgggtaggaaagcttcctttttccaacagataacagcattggaaacagaactgaaatgcactgtgtcatctcatctccccaagacaagactgtaatgttccaaagcctccttgctcacagaaaggatgtaacagcagatatgtacggaaacataaggatcctaggcatccgggatgcctggccactggtctggtcactcttccttagacctctttaaatcagtacatttcctgagcttggatgggtttgtctattagtgtttcccaaagaacaccaattatgaaagaggtttcagacctgttctcaatagggaggttacttgttaccgattctcta

SEQ ID NO: 336534 - DNA, 161 bp, Homo sapiens
ccaactccataggaaactcctcttcaaaacagtgaaggaaaagaacaagggaaatttataatctttttttcgtgggtgtatatcagcctatgtttttgacaagcagtaatgggaaataggtttcctgcatgcttctataatattttccttgctgttggttt

SEQ ID NO: 336535 - DNA, 370 bp, Homo sapiens
ctattttactcttctatgataatcaacatatgtttatttaatgcctgctctctgtgaggcttaatactttgacagacaaaaagatgaatgaattcaagttttcttctctagaagcttatcatataatgtggaggtaatacctacgtagaaataagaggaaaggaaacttattacatgtgggaaatgaaaccttttgagctgtgcttcaaaggcgatgtaagacttggatctgtagagataaagaagataaagaagaggatggaaatggtagaaaagagagaacaggatgtgcaaaggcatggaagtagattagtgaagagaaaaataattcatttggtaagagattccggtacaaaagagaagcaaaggg

SEQ ID NO: 336536 - DNA, 180 bp, Homo sapiens
ctcccaaagtgctgggatcataggcatgagccaccacacccggccaggatgccagttctttatcagatatgtgtttcgcaaatatgtcctcccagtttgtggctgcttgttttcttttcctagtagtggatgttcgcttttggacgagtttggaccagtgatcctccaggatgtcccaca

SEQ ID NO: 336537 - DNA, 973 bp, Homo sapiens
gcggggtgtgctcgggaattcgtggtgcggttcagacaggtgtgcttctgtaacaggtcttccacaccaagtaagtgtttgccatagtcttgagacaatactagcaccttcatttcatccatccagtccataatgtagagcatttcctggaatatcttggaaataatcgcctcaagctgggttttggaaagagcatgcctacaaactgcgtgtggctagatgggctttcttcgaatgtgtcagatcagtatttaacacgacatttctgccgatatgggcctgtggtaaaggtggtgtttgaccgcttaaaaggcatggccctggttctctacaatgaaattgaatatgcacaagcagctgtaaaagagaccaaagggaggaaaatcggtgggaataaaattaaggtggattttgcaaatcgggaaagtcagctggctttttatcactgcatggagaaatctggtcaagacatcagagacttttatgaaatgttagccgaaagaagggtctcactctgtcacccagactggagtgcagtggcatgatcatggctcactgcagtctctgccttataggctcaagtgatcctcacacatcatcttcttgattagctgggactacagacacttgccaccacgctggagtaatttttgtaaagatgggttttctccatgttgtctaggctggtcttgaactcctgggctcaagcattctgcccgctttggcctcccaaagcgctgggattacaggtgtgagccaccacacctggtctgctttatgtaccattaatcataaatacaaatcatcttgcttacagttacttcttaaagtaaatgtattaatatatgttagagtgcattataaacttttaaatggctacatatttagtaatgacaacaaccaggttgtatgtgctcatacatttaacttaaaaaataaataaataaataaaaacttccaaaagaatatcaag

SEQ ID NO: 336538 - DNA, 681 bp, Homo sapiens
atttagttgatctgattacttaattgccatttcagttttccattttgcttttttcactccttcacaattgggtttgaaactttataaatttcattcttttatcacggtttatacagaatttgagagatttcaggttaatatagtttcagtgatgaggactgttttacttgagatacattgctgtttcctgaaattttctcagaagggctatgttgtgaagaatttacaaatctgataacatttttccatcattaaaatttgaaacttgcatcaaacacctctttttttttttaaaggtggattttgcaaatcgggaaagtcagctggctttttatcactgcatggagaaatctggtcaagacatcagagacttttatgaaatgttagccgaaagaaggtatgtattttaaacttaccagtgtagcttgagttttaatagttttaatacagaaacttaagatggcattaaattttatttttcactctttacccctactttcatcttctagaatagagaatgcttctcttttatcacttcatatggaaacacaggtttatttttttgaatctagtttccaggtaattcctatgggtttggagcaacctgtctggatttctcactgaatgctcctagaacttgaaagagttactgttttgccaggtgataactttatgtacttt

SEQ ID NO: 336539 - DNA, 12946 bp, Homo sapiens
tgagctgcgaggcccgagagtcagaacctgggggagagggatggtctctgcacgggggggagccggaggagccgccgccgctgccgacgccaccgccgcagccgccgccgccgccgccccggcacccgcctcccggcgctgacggtctcgtacgaagccggcgagggggagccagcagcggcggtcgccggcacgccgcccagcatggtccgggaaaccaggcatctctgggtgggcaacttacccgagaacgtgcgggaagagaagatcatcgagcatttcaaacgatatggccgcgtggaaagtgtcaaaattcttcccaagaggggatctgaaggaggagtggctgcctttgtggattttgtggacatcaaaagtgcacagaaagctcacaactcggtcaacaaaatgggtgacagagacctacgcacggattataatgaaccaggcaccatcccgagtgctgctcggggattggatgatacagtttccatagcatctcgtagtagagaggtttctgggttcagaggaggtggtggagggcctgcttatggtcccccaccgtcacttcatgcacgagaaggacgttatgagcggagacttgatggggcttcagataacagggagcgtgcttatgaacatagtgcctatggacaccatgaacgggggacgggaggatttgatcggacaagacattacgatcaggattactatagagatcctcgagagcggactttacaacatgggctctattacgcttctcggagtcgaagtccaaatcgctttgatgctcatgacccccgatatgaacctagggctcgcgagcagtttacactgcccagtgtggtacacagggatatctacagggatgatattacccgggaggtacgaggcagaaggccagagcggaattaccagcacagcaggagtcggtcaccacattcatcccagtctagaaatcagtctcctcagagactggctagccaagcatctagacccacaaggtcccctagcggcagcggctctagaagtagatcctccagtagtgattcaatcagcagcagcagtagtaccagcagtgacagcagtgattccagcagtagttcaagtgatgattctccagctcgatcagttcagtctgcagcagtccctgcacccacttcccagttgctttcatctctggaaaaagatgagccccgtaaaagttttggcatcaaggtccagaatcttccagtacgctctacagatacaagccttaaagatggccttttccatgaatttaagaaatttggaaaagtaacttcagtgcagatacatggaacttcagaagagaggtatggtctggtattctttcggcagcaagaggaccaagaaaaagccttgactgcatcaaaaggaaaacttttctttggcatgcagattgaagtaacagcatggataggtccagaaacagaaagtgaaaatgaatttcgccccttggatgaaaggatagatgaatttcaccccaaagcaacaagaactctctttattggcaaccttgaaaaaaccactacttaccatgaccttcgcaacatcttccagcgctttggagaaattgtggatattgacattaagaaagtaaatggagttcctcagtatgcgtttctgcaatactgtgatattgctagcgtttgtaaagctattaagaagatggatggggaatatcttggaaataatcgcctcaagctgggttttggaaagagcatgcctacaaactgcgtgtggctagatgggctttcttcgaatgtgtcagatcagtatttaacacgacatttctgccgatatgggcctgtggtaaaggtggtgtttgaccgcttaaaaggcatggccctggttctctacaatgaaattgaatatgcacaagcagctgtaaaagagaccaaagggaggaaaatcggtgggaataaaattaaggtggattttgcaaatcgggaaagtcagctggctttttatcactgcatggagaaatctggtcaagacatcagagacttttatgaaatgttagccgaaagaagagaggaacgaagggcatcctacgactataaccaagatcgtacatattatgagagtgttcgaactccaggcacttatcctgaggattccaggcgggactatccagctcgagggagagagttttattcagaatgggaaacttaccaaggagactactatgaatcacgatactacgatgatcctcgggaatacagggattacaggaatgatccttatgaacaagatattagggaatatagttacaggcaaagggaacgagaaagagaacgtgaaagatttgagtctgaccgggacagagaccatgagaggaggccgattgaacgaagtcaaagtcctgttcacttgcgacgtccacagagtcctggagcgtctccctctcaggcagagaggttgccgagtgattctgagaggaggctttacagccgatcctcagaccggagtggaagctgtagctcactctcccctccaagatatgagaaactggacaagtctcgtttggagcgctatacaaaaaatgaaaagacagataaagaacgaacttttgatccggagagagtggagagagagagacgcttaatacggaaggaaaaagtggaaaaggacaaaactgacaagcagaaacgcaaaggaaaggttcactcccctagttctcagtcttcagaaacggaccaagaaaatgagcgagagcaaagccctgaaaagcccaggagttgtaataaactgagcagagagaaagctgacaaagagggaatagcgaaaaaccgcctggaactcatgccttgcgtggttttgactcgagtgaaagagaaagagggaaaggtcattgaccacactcctgtggaaaagttgaaagccaagcttgataatgacactgtcaaatcttctgccctggaccagaaacttcaggtctctcagacggagcctgcaaaatctgacttgtctaaactggaatcagttagaatgaaagtaccaaaggaaaaggggctttcaagccatgttgaagtggtggagaaggaaggcaggcttaaagccaggaagcacctcaagcctgagcagcctgcagatggggtaagtgctgtggatctggagaagctggaagccaggaaaaggcgctttgcagattccaatttaaaagcagaaaagcaaaaaccagaggtcaagaaaagcagtccagagatggaggatgctcgcgtgctttcaaaaaagcagcctgacgtgtcctctagagaggtcattctgctgagggaaggagaggctgaaagaaagcctgtgaggaaagaaattcttaaaagagaatctaaaaaaatcaaactggacagacttaatactgttgccagccccaaagactgtcaggagcttgccagtatttctgttgggtctggctcaaggcccagctcagacctacaagcaagactgggagaaccagcaggtgaatctgtggaaaatcaagaagtccaatcaaaaaagcccattccctcaaaaccacagctcaaacagctgcaggtattagatgatcaaggaccagagagagaagacgttaggaaaaactattgcagtcttcgtgatgaaacacctgaacgtaaatcaggccaagagaaatcacattcagtaaatactgaagaaaaaattggcattgacatcgatcacacgcagagttaccgaaaacaaatggaacagagtcgtaggaaacagcagatggaaatggaaatagccaagtctgagaagtttggcagtcctaaaaaagatgtagatgaatatgaaagacgtagcctcgttcacgaggtaggcaaaccccctcaagatgtcactgatgactctcctcctagcaaaaagaaaaggatggatcatgtcgattttgatatctgcaccaagcgagaacggaattacagaagttcacgccaaatcagcgaagattctgaaaggactggtggttctcccagtgtccgacatggttccttccatgaagatgaggatcccataggctcccctaggctactgtcagtaaaagggtctcctaaagtagatgaaaaagtcctcccctattctaacataacagtcagggaagagtctttaaaatttaatccttatgattctagcaggagagaacagatggcagatatggccaaaataaaactatctgtcttgaattctgaagatgaactaaatcgttgggactctcagatgaaacaggatgctggcagatttgatgtgagtttcccaaacagcataattaagagagatagccttcgaaaaaggtctgtacgagatctggaacctggtgaggtgccttctgattctgacgaagatggtgaacacaaatcccactcacccagagcctctgcattatatgaaagttctcgattgtcttttttattgagggacagagaagacaagctacgtgagcgagatgaaagactctctagttctttagaaaggaacaaattttactcttttgcattggataagacaatcacaccagacactaaagctttgcttgaaagagctaaatccctctcttcatctcgtgaagaaaattggtcttttcttgattgggactcccgatttgcaaattttcgaaacaacaaagataaagaaaaggttgactctgctccaagacctattccatcctggtacatgaaaaagaagaaaattaggactgattcagaagggaaaatggatgataagaaagaggaccataaagaagaagagcaagagaggcaggaattgtttgcttctcgttttttacacagctcaatctttgaacaagattccaagcgattgcagcatctagagagaaaagaggaagattctgacttcatttctggtaggatctatgggaagcagacatctgagggagcaaacagcacaactgattccattcaagaaccagtagttctgttccatagcagatttatggagctcacacggatgcaacagaaagaaaaagaaaaagaccagaaacccaaagaggttgagaaacaggaagatacagagaatcatcccaagaccccagaatctgctcctgagaataaagattcagaactgaaaactccaccttccgttgggcctccaagtgtcacagtcgtaactctagaatcagccccatcagcactagagaagaccactggtgacaaaacggtagaggcgcctttggtaacagaagagaagactgtggagccagctaccgtctcagaagaagcaaagcctgcatctgaacctgctcctgcccctgtggaacagctggaacaagtagacctgcccccaggagcagaccccgataaagaagctgccatgatgcctgcgggtgttgaggaaggttcatcaggtgaccagccgccttatctggatgccaagcctccaactcccggggcctcgttttcccaggcagagagcaacgtagatccagagcctgacagtacccagccactttcaaaaccagctcagaagtctgaggaagccaatgagccaaaggccgaaaagccagacgccactgcagatgctgagcctgatgcaaaccagaaagccgaagctgctcctgagtctcagcccccagcttctgaagatttagaggttgatcctccagttgctgcaaaggataaaaagccaaacaaaagcaagcgttcaaagacccctgttcaggcagctgcagtgagtatcgtggagaagcccgtcacaaggaagagtgagaggatagaccgggaaaaactcaagcggtccaattctcctcggggagaagcacagaagcttttggaattgaagatggaggcagagaagattacaaggactgcttctaaaaactctgctgcagaccttgaacatcccgaaccaagtttgcctctcagccgaacaaggcgccggaatgtaaggagcgtctatgcaaccatgggtgaccatgaaaaccgctctcctgtcaaagagcccgttgagcaaccaagagtgaccagaaagagattggagcgagagcttcaggaggctgcagcggttcccaccacccctcggaggggaaggcctccaaagacacgccggcgagccgatgaagaggaggagaacgaggccaaggaacctgcagaaacactcaagccacctgagggatggcggtcgccaaggtcccagaaaactgcagctggtggtggaccccaagggaaaaagggaaaaaatgaaccgaaggtggatgctacacgtcctgaggccaccactgaggtgggcccccaaataggcgtgaaagagagctccatggaacccaaggctgctgaggaggaggcagggagtgaacagaaacgtgacagaaaagatgctggcacagacaaaaacccccctgaaaccgcccctgttgaagttgtagagaaaaaaccggcccctgaaaaaaactccaaatcaaagagaggaagatctcgaaactccaggttagcagtggacaaatctgcaagtctgaaaaatgtggatgctgctgtcagtcccaggggggctgcagcacaggcaggggagagggaatctggggtggtggcagtctcccctgagaaaagtgagagtccccaaaaggaggatggtttatcatcccagttgaaaagtgatccagttgatccagacaaggaaccagagaaagaagacgtgtctgcctctgggccgtccccagaagccacccagttagccaagcagatggagctggagcaggccgtggaacacatcgcaaagctcgctgaggcctctgcctctgctgcctataaggcagatgcaccagagggccttgccccagaggacagggacaagcctgcacaccaagcaagtgaaacagagctggctgcggccatcggctccatcatcaatgacatttctggggagccagaaaacttcccagcacctccaccttatcctggagaatcccagacagatctgcaaccccccgcaggtgcacaggcgctgcagccttctgaggaaggaatggagacagatgaggctgtatctggcatcctggaaactgaggctgctacagaatcttctaggcctccagtcaatgctcctgacccctcagccggcccaacagataccaaggaagccagaggaaatagcagtgaaacctcacactcagtgccagaagccaaagggtctaaagaagtggaagtcactcttgttcggaaagacaaagggcgccagaaaacaacccgatcacgccgcaagcgaaacacaaacaagaaagtggtggctcctgtagagagccatgtccctgaatccgaccaagctcaaggtgagagtcctgctgcaaatgaggggacaacagtacagcaccccgaagccccacaggaagaaaagcagagtgagaaaccccattccactcctcctcagtcatgtacttctgacctaagcaagattccctccacagagaattcgtcccaagaaatcagtgttgaggaaaggactccaaccaaagcatctgtgcccccagaccttcccccacctccccagccagcaccggtggatgaggagcctcaagccaggttcagggtgcattccatcattgaaagtgacccggtgaccccacccagcgatccaagcatccccatacccacactgccttctgtaactgcagcaaagctctcacctcctgtcgcctctggggggatcccacaccagagcccccctactaaggtgacagagtggatcacaaggcaggaggagccacgggctcagtctactccatctccagctcttcccccagacacaaaggcctctgatgttgacaccagctccagcaccctgaggaagattctcatggaccccaagtatgtgtctgccacaagtgtcacttccacaagtgtcaccacagccattgcagagcctgtcagtgctgccccttgcctacatgaggccccgcccccgccagttgactctaaaaagcctttagaagaaaaaacagcacctccagtgacaaacaactctgagatacaagcctcggaggtgctggtagctgctgacaaggaaaaggtggctccagtcattgctcccaaaattacctctgttattagccggatgcctgtcagcattgacctggaaaattcacagaagataaccttggcaaaaccagctcctcaaaccctcactggtctggtgagcgcactcactggcctggtgaacgtctccctggtcccggtgaatgccctgaaaggccccgtgaagggctcagtgaccacactgaaaagtttggtgagcacccctgctgggcccgtgaacgtcctgaaagggcctgtgaatgttcttacggggccagtgaatgttctcaccactccagtgaacgccacggtgggcacagtgaatgccgccccaggcacagtcaatgccgctgcgagtgcagtgaatgccacagcaagtgcagtgaccgtcacagcgggtgcggttactgctgcatctggtggtgtaacggccacaacaggcacggtgacaatggcaggggcagtgattgcgccgtcaacaaagtgcaaacagagagcgagtgctaatgaaaacagtcggttccacccagggtccatgcctgtgatcgacgatcgtccggcagacgcgggctcaggggcggggctgcgtgtgaacacttctgaaggggttgtgctcctgagttactcagggcagaagaccgaaggcccacagcggatcagcgccaagatcagccagatccccccggccagtgcaatggacattgaatttcagcagtcagtgtccaagtcccaggtcaaacctgattctgtcacagcatcgcagcctccatccaaaggccctcaagctcctgcaggctatgcgaacgtggccacccattccacgttggtactgaccgcccagacatataatgcctctcctgtgatttcgtctgtgaaggccgataggccatccttggagaagcccgagcccattcacctctcggtgtccacgcctgtcacccagggaggcacagtgaaggttctcacccaggggatcaacacaccccctgtgctggttcacaaccagctggtcctcaccccaagcattgtcaccacaaacaagaagcttgctgaccccgtcacccttaaaatcgagaccaaggtccttcagccggccaacctggggtccacgctcacgccccaccaccctcctgctctgcccagcaaactgcctacagaagtcaaccatgtcccctcggggcccagcatcccagcagatcgaactgtctcccatttggcagctgcaaagctagatgctcattctcctcgaccaagtggacccgggccatcctcattcccaagggcaagccaccccagcagtactgcatctacggcgctctccaccaacgccacagtcatgctggctgcaggcatcccagtgccccagttcatctccagcatccacccagagcagtctgtcatcatgccaccccacagcatcacccagactgtgtccctgagccacctctcccagggcgaggtgagaatgaacactcccacgctgcccagtatcacctacagcatccggccagaagcgcttcactctcctcgggctccgctgcagccccagcaaatagaggtcagggccccacagcgtgccagcaccccgcagccagccccagctggtgtgcctgcactggcctcccagcaccctcccgaggaggaagtgcattatcaccttcctgtcgctcgagccacagcccctgtgcagtcagaggtactagtcatgcagtctgagtaccgactgcacccctatactgtgccacgggatgtgaggatcatggtgcatccacatgtgacggcagtcagcgagcagcccagggccgcggatggggtggtgaaggtgccaccagccagcaaggcccctcagcagccagggaaggaagctgccaagacaccagatgccaaagctgcccccacccccacccctgcccccgtccctgtccctgtcccccttcctgcccctgctcctgcccctcatggtgaggcccgtatcctcacagttacccccagtaaccaactccaggggctgcctctgacccctcctgtggtggtgacccatggggtgcagattgtgcactccagcggggagctgtttcaagagtaccggtacggcgacatccgcacctaccaccccccggcccagctcacacacactcagtttcccgccgcttcctctgttggcctgccttcccggaccaagacagctgctcagggccctcctcctgaaggtgagcccctgcagcctcctcagcctgtgcagtccacacagcctgcccagcctgcaccaccctgcccgccctcccagctcggtcagcccggccagccaccaagcagcaagatgcctcaagtgtcccaggaggcaaaggggacccagacgggagtagagcagcctcgcctcccagctggacctgcaaacaggccacctgagcctcacacccaggttcagagggcacaagcagaaacaggcccgacttccttcccctcccctgtgtctgtctccatgaagcctgaccttccagtctctcttcccactcagactgccccaaaacagccgttgtttgtcccaacaacctctggccccagcaccccaccaggactggttctgccacacactgaattccagccagcccccaaacaagattcctctccacacctgacttcccagagacccgtggatatggttcaacttctgaagaagtaccccatcgtgtggcagggcctgctggccctcaagaatgacacagctgctgtgcagctccacttcgtctctggcaacaacgtcctggcccatcggtccctgcccctttctgaaggagggcccccactaaggatcgcccagaggatgcggctggaggcaacgcagctggaaggggttgcccgaaggatgacggtggagacagattactgtctgctgctggctctgccctgtggccgtgaccaagaggatgttgtgagccagaccgagtccctcaaggctgccttcatcacttacctgcaggccaagcaggcggcagggatcatcaacgttcccaaccctggctccaatcagcctgcctacgtgctgcagatcttcccgccctgtgagttctctgagagtcacctgtcccgcctggcccctgacctccttgccagcatctccaacatctctccccacctcatgattgtcattgcctccgtgtgagccactgagtggttatcacctcagtgaatcttcccagggctctgcagtaaaaacaaaggacaacccagccaagcagaggaagaagctgccgaaggggacagactccactgccagacggccagccgtttgctgtcctgccgcccggctcagtcggccagacttcctctaggagtggtgctgctaccttgtatgtttacataatgctttagcccaaggacacatcaccaacccatggactcgcagacaccggggctgggtttctctttcctctttttggagaaaaggaacagggcagtggaatgaaaattttttgtttgtttgtttttaagaaacaagaaaacagaactgcctttgcactaaattagtgacttggacttttgcccagtgaagacaggctgtgacactctggatgtcttggtgtgtgtagacacacattgcagactcttaacgcaggaaggacttcaaacttctgctgagaccttggggtcaaggaacatttcattggttttttttgtccacccccatctcccttgctcatttggatgcgtcaccttaattctcctgctgccaccgtctttgattcaccgggatgtacagtttacagttgaagagcaaacagaaaggttttctcttggtgggatatgcagaacttgggatgtgtgtatatataaatatataatatatataaatatatataatactgacttaaaaaatcaaatcccccgacatacgttttttttaatctgtgccaaaaatgtgttttcagaggaaatcttattttcatattcagactttgtattgcccactcatttgtataagtgcgcttcggtacagcacgggtcctgctcccgcgatgtggaagtgtcacacggcacctgtacaaaaagactggctaacccctcttcctattaccttgatctcttcccccaacttcctaacacttattaatttatgaaactgtttttctcagcgcagttttgttttgtgtgtccattggattacaaactttattaaaaaatataaaacacaccaagtgtgagtgtgattgtcacttgggtgggaggacgaaccatgggtccttggcttatgggaacagtcagccctcatcccgcttttgatccccatgccaagtctgtacatgggaactgtttcccttctgcctcctagtcagtcagtcctcctccccaaggataattttatcttgtacaaaggagatttttgtcacggacactgaacttaaccatttctcactcttgtggtgtcttcagagtcctaactggttcttaggtaatgtggaaggaaggcacttccaattttgatacagaatataaccacaccccatgccatctcagaaacattttagcaagctttggtttcttgtctctctcttgccccctcttcccttctcccagtgtgaagcaggctgactcctgcagaggcagtggcctcctggggccctgggggctcatttgatcccgtctctgcctccagacaggagaatgggagttggggacaggcttcccctgcagctggattctctagaagctgtggagttgggacagggacatggggactataaagttggtggtctcacttggaataccaatgggctcctacaaatgggcctgtcctggtgtgagaagatagcatccccctctgaacggtgggccatagatgccggggccactgtggggggacgagatggtacctcctgactccttgctgacaggagtgagaaagctgttcc

SEQ ID NO: 336540 - DNA, 11397 bp, Homo sapiens
gcggggtgtgctcgggaattcgtggtgcggttcagacaggtgtgcttctgtaacaggtcttccacaccaagtaagtgtttgccatagtcttgagacaatactagcaccttcatttcatccatccagtccataatgtagagcatttcctggaatatcttggaaataatcgcctcaagctgggttttggaaagagcatgcctacaaactgcgtgtggctagatgggctttcttcgaatgtgtcagatcagtatttaacacgacatttctgccgatatgggcctgtggtaaaggtggtgtttgaccgcttaaaaggcatggccctggttctctacaatgaaattgaatatgcacaagcagctgtaaaagagaccaaagggaggaaaatcggtgggaataaaattaaggtggattttgcaaatcgggaaagtcagctggctttttatcactgcatggagaaatctggtcaagacatcagagacttttatgaaatgttagccgaaagaagagaggaacgaagggcatcctacgactataaccaagatcgtacatattatgagagtgttcgaactccaggcacttatcctgaggattccaggcgggactatccagctcgagggagagagttttattcagaatgggaaacttaccaaggagactactatgaatcacgatactacgatgatcctcgggaatacagggattacaggaatgatccttatgaacaagatattagggaatatagttacaggcaaagggaacgagaaagagaacgtgaaagatttgagtctgaccgggacagagaccatgagaggaggccgattgaacgaagtcaaagtcctgttcacttgcgacgtccacagagtcctggagcgtctccctctcaggcagagaggttgccgagtgattctgagaggaggctttacagccgatcctcagaccggagtggaagctgtagctcactctcccctccaagatatgagaaactggacaagtctcgtttggagcgctatacaaaaaatgaaaagacagataaagaacgaacttttgatccggagagagtggagagagagagacgcttaatacggaaggaaaaagtggaaaaggacaaaactgacaagcagaaacgcaaaggaaaggttcactcccctagttctcagtcttcagaaacggaccaagaaaatgagcgagagcaaagccctgaaaagcccaggagttgtaataaactgagcagagagaaagctgacaaagagggaatagcgaaaaaccgcctggaactcatgccttgcgtggttttgactcgagtgaaagagaaagagggaaaggtcattgaccacactcctgtggaaaagttgaaagccaagcttgataatgacactgtcaaatcttctgccctggaccagaaacttcaggtctctcagacggagcctgcaaaatctgacttgtctaaactggaatcagttagaatgaaagtaccaaaggaaaaggggctttcaagccatgttgaagtggtggagaaggaaggcaggcttaaagccaggaagcacctcaagcctgagcagcctgcagatggggtaagtgctgtggatctggagaagctggaagccaggaaaaggcgctttgcagattccaatttaaaagcagaaaagcaaaaaccagaggtcaagaaaagcagtccagagatggaggatgctcgcgtgctttcaaaaaagcagcctgacgtgtcctctagagaggtcattctgctgagggaaggagaggctgaaagaaagcctgtgaggaaagaaattcttaaaagagaatctaaaaaaatcaaactggacagacttaatactgttgccagccccaaagactgtcaggagcttgccagtatttctgttgggtctggctcaaggcccagctcagacctacaagcaagactgggagaaccagcaggtgaatctgtggaaaatcaagaagtccaatcaaaaaagcccattccctcaaaaccacagctcaaacagctgcaggtattagatgatcaaggaccagagagagaagacgttaggaaaaactattgcagtcttcgtgatgaaacacctgaacgtaaatcaggccaagagaaatcacattcagtaaatactgaagaaaaaattggcattgacatcgatcacacgcagagttaccgaaaacaaatggaacagagtcgtaggaaacagcagatggaaatggaaatagccaagtctgagaagtttggcagtcctaaaaaagatgtagatgaatatgaaagacgtagcctcgttcacgaggtaggcaaaccccctcaagatgtcactgatgactctcctcctagcaaaaagaaaaggatggatcatgtcgattttgatatctgcaccaagcgagaacggaattacagaagttcacgccaaatcagcgaagattctgaaaggactggtggttctcccagtgtccgacatggttccttccatgaagatgaggatcccataggctcccctaggctactgtcagtaaaagggtctcctaaagtagatgaaaaagtcctcccctattctaacataacagtcagggaagagtctttaaaatttaatccttatgattctagcaggagagaacagatggcagatatggccaaaataaaactatctgtcttgaattctgaagatgaactaaatcgttgggactctcagatgaaacaggatgctggcagatttgatgtgagtttcccaaacagcataattaagagagatagccttcgaaaaaggtctgtacgagatctggaacctggtgaggtgccttctgattctgacgaagatggtgaacacaaatcccactcacccagagcctctgcattatatgaaagttctcgattgtcttttttattgagggacagagaagacaagctacgtgagcgagatgaaagactctctagttctttagaaaggaacaaattttactcttttgcattggataagacaatcacaccagacactaaagctttgcttgaaagagctaaatccctctcttcatctcgtgaagaaaattggtcttttcttgattgggactcccgatttgcaaattttcgaaacaacaaagataaagaaaaggttgactctgctccaagacctattccatcctggtacatgaaaaagaagaaaattaggactgattcagaagggaaaatggatgataagaaagaggaccataaagaagaagagcaagagaggcaggaattgtttgcttctcgttttttacacagctcaatctttgaacaagattccaagcgattgcagcatctagagagaaaagaggaagattctgacttcatttctggtaggatctatgggaagcagacatctgagggagcaaacagcacaactgattccattcaagaaccagtagttctgttccatagcagatttatggagctcacacggatgcaacagaaagaaaaagaaaaagaccagaaacccaaagaggttgagaaacaggaagatacagagaatcatcccaagaccccagaatctgctcctgagaataaagattcagaactgaaaactccaccttccgttgggcctccaagtgtcacagtcgtaactctagaatcagccccatcagcactagagaagaccactggtgacaaaacggtagaggcgcctttggtaacagaagagaagactgtggagccagctaccgtctcagaagaagcaaagcctgcatctgaacctgctcctgcccctgtggaacagctggaacaagtagacctgcccccaggagcagaccccgataaagaagctgccatgatgcctgcgggtgttgaggaaggttcatcaggtgaccagccgccttatctggatgccaagcctccaactcccggggcctcgttttcccaggcagagagcaacgtagatccagagcctgacagtacccagccactttcaaaaccagctcagaagtctgaggaagccaatgagccaaaggccgaaaagccagacgccactgcagatgctgagcctgatgcaaaccagaaagccgaagctgctcctgagtctcagcccccagcttctgaagatttagaggttgatcctccagttgctgcaaaggataaaaagccaaacaaaagcaagcgttcaaagacccctgttcaggcagctgcagtgagtatcgtggagaagcccgtcacaaggaagagtgagaggatagaccgggaaaaactcaagcggtccaattctcctcggggagaagcacagaagcttttggaattgaagatggaggcagagaagattacaaggactgcttctaaaaactctgctgcagaccttgaacatcccgaaccaagtttgcctctcagccgaacaaggcgccggaatgtaaggagcgtctatgcaaccatgggtgaccatgaaaaccgctctcctgtcaaagagcccgttgagcaaccaagagtgaccagaaagagattggagcgagagcttcaggaggctgcagcggttcccaccacccctcggaggggaaggcctccaaagacacgccggcgagccgatgaagaggaggagaacgaggccaaggaacctgcagaaacactcaagccacctgagggatggcggtcgccaaggtcccagaaaactgcagctggtggtggaccccaagggaaaaagggaaaaaatgaaccgaaggtggatgctacacgtcctgaggccaccactgaggtgggcccccaaataggcgtgaaagagagctccatggaacccaaggctgctgaggaggaggcagggagtgaacagaaacgtgacagaaaagatgctggcacagacaaaaacccccctgaaaccgcccctgttgaagttgtagagaaaaaaccggcccctgaaaaaaactccaaatcaaagagaggaagatctcgaaactccaggttagcagtggacaaatctgcaagtctgaaaaatgtggatgctgctgtcagtcccaggggggctgcagcacaggcaggggagagggaatctggggtggtggcagtctcccctgagaaaagtgagagtccccaaaaggaggatggtttatcatcccagttgaaaagtgatccagttgatccagacaaggaaccagagaaagaagacgtgtctgcctctgggccgtccccagaagccacccagttagccaagcagatggagctggagcaggccgtggaacacatcgcaaagctcgctgaggcctctgcctctgctgcctataaggcagatgcaccagagggccttgccccagaggacagggacaagcctgcacaccaagcaagtgaaacagagctggctgcggccatcggctccatcatcaatgacatttctggggagccagaaaacttcccagcacctccaccttatcctggagaatcccagacagatctgcaaccccccgcaggtgcacaggcgctgcagccttctgaggaaggaatggagacagatgaggctgtatctggcatcctggaaactgaggctgctacagaatcttctaggcctccagtcaatgctcctgacccctcagccggcccaacagataccaaggaagccagaggaaatagcagtgaaacctcacactcagtgccagaagccaaagggtctaaagaagtggaagtcactcttgttcggaaagacaaagggcgccagaaaacaacccgatcacgccgcaagcgaaacacaaacaagaaagtggtggctcctgtagagagccatgtccctgaatccgaccaagctcaaggtgagagtcctgctgcaaatgaggggacaacagtacagcaccccgaagccccacaggaagaaaagcagagtgagaaaccccattccactcctcctcagtcatgtacttctgacctaagcaagattccctccacagagaattcgtcccaagaaatcagtgttgaggaaaggactccaaccaaagcatctgtgcccccagaccttcccccacctccccagccagcaccggtggatgaggagcctcaagccaggttcagggtgcattccatcattgaaagtgacccggtgaccccacccagcgatccaagcatccccatacccacactgccttctgtaactgcagcaaagctctcacctcctgtcgcctctggggggatcccacaccagagcccccctactaaggtgacagagtggatcacaaggcaggaggagccacgggctcagtctactccatctccagctcttcccccagacacaaaggcctctgatgttgacaccagctccagcaccctgaggaagattctcatggaccccaagtatgtgtctgccacaagtgtcacttccacaagtgtcaccacagccattgcagagcctgtcagtgctgccccttgcctacatgaggccccgcccccgccagttgactctaaaaagcctttagaagaaaaaacagcacctccagtgacaaacaactctgagatacaagcctcggaggtgctggtagctgctgacaaggaaaaggtggctccagtcattgctcccaaaattacctctgttattagccggatgcctgtcagcattgacctggaaaattcacagaagataaccttggcaaaaccagctcctcaaaccctcactggtctggtgagcgcactcactggcctggtgaacgtctccctggtcccggtgaatgccctgaaaggccccgtgaagggctcagtgaccacactgaaaagtttggtgagcacccctgctgggcccgtgaacgtcctgaaagggcctgtgaatgttcttacggggccagtgaatgttctcaccactccagtgaacgccacggtgggcacagtgaatgccgccccaggcacagtcaatgccgctgcgagtgcagtgaatgccacagcaagtgcagtgaccgtcacagcgggtgcggttactgctgcatctggtggtgtaacggccacaacaggcacggtgacaatggcaggggcagtgattgcgccgtcaacaaagtgcaaacagagagcgagtgctaatgaaaacagtcggttccacccagggtccatgcctgtgatcgacgatcgtccggcagacgcgggctcaggggcggggctgcgtgtgaacacttctgaaggggttgtgctcctgagttactcagggcagaagaccgaaggcccacagcggatcagcgccaagatcagccagatccccccggccagtgcaatggacattgaatttcagcagtcagtgtccaagtcccaggtcaaacctgattctgtcacagcatcgcagcctccatccaaaggccctcaagctcctgcaggctatgcgaacgtggccacccattccacgttggtactgaccgcccagacatataatgcctctcctgtgatttcgtctgtgaaggccgataggccatccttggagaagcccgagcccattcacctctcggtgtccacgcctgtcacccagggaggcacagtgaaggttctcacccaggggatcaacacaccccctgtgctggttcacaaccagctggtcctcaccccaagcattgtcaccacaaacaagaagcttgctgaccccgtcacccttaaaatcgagaccaaggtccttcagccggccaacctggggtccacgctcacgccccaccaccctcctgctctgcccagcaaactgcctacagaagtcaaccatgtcccctcggggcccagcatcccagcagatcgaactgtctcccatttggcagctgcaaagctagatgctcattctcctcgaccaagtggacccgggccatcctcattcccaagggcaagccaccccagcagtactgcatctacggcgctctccaccaacgccacagtcatgctggctgcaggcatcccagtgccccagttcatctccagcatccacccagagcagtctgtcatcatgccaccccacagcatcacccagactgtgtccctgagccacctctcccagggcgaggtgagaatgaacactcccacgctgcccagtatcacctacagcatccggccagaagcgcttcactctcctcgggctccgctgcagccccagcaaatagaggtcagggccccacagcgtgccagcaccccgcagccagccccagctggtgtgcctgcactggcctcccagcaccctcccgaggaggaagtgcattatcaccttcctgtcgctcgagccacagcccctgtgcagtcagaggtactagtcatgcagtctgagtaccgactgcacccctatactgtgccacgggatgtgaggatcatggtgcatccacatgtgacggcagtcagcgagcagcccagggccgcggatggggtggtgaaggtgccaccagccagcaaggcccctcagcagccagggaaggaagctgccaagacaccagatgccaaagctgcccccacccccacccctgcccccgtccctgtccctgtcccccttcctgcccctgctcctgcccctcatggtgaggcccgtatcctcacagttacccccagtaaccaactccaggggctgcctctgacccctcctgtggtggtgacccatggggtgcagattgtgcactccagcggggagctgtttcaagagtaccggtacggcgacatccgcacctaccaccccccggcccagctcacacacactcagtttcccgccgcttcctctgttggcctgccttcccggaccaagacagctgctcagggccctcctcctgaaggtgagcccctgcagcctcctcagcctgtgcagtccacacagcctgcccagcctgcaccaccctgcccgccctcccagctcggtcagcccggccagccaccaagcagcaagatgcctcaagtgtcccaggaggcaaaggggacccagacgggagtagagcagcctcgcctcccagctggacctgcaaacaggccacctgagcctcacacccaggttcagagggcacaagcagaaacaggcccgacttccttcccctcccctgtgtctgtctccatgaagcctgaccttccagtctctcttcccactcagactgccccaaaacagccgttgtttgtcccaacaacctctggccccagcaccccaccaggactggttctgccacacactgaattccagccagcccccaaacaagattcctctccacacctgacttcccagagacccgtggatatggttcaacttctgaagaagtaccccatcgtgtggcagggcctgctggccctcaagaatgacacagctgctgtgcagctccacttcgtctctggcaacaacgtcctggcccatcggtccctgcccctttctgaaggagggcccccactaaggatcgcccagaggatgcggctggaggcaacgcagctggaaggggttgcccgaaggatgacggtggagacagattactgtctgctgctggctctgccctgtggccgtgaccaagaggatgttgtgagccagaccgagtccctcaaggctgccttcatcacttacctgcaggccaagcaggcggcagggatcatcaacgttcccaaccctggctccaatcagcctgcctacgtgctgcagatcttcccgccctgtgagttctctgagagtcacctgtcccgcctggcccctgacctccttgccagcatctccaacatctctccccacctcatgattgtcattgcctccgtgtgagccactgagtggttatcacctcagtgaatcttcccagggctctgcagtaaaaacaaaggacaacccagccaagcagaggaagaagctgccgaaggggacagactccactgccagacggccagccgtttgctgtcctgccgcccggctcagtcggccagacttcctctaggagtggtgctgctaccttgtatgtttacataatgctttagcccaaggacacatcaccaacccatggactcgcagacaccggggctgggtttctctttcctctttttggagaaaaggaacagggcagtggaatgaaaattttttgtttgtttgtttttaagaaacaagaaaacagaactgcctttgcactaaattagtgacttggacttttgcccagtgaagacaggctgtgacactctggatgtcttggtgtgtgtagacacacattgcagactcttaacgcaggaaggacttcaaacttctgctgagaccttggggtcaaggaacatttcattggttttttttgtccacccccatctcccttgctcatttggatgcgtcaccttaattctcctgctgccaccgtctttgattcaccgggatgtacagtttacagttgaagagcaaacagaaaggttttctcttggtgggatatgcagaacttgggatgtgtgtatatataaatatataatatatataaatatatataatactgacttaaaaaatcaaatcccccgacatacgttttttttaatctgtgccaaaaatgtgttttcagaggaaatcttattttcatattcagactttgtattgcccactcatttgtataagtgcgcttcggtacagcacgggtcctgctcccgcgatgtggaagtgtcacacggcacctgtacaaaaagactggctaacccctcttcctattaccttgatctcttcccccaacttcctaacacttattaatttatgaaactgtttttctcagcgcagttttgttttgtgtgtccattggattacaaactttattaaaaaatataaaacacaccaagtgtgagtgtgattgtcacttgggtgggaggacgaaccatgggtccttggcttatgggaacagtcagccctcatcccgcttttgatccccatgccaagtctgtacatgggaactgtttcccttctgcctcctagtcagtcagtcctcctccccaaggataattttatcttgtacaaaggagatttttgtcacggacactgaacttaaccatttctcactcttgtggtgtcttcagagtcctaactggttcttaggtaatgtggaaggaaggcacttccaattttgatacagaatataaccacaccccatgccatctcagaaacattttagcaagctttggtttcttgtctctctcttgccccctcttcccttctcccagtgtgaagcaggctgactcctgcagaggcagtggcctcctggggccctgggggctcatttgatcccgtctctgcctccagacaggagaatgggagttggggacaggcttcccctgcagctggattctctagaagctgtggagttgggacagggacatggggactataaagttggtggtctcacttggaataccaatgggctcctacaaatgggcctgtcctggtgtgagaagatagcatccccctctgaacggtgggccatagatgccggggccactgtggggggacgagatggtacctcctgactccttgctgacaggagtgagaaagctgttcc

SEQ ID NO: 336541 - DNA, 12889 bp, Homo sapiens
tgagctgcgaggcccgagagtcagaacctgggggagagggatggtctctgcacgggggggagccggaggagccgccgccgctgccgacgccaccgccgcagccgccgccgccgccgccccggcacccgcctcccggcgctgacggtctcgtacgaagccggcgagggggagccagcagcggcggtcgccggcacgccgcccagcatggtccgggaaaccaggcatctctgggtgggcaacttacccgagaacgtgcgggaagagaagatcatcgagcatttcaaacgatatggccgcgtggaaagtgtcaaaattcttcccaagaggggatctgaaggaggagtggctgcctttgtggattttgtggacatcaaaagtgcacagaaagctcacaactcggtcaacaaaatgggtgacagagacctacgcacggattataatgaaccaggcaccatcccgagtgctgctcggggattggatgatacagtttccatagcatctcgtagtagagaggtttctgggttcagaggaggtggtggagggcctgcttatggtcccccaccgtcacttcatgcacgagaaggacgttatgagcggagacttgatggggcttcagataacagggagcgtgcttatgaacatagtgcctatggacaccatgaacgggggacgggaggatttgatcggacaagacattacgatcaggattactatagagatcctcgagagcggactttacaacatgggctctattacgcttctcggagtcgaagtccaaatcgctttgatgctcatgacccccgatatgaacctagggctcgcgagcagtttacactgcccagtgtggtacacagggatatctacagggatgatattacccgggaggtacgaggcagaaggccagagcggaattaccagcacagcaggagtcggtcaccacattcatcccagtctagaaatcagtctcctcagagactggctagccaagcatctagacccacaaggtcccctagcggcagcggctctagaagtagatcctccagtagtgattcaatcagcagcagcagtagtaccagcagtgacagcagtgattccagcagtagttcaagtgatgattctccagctcgatcagttcagtctgcagcagtccctgcacccacttcccagttgctttcatctctggaaaaagatgagccccgtaaaagttttggcatcaaggtccagaatcttccagtacgctctacagatacaagccttaaagatggccttttccatgaatttaagaaatttggaaaagtaacttcagtgcagatacatggaacttcagaagagaggtatggtctggtattctttcggcagcaagaggaccaagaaaaagccttgactgcatcaaaaggaaaacttttctttggcatgcagattgaagtaacagcatggataggtccagaaacagaaagtgaaaatgaatttcgccccttggatgaaaggatagatgaatttcaccccaaagcaacaagaactctctttattggcaaccttgaaaaaaccactacttaccatgaccttcgcaacatcttccagcgctttggagaaattgtggatattgacattaagaaagtaaatggagttcctcagtatgcgtttctgcaatactgtgatattgctagcgtttgtaaagctattaagaagatggatggggaatatcttggaaataatcgcctcaagctgggttttggaaagagcatgcctacaaactgcgtgtggctagatgggctttcttcgaatgtgtcagatcagtatttaacacgacatttctgccgatatgggcctgtggtaaaggtggtgtttgaccgcttaaaaggcatggccctggttctctacaatgaaattgaatatgcacaagcagctgtaaaagagaccaaagggaggaaaatcggtgggaataaaattaaggtggattttgcaaatcgggaaagtcagctggctttttatcactgcatggagaaatctggtcaagacatcagagacttttatgaaatgttagccgaaagaagagaggaacgaagggcatcctacgactataaccaagatcgtacatattatgagagtgttcgaactccaggcacttatcctgaggattccaggcgggactatccagctcgagggagagagttttattcagaatgggaaacttaccaaggagactactatgaacaagatattagggaatatagttacaggcaaagggaacgagaaagagaacgtgaaagatttgagtctgaccgggacagagaccatgagaggaggccgattgaacgaagtcaaagtcctgttcacttgcgacgtccacagagtcctggagcgtctccctctcaggcagagaggttgccgagtgattctgagaggaggctttacagccgatcctcagaccggagtggaagctgtagctcactctcccctccaagatatgagaaactggacaagtctcgtttggagcgctatacaaaaaatgaaaagacagataaagaacgaacttttgatccggagagagtggagagagagagacgcttaatacggaaggaaaaagtggaaaaggacaaaactgacaagcagaaacgcaaaggaaaggttcactcccctagttctcagtcttcagaaacggaccaagaaaatgagcgagagcaaagccctgaaaagcccaggagttgtaataaactgagcagagagaaagctgacaaagagggaatagcgaaaaaccgcctggaactcatgccttgcgtggttttgactcgagtgaaagagaaagagggaaaggtcattgaccacactcctgtggaaaagttgaaagccaagcttgataatgacactgtcaaatcttctgccctggaccagaaacttcaggtctctcagacggagcctgcaaaatctgacttgtctaaactggaatcagttagaatgaaagtaccaaaggaaaaggggctttcaagccatgttgaagtggtggagaaggaaggcaggcttaaagccaggaagcacctcaagcctgagcagcctgcagatggggtaagtgctgtggatctggagaagctggaagccaggaaaaggcgctttgcagattccaatttaaaagcagaaaagcaaaaaccagaggtcaagaaaagcagtccagagatggaggatgctcgcgtgctttcaaaaaagcagcctgacgtgtcctctagagaggtcattctgctgagggaaggagaggctgaaagaaagcctgtgaggaaagaaattcttaaaagagaatctaaaaaaatcaaactggacagacttaatactgttgccagccccaaagactgtcaggagcttgccagtatttctgttgggtctggctcaaggcccagctcagacctacaagcaagactgggagaaccagcaggtgaatctgtggaaaatcaagaagtccaatcaaaaaagcccattccctcaaaaccacagctcaaacagctgcaggtattagatgatcaaggaccagagagagaagacgttaggaaaaactattgcagtcttcgtgatgaaacacctgaacgtaaatcaggccaagagaaatcacattcagtaaatactgaagaaaaaattggcattgacatcgatcacacgcagagttaccgaaaacaaatggaacagagtcgtaggaaacagcagatggaaatggaaatagccaagtctgagaagtttggcagtcctaaaaaagatgtagatgaatatgaaagacgtagcctcgttcacgaggtaggcaaaccccctcaagatgtcactgatgactctcctcctagcaaaaagaaaaggatggatcatgtcgattttgatatctgcaccaagcgagaacggaattacagaagttcacgccaaatcagcgaagattctgaaaggactggtggttctcccagtgtccgacatggttccttccatgaagatgaggatcccataggctcccctaggctactgtcagtaaaagggtctcctaaagtagatgaaaaagtcctcccctattctaacataacagtcagggaagagtctttaaaatttaatccttatgattctagcaggagagaacagatggcagatatggccaaaataaaactatctgtcttgaattctgaagatgaactaaatcgttgggactctcagatgaaacaggatgctggcagatttgatgtgagtttcccaaacagcataattaagagagatagccttcgaaaaaggtctgtacgagatctggaacctggtgaggtgccttctgattctgacgaagatggtgaacacaaatcccactcacccagagcctctgcattatatgaaagttctcgattgtcttttttattgagggacagagaagacaagctacgtgagcgagatgaaagactctctagttctttagaaaggaacaaattttactcttttgcattggataagacaatcacaccagacactaaagctttgcttgaaagagctaaatccctctcttcatctcgtgaagaaaattggtcttttcttgattgggactcccgatttgcaaattttcgaaacaacaaagataaagaaaaggttgactctgctccaagacctattccatcctggtacatgaaaaagaagaaaattaggactgattcagaagggaaaatggatgataagaaagaggaccataaagaagaagagcaagagaggcaggaattgtttgcttctcgttttttacacagctcaatctttgaacaagattccaagcgattgcagcatctagagagaaaagaggaagattctgacttcatttctggtaggatctatgggaagcagacatctgagggagcaaacagcacaactgattccattcaagaaccagtagttctgttccatagcagatttatggagctcacacggatgcaacagaaagaaaaagaaaaagaccagaaacccaaagaggttgagaaacaggaagatacagagaatcatcccaagaccccagaatctgctcctgagaataaagattcagaactgaaaactccaccttccgttgggcctccaagtgtcacagtcgtaactctagaatcagccccatcagcactagagaagaccactggtgacaaaacggtagaggcgcctttggtaacagaagagaagactgtggagccagctaccgtctcagaagaagcaaagcctgcatctgaacctgctcctgcccctgtggaacagctggaacaagtagacctgcccccaggagcagaccccgataaagaagctgccatgatgcctgcgggtgttgaggaaggttcatcaggtgaccagccgccttatctggatgccaagcctccaactcccggggcctcgttttcccaggcagagagcaacgtagatccagagcctgacagtacccagccactttcaaaaccagctcagaagtctgaggaagccaatgagccaaaggccgaaaagccagacgccactgcagatgctgagcctgatgcaaaccagaaagccgaagctgctcctgagtctcagcccccagcttctgaagatttagaggttgatcctccagttgctgcaaaggataaaaagccaaacaaaagcaagcgttcaaagacccctgttcaggcagctgcagtgagtatcgtggagaagcccgtcacaaggaagagtgagaggatagaccgggaaaaactcaagcggtccaattctcctcggggagaagcacagaagcttttggaattgaagatggaggcagagaagattacaaggactgcttctaaaaactctgctgcagaccttgaacatcccgaaccaagtttgcctctcagccgaacaaggcgccggaatgtaaggagcgtctatgcaaccatgggtgaccatgaaaaccgctctcctgtcaaagagcccgttgagcaaccaagagtgaccagaaagagattggagcgagagcttcaggaggctgcagcggttcccaccacccctcggaggggaaggcctccaaagacacgccggcgagccgatgaagaggaggagaacgaggccaaggaacctgcagaaacactcaagccacctgagggatggcggtcgccaaggtcccagaaaactgcagctggtggtggaccccaagggaaaaagggaaaaaatgaaccgaaggtggatgctacacgtcctgaggccaccactgaggtgggcccccaaataggcgtgaaagagagctccatggaacccaaggctgctgaggaggaggcagggagtgaacagaaacgtgacagaaaagatgctggcacagacaaaaacccccctgaaaccgcccctgttgaagttgtagagaaaaaaccggcccctgaaaaaaactccaaatcaaagagaggaagatctcgaaactccaggttagcagtggacaaatctgcaagtctgaaaaatgtggatgctgctgtcagtcccaggggggctgcagcacaggcaggggagagggaatctggggtggtggcagtctcccctgagaaaagtgagagtccccaaaaggaggatggtttatcatcccagttgaaaagtgatccagttgatccagacaaggaaccagagaaagaagacgtgtctgcctctgggccgtccccagaagccacccagttagccaagcagatggagctggagcaggccgtggaacacatcgcaaagctcgctgaggcctctgcctctgctgcctataaggcagatgcaccagagggccttgccccagaggacagggacaagcctgcacaccaagcaagtgaaacagagctggctgcggccatcggctccatcatcaatgacatttctggggagccagaaaacttcccagcacctccaccttatcctggagaatcccagacagatctgcaaccccccgcaggtgcacaggcgctgcagccttctgaggaaggaatggagacagatgaggctgtatctggcatcctggaaactgaggctgctacagaatcttctaggcctccagtcaatgctcctgacccctcagccggcccaacagataccaaggaagccagaggaaatagcagtgaaacctcacactcagtgccagaagccaaagggtctaaagaagtggaagtcactcttgttcggaaagacaaagggcgccagaaaacaacccgatcacgccgcaagcgaaacacaaacaagaaagtggtggctcctgtagagagccatgtccctgaatccgaccaagctcaaggtgagagtcctgctgcaaatgaggggacaacagtacagcaccccgaagccccacaggaagaaaagcagagtgagaaaccccattccactcctcctcagtcatgtacttctgacctaagcaagattccctccacagagaattcgtcccaagaaatcagtgttgaggaaaggactccaaccaaagcatctgtgcccccagaccttcccccacctccccagccagcaccggtggatgaggagcctcaagccaggttcagggtgcattccatcattgaaagtgacccggtgaccccacccagcgatccaagcatccccatacccacactgccttctgtaactgcagcaaagctctcacctcctgtcgcctctggggggatcccacaccagagcccccctactaaggtgacagagtggatcacaaggcaggaggagccacgggctcagtctactccatctccagctcttcccccagacacaaaggcctctgatgttgacaccagctccagcaccctgaggaagattctcatggaccccaagtatgtgtctgccacaagtgtcacttccacaagtgtcaccacagccattgcagagcctgtcagtgctgccccttgcctacatgaggccccgcccccgccagttgactctaaaaagcctttagaagaaaaaacagcacctccagtgacaaacaactctgagatacaagcctcggaggtgctggtagctgctgacaaggaaaaggtggctccagtcattgctcccaaaattacctctgttattagccggatgcctgtcagcattgacctggaaaattcacagaagataaccttggcaaaaccagctcctcaaaccctcactggtctggtgagcgcactcactggcctggtgaacgtctccctggtcccggtgaatgccctgaaaggccccgtgaagggctcagtgaccacactgaaaagtttggtgagcacccctgctgggcccgtgaacgtcctgaaagggcctgtgaatgttcttacggggccagtgaatgttctcaccactccagtgaacgccacggtgggcacagtgaatgccgccccaggcacagtcaatgccgctgcgagtgcagtgaatgccacagcaagtgcagtgaccgtcacagcgggtgcggttactgctgcatctggtggtgtaacggccacaacaggcacggtgacaatggcaggggcagtgattgcgccgtcaacaaagtgcaaacagagagcgagtgctaatgaaaacagtcggttccacccagggtccatgcctgtgatcgacgatcgtccggcagacgcgggctcaggggcggggctgcgtgtgaacacttctgaaggggttgtgctcctgagttactcagggcagaagaccgaaggcccacagcggatcagcgccaagatcagccagatccccccggccagtgcaatggacattgaatttcagcagtcagtgtccaagtcccaggtcaaacctgattctgtcacagcatcgcagcctccatccaaaggccctcaagctcctgcaggctatgcgaacgtggccacccattccacgttggtactgaccgcccagacatataatgcctctcctgtgatttcgtctgtgaaggccgataggccatccttggagaagcccgagcccattcacctctcggtgtccacgcctgtcacccagggaggcacagtgaaggttctcacccaggggatcaacacaccccctgtgctggttcacaaccagctggtcctcaccccaagcattgtcaccacaaacaagaagcttgctgaccccgtcacccttaaaatcgagaccaaggtccttcagccggccaacctggggtccacgctcacgccccaccaccctcctgctctgcccagcaaactgcctacagaagtcaaccatgtcccctcggggcccagcatcccagcagatcgaactgtctcccatttggcagctgcaaagctagatgctcattctcctcgaccaagtggacccgggccatcctcattcccaagggcaagccaccccagcagtactgcatctacggcgctctccaccaacgccacagtcatgctggctgcaggcatcccagtgccccagttcatctccagcatccacccagagcagtctgtcatcatgccaccccacagcatcacccagactgtgtccctgagccacctctcccagggcgaggtgagaatgaacactcccacgctgcccagtatcacctacagcatccggccagaagcgcttcactctcctcgggctccgctgcagccccagcaaatagaggtcagggccccacagcgtgccagcaccccgcagccagccccagctggtgtgcctgcactggcctcccagcaccctcccgaggaggaagtgcattatcaccttcctgtcgctcgagccacagcccctgtgcagtcagaggtactagtcatgcagtctgagtaccgactgcacccctatactgtgccacgggatgtgaggatcatggtgcatccacatgtgacggcagtcagcgagcagcccagggccgcggatggggtggtgaaggtgccaccagccagcaaggcccctcagcagccagggaaggaagctgccaagacaccagatgccaaagctgcccccacccccacccctgcccccgtccctgtccctgtcccccttcctgcccctgctcctgcccctcatggtgaggcccgtatcctcacagttacccccagtaaccaactccaggggctgcctctgacccctcctgtggtggtgacccatggggtgcagattgtgcactccagcggggagctgtttcaagagtaccggtacggcgacatccgcacctaccaccccccggcccagctcacacacactcagtttcccgccgcttcctctgttggcctgccttcccggaccaagacagctgctcagggccctcctcctgaaggtgagcccctgcagcctcctcagcctgtgcagtccacacagcctgcccagcctgcaccaccctgcccgccctcccagctcggtcagcccggccagccaccaagcagcaagatgcctcaagtgtcccaggaggcaaaggggacccagacgggagtagagcagcctcgcctcccagctggacctgcaaacaggccacctgagcctcacacccaggttcagagggcacaagcagaaacaggcccgacttccttcccctcccctgtgtctgtctccatgaagcctgaccttccagtctctcttcccactcagactgccccaaaacagccgttgtttgtcccaacaacctctggccccagcaccccaccaggactggttctgccacacactgaattccagccagcccccaaacaagattcctctccacacctgacttcccagagacccgtggatatggttcaacttctgaagaagtaccccatcgtgtggcagggcctgctggccctcaagaatgacacagctgctgtgcagctccacttcgtctctggcaacaacgtcctggcccatcggtccctgcccctttctgaaggagggcccccactaaggatcgcccagaggatgcggctggaggcaacgcagctggaaggggttgcccgaaggatgacggtggagacagattactgtctgctgctggctctgccctgtggccgtgaccaagaggatgttgtgagccagaccgagtccctcaaggctgccttcatcacttacctgcaggccaagcaggcggcagggatcatcaacgttcccaaccctggctccaatcagcctgcctacgtgctgcagatcttcccgccctgtgagttctctgagagtcacctgtcccgcctggcccctgacctccttgccagcatctccaacatctctccccacctcatgattgtcattgcctccgtgtgagccactgagtggttatcacctcagtgaatcttcccagggctctgcagtaaaaacaaaggacaacccagccaagcagaggaagaagctgccgaaggggacagactccactgccagacggccagccgtttgctgtcctgccgcccggctcagtcggccagacttcctctaggagtggtgctgctaccttgtatgtttacataatgctttagcccaaggacacatcaccaacccatggactcgcagacaccggggctgggtttctctttcctctttttggagaaaaggaacagggcagtggaatgaaaattttttgtttgtttgtttttaagaaacaagaaaacagaactgcctttgcactaaattagtgacttggacttttgcccagtgaagacaggctgtgacactctggatgtcttggtgtgtgtagacacacattgcagactcttaacgcaggaaggacttcaaacttctgctgagaccttggggtcaaggaacatttcattggttttttttgtccacccccatctcccttgctcatttggatgcgtcaccttaattctcctgctgccaccgtctttgattcaccgggatgtacagtttacagttgaagagcaaacagaaaggttttctcttggtgggatatgcagaacttgggatgtgtgtatatataaatatataatatatataaatatatataatactgacttaaaaaatcaaatcccccgacatacgttttttttaatctgtgccaaaaatgtgttttcagaggaaatcttattttcatattcagactttgtattgcccactcatttgtataagtgcgcttcggtacagcacgggtcctgctcccgcgatgtggaagtgtcacacggcacctgtacaaaaagactggctaacccctcttcctattaccttgatctcttcccccaacttcctaacacttattaatttatgaaactgtttttctcagcgcagttttgttttgtgtgtccattggattacaaactttattaaaaaatataaaacacaccaagtgtgagtgtgattgtcacttgggtgggaggacgaaccatgggtccttggcttatgggaacagtcagccctcatcccgcttttgatccccatgccaagtctgtacatgggaactgtttcccttctgcctcctagtcagtcagtcctcctccccaaggataattttatcttgtacaaaggagatttttgtcacggacactgaacttaaccatttctcactcttgtggtgtcttcagagtcctaactggttcttaggtaatgtggaaggaaggcacttccaattttgatacagaatataaccacaccccatgccatctcagaaacattttagcaagctttggtttcttgtctctctcttgccccctcttcccttctcccagtgtgaagcaggctgactcctgcagaggcagtggcctcctggggccctgggggctcatttgatcccgtctctgcctccagacaggagaatgggagttggggacaggcttcccctgcagctggattctctagaagctgtggagttgggacagggacatggggactataaagttggtggtctcacttggaataccaatgggctcctacaaatgggcctgtcctggtgtgagaagatagcatccccctctgaacggtgggccatagatgccggggccactgtggggggacgagatggtacctcctgactccttgctgacaggagtgagaaagctgttcc

SEQ ID NO: 336542 - DNA, 11163 bp, Homo sapiens
tgagctgcgaggcccgagagtcagaacctgggggagagggatggtctctgcacgggggggagccggaggagccgccgccgctgccgacgccaccgccgcagccgccgccgccgccgccccggcacccgcctcccggcgctgacggtctcgtacgaagccggcgagggggagccagcagcggcggtcgccggcacgccgcccagcatggtccgggaaaccaggcatctctgggtgggcaacttacccgagaacgtgcgggaagagaagatcatcgagcatttcaaacgatatggccgcgtggaaagtgtcaaaattcttcccaagaggggatctgaaggaggagtggctgcctttgtggattttgtggacatcaaaagtgcacagaaagctcacaactcggtcaacaaaatgggtgacagagacctacgcacggattataatgaaccaggcaccatcccgagtgctgctcggggattggatgatacagtttccatagcatctcgtagtagagaggtttctgggttcagaggaggtggtggagggcctgcttatggtcccccaccgtcacttcatgcacgagaaggacgttatgagcggagacttgatggggcttcagataacagggagcgtgcttatgaacatagtgcctatggacaccatgaacgggggacgggaggatttgatcggacaagacattacgatcaggattactatagagatcctcgagagcggactttacaacatgggctctattacgcttctcggagtcgaagtccaaatcgctttgatgctcatgacccccgatatgaacctagggctcgcgagcagtttacactgcccagtgtggtacacagggatatctacagggatgatattacccgggaggtacgaggcagaaggccagagcggaattaccagcacagcaggagtcggtcaccacattcatcccagtctagaaatcagtctcctcagagactggctagccaagcatctagacccacaaggtcccctagcggcagcggctctagaagtagatcctccagtagtgattcaatcagcagcagcagtagtaccagcagtgacagcagtgattccagcagtagttcaagtgatgattctccagctcgatcagttcagtctgcagcagtccctgcacccacttcccagttgctttcatctctggaaaaagatgagccccgtaaaagttttggcatcaaggtccagaatcttccagtacgctctacagatacaagccttaaagatggccttttccatgaatttaagaaatttggaaaagtaacttcagtgcagatacatggaacttcagaagagaggtatggtctggtattctttcggcagcaagaggaccaagaaaaagccttgactgcatcaaaaggaaaacttttctttggcatgcagattgaagtaacagcatggataggtccagaaacagaaagtgaaaatgaatttcgccccttggatgaaaggatagatgaatttcaccccaaagcaacaagaactctctttattggcaaccttgaaaaaaccactacttaccatgaccttcgcaacatcttccagcgctttggagaaattgtggatattgacattaagaaagtaaatggagttcctcagtatgcgtttctgcaatactgtgatattgctagcgtttgtaaagctattaagaagatggatggggaatatcttggaaataatcgcctcaagctgggttttggaaagagcatgcctacaaactgcgtgtggctagatgggctttcttcgaatgtgtcagatcagtatttaacacgacatttctgccgatatgggcctgtggtaaaggtggtgtttgaccgcttaaaaggcatggccctggttctctacaatgaaattgaatatgcacaagcagctgtaaaagagaccaaagggaggaaaatcggtgggaataaaattaaggtggattttgcaaatcgggaaagtcagctggctttttatcactgcatggagaaatctggtcaagacatcagagacttttatgaaatgttagccgaaagaagagaggaacgaagggcatcctacgactataaccaagatcgtacatattatgagagtgttcgaactccaggcacttatcctgaggattccaggcgggactatccagctcgagggagagagttttattcagaatgggaaacttaccaaggagactactatgaatcacgatactacgatgatcctcgggaatacagggattacaggaatgatccttatgaacaagatattagggaatatagttacaggcaaagggaacgagaaagagaacgtgaaagatttgagtctgaccgggacagagaccatgagaggaggccgattgaacgaagtcaaagtcctgttcacttgcgacgtccacagagtcctggagcgtctccctctcaggcagagaggttgccgagtgattctgagaggaggctttacagccgatcctcagaccggagtggaagctgtagctcactctcccctccaagatatgagaaactggacaagtctcgtttggagcgctatacaaaaaatgaaaagacagataaagaacgaacttttgatccggagagagtggagagagagagacgcttaatacggaaggaaaaagtggaaaaggacaaaactgacaagcagaaacgcaaaggaaaggttcactcccctagttctcagtcttcagaaacggaccaagaaaatgagcgagagcaaagccctgaaaagcccaggagttgtaataaactgagcagagagaaagctgacaaagagggaatagcgaaaaaccgcctggaactcatgccttgcgtggttttgactcgagtgaaagagaaagagggaaaggtcattgaccacactcctgtggaaaagttgaaagccaagcttgataatgacactgtcaaatcttctgccctggaccagaaacttcaggtctctcagacggagcctgcaaaatctgacttgtctaaactggaatcagttagaatgaaagtaccaaaggaaaaggggctttcaagccatgttgaagtggtggagaaggaaggcaggcttaaagccaggaagcacctcaagcctgagcagcctgcagatggggtaagtgctgtggatctggagaagctggaagccaggaaaaggcgctttgcagattccaatttaaaagcagaaaagcaaaaaccagaggtcaagaaaagcagtccagagatggaggatgctcgcgtgctttcaaaaaagcagcctgacgtgtcctctagagaggtcattctgctgagggaaggagaggctgaaagaaagcctgtgaggaaagaaattcttaaaagagaatctaaaaaaatcaaactggacagacttaatactgttgccagccccaaagactgtcaggagcttgccagtatttctgttgggtctggctcaaggcccagctcagacctacaagcaagactgggagaaccagcaggtgaatctgtggaaaatcaagaagtccaatcaaaaaagcccattccctcaaaaccacagctcaaacagctgcaggtattagatgatcaaggaccagagagagaagacgttaggaaaaactattgcagtcttcgtgatgaaacacctgaacgtaaatcaggccaagagaaatcacattcagtaaatactgaagaaaaaattggcattgacatcgatcacacgcagagttaccgaaaacaaatggaacagagtcgtaggaaacagcagatggaaatggaaatagccaagtctgagaagtttggcagtcctaaaaaagatgtagatgaatatgaaagacgtagcctcgttcacgaggtaggcaaaccccctcaagatgtcactgatgactctcctcctagcaaaaagaaaaggatggatcatgtcgattttgatatctgcaccaagcgagaacggaattacagaagttcacgccaaatcagcgaagattctgaaaggactggtggttctcccagtgtccgacatggttccttccatgaagatgaggatcccataggctcccctaggctactgtcagtaaaagggtctcctaaagtagatgaaaaagtcctcccctattctaacataacagtcagggaagagtctttaaaatttaatccttatgattctagcaggagagaacagatggcagatatggccaaaataaaactatctgtcttgaattctgaagatgaactaaatcgttgggactctcagatgaaacaggatgctggcagatttgatgtgagtttcccaaacagcataattaagagagatagccttcgaaaaaggtctgtacgagatctggaacctggtgaggtgccttctgattctgacgaagatggtgaacacaaatcccactcacccagagcctctgcattatatgaaagttctcgattgtcttttttattgagggacagagaagacaagctacgtgagcgagatgaaagactctctagttctttagaaaggaacaaattttactcttttgcattggataagacaatcacaccagacactaaagctttgcttgaaagagctaaatccctctcttcatctcgtgaagaaaattggtcttttcttgattgggactcccgatttgcaaattttcgaaacaacaaagataaagaaaaggttgactctgctccaagacctattccatcctggtacatgaaaaagaagaaaattaggactgattcagaagggaaaatggatgataagaaagaggaccataaagaagaagagcaagagaggcaggaattgtttgcttctcgttttttacacagctcaatctttgaacaagattccaagcgattgcagcatctagagagaaaagaggaagattctgacttcatttctggtaggatctatgggaagcagacatctgagggagcaaacagcacaactgattccattcaagaaccagtagttctgttccatagcagatttatggagctcacacggatgcaacagaaagaaaaagaaaaagaccagaaacccaaagaggttgagaaacaggaagatacagagaatcatcccaagaccccagaatctgctcctgagaataaagattcagaactgaaaactccaccttccgttgggcctccaagtgtcacagtcgtaactctagaatcagccccatcagcactagagaagaccactggtgacaaaacggtagaggcgcctttggtaacagaagagaagactgtggagccagctaccgtctcagaagaagcaaagcctgcatctgaacctgctcctgcccctgtggaacagctggaacaagtagacctgcccccaggagcagaccccgataaagaagctgccatgatgcctgcgggtgttgaggaaggttcatcaggtgaccagccgccttatctggatgccaagcctccaactcccggggcctcgttttcccaggcagagagcaacgtagatccagagcctgacagtacccagccactttcaaaaccagctcagaagtctgaggaagccaatgagccaaaggccgaaaagccagacgccactgcagatgctgagcctgatgcaaaccagaaagccgaagctgctcctgagtctcagcccccagcttctgaagatttagaggttgatcctccagttgctgcaaaggataaaaagccaaacaaaagcaagcgttcaaagacccctgttcaggcagctgcagtgagtatcgtggagaagcccgtcacaaggaagagtgagaggatagaccgggaaaaactcaagcggtccaattctcctcggggagaagcacagaagcttttggaattgaagatggaggcagagaagattacaaggactgcttctaaaaactctgctgcagaccttgaacatcccgaaccaagtttgcctctcagccgaacaaggcgccggaatgtaaggagcgtctatgcaaccatgggtgaccatgaaaaccgctctcctgtcaaagagcccgttgagcaaccaagagtgaccagaaagagattggagcgagagcttcaggaggctgcagcggttcccaccacccctcggaggggaaggcctccaaagacacgccggcgagccgatgaagaggaggagaacgaggccaaggaacctgcagaaacactcaagccacctgagggatggcggtcgccaaggtcccagaaaactgcagctggtggtggaccccaagggaaaaagggaaaaaatgaaccgaaggtggatgctacacgtcctgaggccaccactgaggtgggcccccaaataggcgtgaaagagagctccatggaacccaaggctgctgaggaggaggcagggagtgaacagaaacgtgacagaaaagatgctggcacagacaaaaacccccctgaaaccgcccctgttgaagttgtagagaaaaaaccggcccctgaaaaaaactccaaatcaaagagaggaagatctcgaaactccaggttagcagtggacaaatctgcaagtctgaaaaatgtggatgctgctgtcagtcccaggggggctgcagcacaggcaggggagagggaatctggggtggtggcagtctcccctgagaaaagtgagagtccccaaaaggaggatggtttatcatcccagttgaaaagtgatccagttgatccagacaaggaaccagagaaagaagacgtgtctgcctctgggccgtccccagaagccacccagttagccaagcagatggagctggagcaggccgtggaacacatcgcaaagctcgctgaggcctctgcctctgctgcctataaggcagatgcaccagagggccttgccccagaggacagggacaagcctgcacaccaagcaagtgaaacagagctggctgcggccatcggctccatcatcaatgacatttctggggagccagaaaacttcccagcacctccaccttatcctggagaatcccagacagatctgcaaccccccgcaggtgcacaggcgctgcagccttctgaggaaggaatggagacagatgaggctgtatctggcatcctggaaactgaggctgctacagaatcttctaggcctccagtcaatgctcctgacccctcagccggcccaacagataccaaggaagccagaggaaatagcagtgaaacctcacactcagtgccagaagccaaagggtctaaagaagtggaagtcactcttgttcggaaagacaaagggcgccagaaaacaacccgatcacgccgcaagcgaaacacaaacaagaaagtggtggctcctgtagagagccatgtccctgaatccgaccaagctcaaggtgagagtcctgctgcaaatgaggggacaacagtacagcaccccgaagccccacaggaagaaaagcagagtgagaaaccccattccactcctcctcagtcatgtacttctgacctaagcaagattccctccacagagaattcgtcccaagaaatcagtgttgaggaaaggactccaaccaaagcatctgtgcccccagaccttcccccacctccccagccagcaccggtggatgaggagcctcaagccaggttcagggtgcattccatcattgaaagtgacccggtgaccccacccagcgatccaagcatccccatacccacactgccttctgtaactgcagcaaagctctcacctcctgtcgcctctggggggatcccacaccagagcccccctactaaggtgacagagtggatcacaaggcaggaggagccacgggctcagtctactccatctccagctcttcccccagacacaaaggcctctgatgttgacaccagctccagcaccctgaggaagattctcatggaccccaagtatgtgtctgccacaagtgtcacttccacaagtgtcaccacagccattgcagagcctgtcagtgctgccccttgcctacatgaggccccgcccccgccagttgactctaaaaagcctttagaagaaaaaacagcacctccagtgacaaacaactctgagatacaagcctcggaggtgctggtagctgctgacaaggaaaaggtggctccagtcattgctcccaaaattacctctgttattagccggatgcctgtcagcattgacctggaaaattcacagaagataaccttggcaaaaccagctcctcaaaccctcactggtctggtgagcgcactcactggcctggtgaacgtctccctggtcccggtgaatgccctgaaaggccccgtgaagggctcagtgaccacactgaaaagtttggtgagcacccctgctgggcccgtgaacgtcctgaaagggcctgtgaatgttcttacggggccagtgaatgttctcaccactccagtgaacgccacggtgggcacagtgaatgccgccccaggcacagtcaatgccgctgcgagtgcagtgaatgccacagcaagtgcagtgaccgtcacagcgggtgcggttactgctgcatctggtggtgtaacggccacaacaggcacggtgacaatggcaggggcagtgattgcgccgtcaacaaagtgcaaacagagagcgagtgctaatgaaaacagtcggttccacccagggtccatgcctgtgatcgacgatcgtccggcagacgcgggctcaggggcggggctgcgtgtgaacacttctgaaggggttgtgctcctgagttactcagggcagaagaccgaaggcccacagcggatcagcgccaagatcagccagatccccccggccagtgcaatggacattgaatttcagcagtcagtgtccaagtcccaggtcaaacctgattctgtcacagcatcgcagcctccatccaaaggccctcaagctcctgcaggctatgcgaacgtggccacccattccacgttggtactgaccgcccagacatataatgcctctcctgtgatttcgtctgtgaaggccgataggccatccttggagaagcccgagcccattcacctctcggtgtccacgcctgtcacccagggaggcacagtgaaggttctcacccaggggatcaacacaccccctgtgctggttcacaaccagctggtcctcaccccaagcattgtcaccacaaacaagaagcttgctgaccccgtcacccttaaaatcgagaccaaggtccttcagccggccaacctggggtccacgctcacgccccaccaccctcctgctctgcccagcaaactgcctacagaagtcaaccatgtcccctcggggcccagcatcccagcagatcgaactgtctcccatttggcagctgcaaagctagatgctcattctcctcgaccaagtggacccgggccatcctcattcccaagggcaagccaccccagcagtactgcatctacggcgctctccaccaacgccacagtcatgctggctgcaggcatcccagtgccccagttcatctccagcatccacccagagcagtctgtcatcatgccaccccacagcatcacccagactgtgtccctgagccacctctcccagggcgaggtgagaatgaacactcccacgctgcccagtatcacctacagcatccggccagaagcgcttcactctcctcgggctccgctgcagccccagcaaatagaggtcagggccccacagcgtgccagcaccccgcagccagccccagctggtgtgcctgcactggcctcccagcaccctcccgaggaggaagtgcattatcaccttcctgtcgctcgagccacagcccctgtgcagtcagaggtactagtcatgcagtctgagtaccgactgcacccctatactgtgccacgggatgtgaggatcatggtgcatccacatgtgacggcagtcagcgagcagcccagggccgcggatggggtggtgaaggtgccaccagccagcaaggcccctcagcagccagggaaggaagctgccaagacaccagatgccaaagctgcccccacccccatctcccttgctcatttggatgcgtcaccttaattctcctgctgccaccgtctttgattcaccgggatgtacagtttacagttgaagagcaaacagaaaggttttctcttggtgggatatgcagaacttgggatgtgtgtatatataaatatataatatatataaatatatataatactgacttaaaaaatcaaatcccccgacatacgttttttttaatctgtgccaaaaatgtgttttcagaggaaatcttattttcatattcagactttgtattgcccactcatttgtataagtgcgcttcggtacagcacgggtcctgctcccgcgatgtggaagtgtcacacggcacctgtacaaaaagactggctaacccctcttcctattaccttgatctcttcccccaacttcctaacacttattaatttatgaaactgtttttctcagcgcagttttgttttgtgtgtccattggattacaaactttattaaaaaatataaaacacaccaagtgtgagtgtgattgtcacttgggtgggaggacgaaccatgggtccttggcttatgggaacagtcagccctcatcccgcttttgatccccatgccaagtctgtacatgggaactgtttcccttctgcctcctagtcagtcagtcctcctccccaaggataattttatcttgtacaaaggagatttttgtcacggacactgaacttaaccatttctcactcttgtggtgtcttcagagtcctaactggttcttaggtaatgtggaaggaaggcacttccaattttgatacagaatataaccacaccccatgccatctcagaaacattttagcaagctttggtttcttgtctctctcttgccccctcttcccttctcccagtgtgaagcaggctgactcctgcagaggcagtggcctcctggggccctgggggctcatttgatcccgtctctgcctccagacaggagaatgggagttggggacaggcttcccctgcagctggattctctagaagctgtggagttgggacagggacatggggactataaagttggtggtctcacttggaataccaatgggctcctacaaatgggcctgtcctggtgtgagaagatagcatccccctctgaacggtgggccatagatgccggggccactgtggggggacgagatggtacctcctgactccttgctgacaggagtgagaaagctgttcc

SEQ ID NO: 336543 - DNA, 11884 bp, Homo sapiens
tgagctgcgaggcccgagagtcagaacctgggggagagggatggtctctgcacgggggggagccggaggagccgccgccgctgccgacgccaccgccgcagccgccgccgccgccgccccggcacccgcctcccggcgctgacggtctcgtacgaagccggcgagggggagccagcagcggcggtcgccggcacgccgcccagcatggtccgggaaaccaggcatctctgggtgggcaacttacccgagaacgtgcgggaagagaagatcatcgagcatttcaaacgatatggccgcgtggaaagtgtcaaaattcttcccaagaggggatctgaaggaggagtggctgcctttgtggattttgtggacatcaaaagtgcacagaaagctcacaactcggtcaacaaaatgggtgacagagacctacgcacggattataatgaaccaggcaccatcccgagtgctgctcggggattggatgatacagtttccatagcatctcgtagtagagaggtttctgggttcagaggaggtggtggagggcctgcttatggtcccccaccgtcacttcatgcacgagaaggacgttatgagcggagacttgatggggcttcagataacagggagcgtgcttatgaacatagtgcctatggacaccatgaacgggggacgggaggatttgatcggacaagacattacgatcaggattactatagagatcctcgagagcggactttacaacatgggctctattacgcttctcggagtcgaagtccaaatcgctttgatgctcatgacccccgatatgaacctagggctcgcgagcagtttacactgcccagtgtggtacacagggatatctacagggatgatattacccgggaggtacgaggcagaaggccagagcggaattaccagcacagcaggagtcggtcaccacattcatcccagtctagaaatcagtctcctcagagactggctagccaagcatctagacccacaaggtcccctagcggcagcggctctagaagtagatcctccagtagtgattcaatcagcagcagcagtagtaccagcagtgacagcagtgattccagcagtagttcaagtgatgattctccagctcgatcagttcagtctgcagcagtccctgcacccacttcccagttgctttcatctctggaaaaagatgagccccgtaaaagttttggcatcaaggtccagaatcttccagtacgctctacagatacaagccttaaagatggccttttccatgaatttaagaaatttggaaaagtaacttcagtgcagatacatggaacttcagaagagaggtatggtctggtattctttcggcagcaagaggaccaagaaaaagccttgactgcatcaaaaggaaaacttttctttggcatgcagattgaagtaacagcatggataggtccagaaacagaaagtgaaaatgaatttcgccccttggatgaaaggatagatgaatttcaccccaaagcaacaagaactctctttattggcaaccttgaaaaaaccactacttaccatgaccttcgcaacatcttccagcgctttggagaaattgtggatattgacattaagaaagtaaatggagttcctcagtatgcgtttctgcaatactgtgatattgctagcgtttgtaaagctattaagaagatggatggggaatatcttggaaataatcgcctcaagctgggttttggaaagagcatgcctacaaactgcgtgtggctagatgggctttcttcgaatgtgtcagatcagtatttaacacgacatttctgccgatatgggcctgtggtaaaggtggtgtttgaccgcttaaaaggcatggccctggttctctacaatgaaattgaatatgcacaagcagctgtaaaagagaccaaagggaggaaaatcggtgggaataaaattaaggtggattttgcaaatcgggaaagtcagctggctttttatcactgcatggagaaatctggtcaagacatcagagacttttatgaaatgttagccgaaagaagagaggaacgaagggcatcctacgactataaccaagatcgtacatattatgagagtgttcgaactccaggcacttatcctgaggattccaggcgggactatccagctcgagggagagagttttattcagaatgggaaacttaccaaggagactactatgaatcacgatactacgatgatcctcgggaatacagggattacaggaatgatccttatgaacaagatattagggaatatagttacaggcaaagggaacgagaaagagaacgtgaaagatttgagtctgaccgggacagagaccatgagaggaggccgattgaacgaagtcaaagtcctgttcacttgcgacgtccacagagtcctggagcgtctccctctcaggcagagaggttgccgagtgattctgagaggaggctttacagccgatcctcagaccggagtggaagctgtagctcactctcccctccaagatatgagaaactggacaagtctcgtttggagcgctatacaaaaaatgaaaagacagataaagaacgaacttttgatccggagagagtggagagagagagacgcttaatacggaaggaaaaagtggaaaaggacaaaactgacaagcagaaacgcaaaggaaaggttcactcccctagttctcagtcttcagaaacggaccaagaaaatgagcgagagcaaagccctgaaaagcccaggagttgtaataaactgagcagagagaaagctgacaaagagggaatagcgaaaaaccgcctggaactcatgccttgcgtggttttgactcgagtgaaagagaaagagggaaaggtcattgaccacactcctgtggaaaagttgaaagccaagcttgataatgacactgtcaaatcttctgccctggaccagaaacttcaggtctctcagacggagcctgcaaaatctgacttgtctaaactggaatcagttagaatgaaagtaccaaaggaaaaggggctttcaagccatgttgaagtggtggagaaggaaggcaggcttaaagccaggaagcacctcaagcctgagcagcctgcagatggggtaagtgctgtggatctggagaagctggaagccaggaaaaggcgctttgcagattccaatttaaaagcagaaaagcaaaaaccagaggtcaagaaaagcagtccagagatggaggatgctcgcgtgctttcaaaaaagcagcctgacgtgtcctctagagaggtcattctgctgagggaaggagaggctgaaagaaagcctgtgaggaaagaaattcttaaaagagaatctaaaaaaatcaaactggacagacttaatactgttgccagccccaaagactgtcaggagcttgccagtatttctgttgggtctggctcaaggcccagctcagacctacaagcaagactgggagaaccagcaggtgaatctgtggaaaatcaagaagtccaatcaaaaaagcccattccctcaaaaccacagctcaaacagctgcaggtattagatgatcaaggaccagagagagaagacgttaggaaaaactattgcagtcttcgtgatgaaacacctgaacgtaaatcaggccaagagaaatcacattcagtaaatactgaagaaaaaattggcattgacatcgatcacacgcagagttaccgaaaacaaatggaacagagtcgtaggaaacagcagatggaaatggaaatagccaagtctgagaagtttggcagtcctaaaaaagatgtagatgaatatgaaagacgtagcctcgttcacgaggtaggcaaaccccctcaagatgtcactgatgactctcctcctagcaaaaagaaaaggatggatcatgtcgattttgatatctgcaccaagcgagaacggaattacagaagttcacgccaaatcagcgaagattctgaaaggactggtggttctcccagtgtccgacatggttccttccatgaagatgaggatcccataggctcccctaggctactgtcagtaaaagggtctcctaaagtagatgaaaaagtcctcccctattctaacataacagtcagggaagagtctttaaaatttaatccttatgattctagcaggagagaacagatggcagatatggccaaaataaaactatctgtcttgaattctgaagatgaactaaatcgttgggactctcagatgaaacaggatgctggcagatttgatgtgagtttcccaaacagcataattaagagagatagccttcgaaaaaggtctgtacgagatctggaacctggtgaggtgccttctgattctgacgaagatggtgaacacaaatcccactcacccagagcctctgcattatatgaaagttctcgattgtcttttttattgagggacagagaagacaagctacgtgagcgagatgaaagactctctagttctttagaaaggaacaaattttactcttttgcattggataagacaatcacaccagacactaaagctttgcttgaaagagctaaatccctctcttcatctcgtgaagaaaattggtcttttcttgattgggactcccgatttgcaaattttcgaaacaacaaagataaagaaaaggttgactctgctccaagacctattccatcctggtacatgaaaaagaagaaaattaggactgattcagaagggaaaatggatgataagaaagaggaccataaagaagaagagcaagagaggcaggaattgtttgcttctcgttttttacacagctcaatctttgaacaagattccaagcgattgcagcatctagagagaaaagaggaagattctgacttcatttctggtaggatctatgggaagcagacatctgagggagcaaacagcacaactgattccattcaagaaccagtagttctgttccatagcagatttatggagctcacacggatgcaacagaaagaaaaagaaaaagaccagaaacccaaagaggttgagaaacaggaagatacagagaatcatcccaagaccccagaatctgctcctgagaataaagattcagaactgaaaactccaccttccgttgggcctccaagtgtcacagtcgtaactctagaatcagccccatcagcactagagaagaccactggtgacaaaacggtagaggcgcctttggtaacagaagagaagactgtggagccagctaccgtctcagaagaagcaaagcctgcatctgaacctgctcctgcccctgtggaacagctggaacaagtagacctgcccccaggagcagaccccgataaagaagctgccatgatgcctgcgggtgttgaggaaggttcatcaggtgaccagccgccttatctggatgccaagcctccaactcccggggcctcgttttcccaggcagagagcaacgtagatccagagcctgacagtacccagccactttcaaaaccagctcagaagtctgaggaagccaatgagccaaaggccgaaaagccagacgccactgcagatgctgagcctgatgcaaaccagaaagccgaagctgctcctgagtctcagcccccagcttctgaagatttagaggttgatcctccagttgctgcaaaggataaaaagccaaacaaaagcaagcgttcaaagacccctgttcaggcagctgcagtgagtatcgtggagaagcccgtcacaaggaagagtgagaggatagaccgggaaaaactcaagcggtccaattctcctcggggagaagcacagaagcttttggaattgaagatggaggcagagaagattacaaggactgcttctaaaaactctgctgcagaccttgaacatcccgaaccaagtttgcctctcagccgaacaaggcgccggaatgtaaggagcgtctatgcaaccatgggtgaccatgaaaaccgctctcctgtcaaagagcccgttgagcaaccaagagtgaccagaaagagattggagcgagagcttcaggaggctgcagcggttcccaccacccctcggaggggaaggcctccaaagacacgccggcgagccgatgaagaggaggagaacgaggccaaggaacctgcagaaacactcaagccacctgagggatggcggtcgccaaggtcccagaaaactgcagctggtggtggaccccaagggaaaaagggaaaaaatgaaccgaaggtggatgctacacgtcctgaggccaccactgaggtgggcccccaaataggcgtgaaagagagctccatggaacccaaggctgctgaggaggaggcagggagtgaacagaaacgtgacagaaaagatgctggcacagacaaaaacccccctgaaaccgcccctgttgaagttgtagagaaaaaaccggcccctgaaaaaaactccaaatcaaagagaggaagatctcgaaactccaggttagcagtggacaaatctgcaagtctgaaaaatgtggatgctgctgtcagtcccaggggggctgcagcacaggcaggggagagggaatctggggtggtggcagtctcccctgagaaaagtgagagtccccaaaaggaggatggtttatcatcccagttgaaaagtgatccagttgatccagacaaggaaccagagaaagaagacgtgtctgcctctgggccgtccccagaagccacccagttagccaagcagatggagctggagcaggccgtggaacacatcgcaaagctcgctgaggcctctgcctctgctgcctataaggcagatgcaccagagggccttgccccagaggacagggacaagcctgcacaccaagcaagtgaaacagagctggctgcggccatcggctccatcatcaatgacatttctggggagccagaaaacttcccagcacctccaccttatcctggagaatcccagacagatctgcaaccccccgcaggtgcacaggcgctgcagccttctgaggaaggaatggagacagatgaggctgtatctggcatcctggaaactgaggctgctacagaatcttctaggcctccagtcaatgctcctgacccctcagccggcccaacagataccaaggaagccagaggaaatagcagtgaaacctcacactcagtgccagaagccaaagggtctaaagaagtggaagtcactcttgttcggaaagacaaagggcgccagaaaacaacccgatcacgccgcaagcgaaacacaaacaagaaagtggtggctcctgtagagagccatgtccctgaatccgaccaagctcaaggtgagagtcctgctgcaaatgaggggacaacagtacagcaccccgaagccccacaggaagaaaagcagagtgagaaaccccattccactcctcctcagtcatgtacttctgacctaagcaagattccctccacagagaattcgtcccaagaaatcagtgttgaggaaaggactccaaccaaagcatctgtgcccccagaccttcccccacctccccagccagcaccggtggatgaggagcctcaagccaggttcagggtgcattccatcattgaaagtgacccggtgaccccacccagcgatccaagcatccccatacccacactgccttctgtaactgcagcaaagctctcacctcctgtcgcctctggggggatcccacaccagagcccccctactaaggtgacagagtggatcacaaggcaggaggagccacgggctcagtctactccatctccagctcttcccccagacacaaaggcctctgatgttgacaccagctccagcaccctgaggaagattctcatggaccccaagtatgtgtctgccacaagtgtcacttccacaagtgtcaccacagccattgcagagcctgtcagtgctgccccttgcctacatgaggccccgcccccgccagttgactctaaaaagcctttagaagaaaaaacagcacctccagtgacaaacaactctgagatacaagcctcggaggtgctggtagctgctgacaaggaaaaggtggctccagtcattgctcccaaaattacctctgttattagccggatgcctgtcagcattgacctggaaaattcacagaagataaccttggcaaaaccagctcctcaaaccctcactggtctggtgagcgcactcactggcctggtgaacgtctccctggtcccggtgaatgccctgaaaggccccgtgaagggctcagtgaccacactgaaaagtttggtgagcacccctgctgggcccgtgaacgtcctgaaagggcctgtgaatgttcttacggggccagtgaatgttctcaccactccagtgaacgccacggtgggcacagtgaatgccgccccaggcacagtcaatgccgctgcgagtgcagtgaatgccacagcaagtgcagtgaccgtcacagcgggtgcggttactgctgcatctggtggtgtaacggccacaacaggcacggtgacaatggcaggggcagtgattgcgccgtcaacaaagtgcaaacagagagcgagtgctaatgaaaacagtcggttccacccagggtccatgcctgtgatcgacgatcgtccggcagacgcgggctcaggggcggggctgcgtgtgaacacttctgaaggggttgtgctcctgagttactcagggcagaagaccgaaggcccacagcggatcagcgccaagatcagccagatccccccggccagtgcaatggacattgaatttcagcagtcagtgtccaagtcccaggtcaaacctgattctgtcacagcatcgcagcctccatccaaaggccctcaagctcctgcaggctatgcgaacgtggccacccattccacgttggtactgaccgcccagacatataatgcctctcctgtgatttcgtctgtgaaggccgataggccatccttggagaagcccgagcccattcacctctcggtgtccacgcctgtcacccagggaggcacagtgaaggttctcacccaggggatcaacacaccccctgtgctggttcacaaccagctggtcctcaccccaagcattgtcaccacaaacaagaagcttgctgaccccgtcacccttaaaatcgagaccaaggtccttcagccggccaacctggggtccacgctcacgccccaccaccctcctgctctgcccagcaaactgcctacagaagtcaaccatgtcccctcggggcccagcatcccagcagatcgaactgtctcccatttggcagctgcaaagctagatgctcattctcctcgaccaagtggacccgggccatcctcattcccaagggcaagccaccccagcagtactgcatctacggcgctctccaccaacgccacagtcatgctggctgcaggcatcccagtgccccagttcatctccagcatccacccagagcagtctgtcatcatgccaccccacagcatcacccagactgtgtccctgagccacctctcccagggcgaggtgagaatgaacactcccacgctgcccagtatcacctacagcatccggccagaagcgcttcactctcctcgggctccgctgcagccccagcaaatagaggtcagggccccacagcgtgccagcaccccgcagccagccccagctggtgtgcctgcactggcctcccagcaccctcccgaggaggaagtgcattatcaccttcctgtcgctcgagccacagcccctgtgcagtcagaggtactagtcatgcagtctgagtaccgactgcacccctatactgtgccacgggatgtgaggatcatggtgcatccacatgtgacggcagtcagcgagcagcccagggccgcggatggggtggtgaaggtgccaccagccagcaaggcccctcagcagccagggaaggaagctgccaagacaccagatgccaaagctgcccccacccccacccctgcccccgtccctgtccctgtcccccttcctgcccctgctcctgcccctcatggtgaggcccgtatcctcacagttacccccagtaaccaactccaggggctgcctctgacccctcctgtggtggtgacccatggggtgcagattgtgcactccagcggggagctgtttcaagagtaccggtacggcgacatccgcacctaccaccccccggcccagctcacacacactcagtttcccgccgcttcctctgttggcctgccttcccggaccaagacagctgctcagggccctcctcctgaaggtgagcccctgcagcctcctcagcctgtgcagtccacacagcctgcccagcctgcaccaccctgcccgccctcccagctcggtcagcccggccagccaccaagcagcaagatgcctcaagtgtcccaggaggcaaaggggacccagacgggagtagagcagcctcgcctcccagctggacctgcaaacaggccacctgagcctcacacccaggttcagagggcacaagcagaaacaggcccgacttccttcccctcccctgtgtctgtctccatgaagcctgaccttccagtctctcttcccactcagactgccccaaaacagccgttgtttgtcccaacaacctctggccccagcaccccaccaggactggttctgccacacactgaattccagccagcccccaaacaagattcctctccacacctgacttcccagagacccgtggatatggttcaacttctgaagaagtaccccatcgtgtggcagggcctgctggccctcaagaatgacacagctgctgtgcagctccacttcgtctctggcaacaacgtcctggcccatcggtccctgcccctttctgaaggagggcccccactaaggatcgcccagaggatgcggctggaggcaacgcagctggaaggggttgcccgaaggatgacggtggagacagattactgtctgctgctggctctgccctgtggccgtgaccaagaggatgttgtgagccagaccgagtccctcaaggctgccttcatcacttacctgcaggccaagcaggcggcagggatcatcaacgttcccaaccctggctccaatcagcctgcctacgtgctgcagatcttcccgccctgtgagttctctgagagtcacctgtcccgcctggcccctgacctccttgccagcatctccaacatctctccccacctcatgattgtcattgcctccgtgtgagccactgagtggttatcacctcagtgaatcttcccagggctctgcagtaaaaacaaaggacaacccagccaagcagaggaagaagctgccgaaggggacagactccactgccagacggccagccgtttgctgtcctgccgcccggctcagtcggccagacttcctctaggagtggtgctgctaccttgtatgtttacataatgctttagcccaaggacacatcaccaacccatggactcgcagacaccggggctgggtttctctttcctctttttggagaaaaggaacagggcagtggaatgaaaattttttgtttgtttgtttttaagaaacaagaaaacagaactgcctttgcactaaattagtgacttggacttttgcccagtgaagacaggctgtgacactctggatgtcttggtgtgtgtagacacacattgcagactcttaacgcaggaaggacttcaaacttctgctgagaccttggggtcaaggaacatttcattggttttttttgtccacccccatctcccttgctcatttggatgcgtcaccttaattctcctgctgccaccgtctttgattcaccgggatgtacagtttacagttgaagagcaaacagaaaggttttctcttggtgggatatgcagtacatgcaagacagggatactctagagtcagctctgac

SEQ ID NO: 336544 - DNA, 7660 bp, Homo sapiens
tgagctgcgaggcccgagagtcagaacctgggggagagggatggtctctgcacgggggggagccggaggagccgccgccgctgccgacgccaccgccgcagccgccgccgccgccgccccggcacccgcctcccggcgctgacggtctcgtacgaagccggcgagggggagccagcagcggcggtcgccggcacgccgcccagcatggtccgggaaaccaggcatctctgggtgggcaacttacccgagaacgtgcgggaagagaagatcatcgagcatttcaaacgatatggccgcgtggaaagtgtcaaaattcttcccaagaggggatctgaaggaggagtggctgcctttgtggattttgtggacatcaaaagtgcacagaaagctcacaactcggtcaacaaaatgggtgacagagacctacgcacggattataatgaaccaggcaccatcccgagtgctgctcggggattggatgatacagtttccatagcatctcgtagtagagaggtttctgggttcagaggaggtggtggagggcctgcttatggtcccccaccgtcacttcatgcacgagaaggacgttatgagcggagacttgatggggcttcagataacagggagcgtgcttatgaacatagtgcctatggacaccatgaacgggggacgggaggatttgatcggacaagacattacgatcaggattactatagagatcctcgagagcggactttacaacatgggctctattacgcttctcggagtcgaagtccaaatcgctttgatgctcatgacccccgatatgaacctagggctcgcgagcagtttacactgcccagtgtggtacacagggatatctacagggatgatattacccgggaggtacgaggcagaaggccagagcggaattaccagcacagcaggagtcggtcaccacattcatcccagtctagaaatcagtctcctcagagactggctagccaagcatctagacccacaaggtcccctagcggcagcggctctagaagtagatcctccagtagtgattcaatcagcagcagcagtagtaccagcagtgacagcagtgattccagcagtagttcaagtgatgattctccagctcgatcagttcagtctgcagcagtccctgcacccacttcccagttgctttcatctctggaaaaagatgagccccgtaaaagttttggcatcaaggtccagaatcttccagtacgctctacagatacaagccttaaagatggccttttccatgaatttaagaaatttggaaaagtaacttcagtgcagatacatggaacttcagaagagaggtatggtctggtattctttcggcagcaagaggaccaagaaaaagccttgactgcatcaaaaggaaaacttttctttggcatgcagattgaagtaacagcatggataggtccagaaacagaaagtgaaaatgaatttcgccccttggatgaaaggatagatgaatttcaccccaaagcaacaagaactctctttattggcaaccttgaaaaaaccactacttaccatgaccttcgcaacatcttccagcgctttggagaaattgtggatattgacattaagaaagtaaatggagttcctcagtatgcgtttctgcaatactgtgatattgctagcgtttgtaaagctattaagaagatggatggggaatatcttggaaataatcgcctcaagctgggttttggaaagagcatgcctacaaactgcgtgtggctagatgggctttcttcgaatgtgtcagatcagtatttaacacgacatttctgccgatatgggcctgtggtaaaggtggtgtttgaccgcttaaaaggcatggccctggttctctacaatgaaattgaatatgcacaagcagctgtaaaagagaccaaagggaggaaaatcggtgggaataaaattaaggtggattttgcaaatcgggaaagtcagctggctttttatcactgcatggagaaatctggtcaagacatcagagacttttatgaaatgttagccgaaagaagagaggaacgaagggcatcctacgactataaccaagatcgtacatattatgagagtgttcgaactccaggcacttatcctgaggattccaggcgggactatccagctcgagggagagagttttattcagaatgggaaacttaccaaggagactactatgaatcacgatactacgatgatcctcgggaatacagggattacaggaatgatccttatgaacaagatattagggaatatagttacaggcaaagggaacgagaaagagaacgtgaaagatttgagtctgaccgggacagagaccatgagaggaggccgattgaacgaagtcaaagtcctgttcacttgcgacgtccacagagtcctggagcgtctccctctcaggcagagaggttgccgagtgattctgagaggaggctttacagccgatcctcagaccggagtggaagctgtagctcactctcccctccaagatatgagaaactggacaagtctcgtttggagcgctatacaaaaaatgaaaagacagataaagaacgaacttttgatccggagagagtggagagagagagacgcttaatacggaaggaaaaagtggaaaaggacaaaactgacaagcagaaacgcaaaggaaaggttcactcccctagttctcagtcttcagaaacggaccaagaaaatgagcgagagcaaagccctgaaaagcccaggagttgtaataaactgagcagagagaaagctgacaaagagggaatagcgaaaaaccgcctggaactcatgccttgcgtggttttgactcgagtgaaagagaaagagggaaaggtcattgaccacactcctgtggaaaagttgaaagccaagcttgataatgacactgtcaaatcttctgccctggaccagaaacttcaggtctctcagacggagcctgcaaaatctgacttgtctaaactggaatcagttagaatgaaagtaccaaaggaaaaggggctttcaagccatgttgaagtggtggagaaggaaggcaggcttaaagccaggaagcacctcaagcctgagcagcctgcagatggggtaagtgctgtggatctggagaagctggaagccaggaaaaggcgctttgcagattccaatttaaaagcagaaaagcaaaaaccagaggtcaagaaaagcagtccagagatggaggatgctcgcgtgctttcaaaaaagcagcctgacgtgtcctctagagaggtcattctgctgagggaaggagaggctgaaagaaagcctgtgaggaaagaaattcttaaaagagaatctaaaaaaatcaaactggacagacttaatactgttgccagccccaaagactgtcaggagcttgccagtatttctgttgggtctggctcaaggcccagctcagacctacaagcaagactgggagaaccagcaggtgaatctgtggaaaatcaagaagtccaatcaaaaaagcccattccctcaaaaccacagctcaaacagctgcaggtattagatgatcaaggaccagagagagaagacgttaggaaaaactattgcagtcttcgtgatgaaacacctgaacgtaaatcaggccaagagaaatcacattcagtaaatactgaagaaaaaattggcattgacatcgatcacacgcagagttaccgaaaacaaatggaacagagtcgtaggaaacagcagatggaaatggaaatagccaagtctgagaagtttggcagtcctaaaaaagatgtagatgaatatgaaagacgtagcctcgttcacgaggtaggcaaaccccctcaagatgtcactgatgactctcctcctagcaaaaagaaaaggatggatcatgtcgattttgatatctgcaccaagcgagaacggaattacagaagttcacgccaaatcagcgaagattctgaaaggactggtggttctcccagtgtccgacatggttccttccatgaagatgaggatcccataggctcccctaggctactgtcagtaaaagggtctcctaaagtagatgaaaaagtcctcccctattctaacataacagtcagggaagagtctttaaaatttaatccttatgattctagcaggagagaacagatggcagatatggccaaaataaaactatctgtcttgaattctgaagatgaactaaatcgttgggactctcagatgaaacaggatgctggcagatttgatgtgagtttcccaaacagcataattaagagagatagccttcgaaaaaggtctgtacgagatctggaacctggtgaggtgccttctgattctgacgaagatggtgaacacaaatcccactcacccagagcctctgcattatatgaaagttctcgattgtcttttttattgagggacagagaagacaagctacgtgagcgagatgaaagactctctagttctttagaaaggaacaaattttactcttttgcattggataagacaatcacaccagacactaaagctttgcttgaaagagctaaatccctctcttcatctcgtgaagaaaattggtcttttcttgattgggactcccgatttgcaaattttcgaaacaacaaagataaagaaaaggttgactctgctccaagacctattccatcctggtacatgaaaaagaagaaaattaggactgattcagaagggaaaatggatgataagaaagaggaccataaagaagaagagcaagagaggcaggaattgtttgcttctcgttttttacacagctcaatctttgaacaagattccaagcgattgcagcatctagagagaaaagaggaagattctgacttcatttctggtaggatctatgggaagcagacatctgagggagcaaacagcacaactgattccattcaagaaccagtagttctgttccatagcagatttatggagctcacacggatgcaacagaaagaaaaagaaaaagaccagaaacccaaagaggttgagaaacaggaagatacagagaatcatcccaagaccccagaatctgctcctgagaataaagattcagaactgaaaactccaccttccgttgggcctccaagtgtcacagtcgtaactctagaatcagccccatcagcactagagaagaccactggtgacaaaacggtagaggcgcctttggtaacagaagagaagactgtggagccagctaccgtctcagaagaagcaaagcctgcatctgaacctgctcctgcccctgtggaacagctggaacaagtagacctgcccccaggagcagaccccgataaagaagctgccatgatgcctgcgggtgttgaggaaggttcatcaggtgaccagccgccttatctggatgccaagcctccaactcccggggcctcgttttcccaggcagagagcaacgtagatccagagcctgacagtacccagccactttcaaaaccagctcagaagtctgaggaagccaatgagccaaaggccgaaaagccagacgccactgcagatgctgagcctgatgcaaaccagaaagccgaagctgctcctgagtctcagcccccagcttctgaagatttagaggttgatcctccagttgctgcaaaggataaaaagccaaacaaaagcaagcgttcaaagacccctgttcaggcagctgcagtgagtatcgtggagaagcccgtcacaaggaagagtgagaggatagaccgggaaaaactcaagcggtccaattctcctcggggagaagcacagaagcttttggaattgaagatggaggcagagaagattacaaggactgcttctaaaaactctgctgcagaccttgaacatcccgaaccaagtttgcctctcagccgaacaaggcgccggaatgtaaggagcgtctatgcaaccatgggtgaccatgaaaaccgctctcctgtcaaagagcccgttgagcaaccaagagtgaccagaaagagattggagcgagagcttcaggaggctgcagcggttcccaccacccctcggaggggaaggcctccaaagacacgccggcgagccgatgaagaggaggagaacgaggccaaggaacctgcagaaacactcaagccacctgagggatggcggtcgccaaggtcccagaaaactgcagctggtggtggaccccaagggaaaaagggaaaaaatgaaccgaaggtggatgctacacgtcctgaggccaccactgaggtgggcccccaaataggcgtgaaagagagctccatggaacccaaggctgctgaggaggaggcagggagtgaacagaaacgtgacagaaaagatgctggcacagacaaaaacccccctgaaaccgcccctgttgaagttgtagagaaaaaaccggcccctgaaaaaaactccaaatcaaagagaggaagatctcgaaactccaggttagcagtggacaaatctgcaagtctgaaaaatgtggatgctgctgtcagtcccaggggggctgcagcacaggcaggggagagggaatctggggtggtggcagtctcccctgagaaaagtgagagtccccaaaaggaggatggtttatcatcccagttgaaaagtgatccagttgatccagacaaggaaccagagaaagaagacgtgtctgcctctgggccgtccccagaagccacccagttagccaagcagatggagctggagcaggccgtggaacacatcgcaaagctcgctgaggcctctgcctctgctgcctataaggcagatgcaccagagggccttgccccagaggacagggacaagcctgcacaccaagcaagtgaaacagagctggctgcggccatcggctccatcatcaatgacatttctggggagccagaaaacttcccagcacctccaccttatcctggagaatcccagacagatctgcaaccccccgcaggtgcacaggcgctgcagccttctgaggaaggaatggagacagatgaggctgtatctggcatcctggaaactgaggctgctacagaatcttctaggcctccagtcaatgctcctgacccctcagccggcccaacagataccaaggaagccagaggaaatagcagtgaaacctcacactcagtgccagaagccaaagggtctaaagaagtggaagtcactcttgttcggaaagacaaagggcgccagaaaacaacccgatcacgccgcaagcgaaacacaaacaagaaagtggtggctcctgtagagagccatgtccctgaatccgaccaagctcaaggtgagagtcctgctgcaaatgaggggacaacagtacagcaccccgaagccccacaggaagaaaagcagagtgagaaaccccattccactcctcctcagtcatgtacttctgacctaagcaagattccctcaggctgggcttctggcccagcctgtggggattttctcttagaggaagttattctgaggagtcagaacgcagcacaagataaactgcttgccaatttagttttctgttgctgtgtgatgaactgccacacacttagcagcttaaaccaacgcccgtttactctctcctagtgatggagttcaaaagtctgggtgggctctctgggttctctgctcagggtctcagcaggctgcgttc

SEQ ID NO: 336545 - DNA, 2560 bp, Homo sapiens
ttcatgattacgccaagcttggcacgaggcccagctggacctgcaaacaggccacctgagcctcacacccaggttcagagggcacaagcagaaacaggcccgacttccttcccctcccctgtgtctgtctccatgaagcctgaccttccagtctctcttcccactcagactgccccaaaacagccgttgtttgtcccaacaacctctggccccagcaccccaccaggactggttctgccacacactgaattccagccagcccccaaacaagattcctctccacacctgacttcccagagacccgtggatatggttcaacttctgaagaagtaccccatcgtgtggcagggcctgctggccctcaagaatgacacagctgctgtgcagctccacttcgtctctggcaacaacgtcctggcccatcggtccctgcccctttctgaaggagggcccccactaaggatcgcccagaggatgcggctggaggcaacgcagctggaaggggttgcccgaaggatgacggtggagacagattactgtctgctgctggctctgccctgtggccgtgaccaagaggatgttgtgagccagaccgagtccctcaaggctgccttcatcacttacctgcaggccaagcaggcggcagggatcatcaacgttcccaaccctggctccaatcagcctgcctacgtgctgcagatcttcccgccctgtgagttctctgagagtcacctgtcccgcctggcccctgacctccttgccagcatctccaacatctctccccacctcatgattgtcattgcctccgtgtgagccactgagtggttatcacctcagtgaatcttcccagggctctgcagtaaaaacaaaggacaacccagccaagcagaggaagaagctgccgaaggggacagactccactgccagacggccagccgtttgctgtcctgccgcccggctcagtcggccagacttcctctaggagtggtgctgctaccttgtatgtttacataatgctttagcccaaggacacatcaccaacccatggactcgcagacaccggggctgggtttctctttcctctttttggagaaaaggaacagggcagtggaatgaaaattttttgtttgtttgtttttaagaaacaagaaaacagaactgcctttgcactaaattagtgacttggacttttgcccagtgaagacaggctgtgacactctggatgtcttggtgtgtgtagacacacattgcagactcttaacgcaggaaggacttcaaacttctgctgagaccttggggtcaaggaacatttcattggttttttttgtccacccccatctcccttgctcatttggatgcgtcaccttaattctcctgctgccaccgtctttgattcaccgggatgtacagtttacagttgaagagcaaacagaaaggttttctcttggtgggatatgcagaacttgggatgtgtgtatatataaatatataatatatataaatatatataatactgacttaaaaaatcaaatcccccgacatacgttttttttaatctgtgccaaaaatgtgttttcagaggaaatcttattttcatattcagactttgtattgcccactcatttgtataagtgcgcttcggtacagcacgggtcctgctcccgcgatgtggaagtgtcacacggcacctgtacaaaaagactggctaacccctcttcctattaccttgatctcttcccccaacttcctaacacttattaatttatgaaactgtttttctcagcgcagttttgttttgtgtgtccattggattacaaactttattaaaaaatataaaacacaccaagtgtgagtgtgattgtcacttgggtgggaggacgaaccatgggtccttggcttatgggaacagtcagccctcatcccgcttttgatccccatgccaagtctgtacatgggaactgtttcccttctgcctcctagtcagtcagtcctcctccccaaggataattttatcttgtacaaaggagatttttgtcacggacactgaacttaaccatttctcactcttgtggtgtcttcagagtcctaactggttcttaggtaatgtggaaggaaggcacttccaattttgatacagaatataaccacaccccatgccatctcagaaacattttagcaagctttggtttcttgtctctctcttgccccctcttcccttctcccagtgtgaagcaggctgactcctgcagaggcagtggcctcctggggccctgggggctcatttgatcccgtctctgcctccagacaggagaatgggagttggggacaggcttcccctgcagctggattctctagaagctgtggagttgggacagggacatggggactataaagttggtggtctcacttggaataccaatgggctcctacaaatgggcctgtcctggtgtgagaagatagcatccccctctgaacggtgggccatagatgccggggccactgtggggggacgagatggtacctcctgactccttgctgacaggagtgagaaagctgttcc

SEQ ID NO: 336546 - DNA, 1996 bp, Homo sapiens
gttttctgacacctgctaggtcttccagtagacatagtcctggcacatttgctggttggggactgatttggcctggctcttagcattgggcctcttcagggctccccaatggaagtggagttgtgggggtgaagacagacggtcccactttgctctctatcctgtctccagcctgcctacgtgctgcagatcttcccgccctgtgagttctctgagagtcacctgtcccgcctggcccctgacctccttgccagcatctccaacatctctccccacctcatgattgtcattgcctccgtgtgagccactgagtggttatcacctcagtgaatcttcccagggctctgcagtatccactgccagacggccagccgtttgctgtcctgccgcccggctcagtcggccagacttcctctaggagtggtgctgctaccttgtatgtttacataatgctttagcccaaggacacatcaccaacccatggactcgcagacaccggggctgggtttctctttcctctttttggagaaaaggaacagggcagtggaatgaaaattttttgtttgtttgtttttaagaaacaagaaaacagaactgcctttgcactaaattagtgacttggacttttgcccagtgaagacaggctgtgacactctggatgtcttggtgtgtgtagacacacattgcagactcttaacgcaggaaggacttcaaacttctgctgagaccttggggtcaaggaacatttcattggttttttttgtccacccccatctcccttgctcatttggatgcgtcaccttaattctcctgctgccaccgtctttgattcaccgggatgtacagtttacagttgaagagcaaacagaaaggttttctcttggtgggatatgcagaacttgggatgtgtgtatatataaatatataatatatataaatatatataatactgacttaaaaaatcaaatcccccgacatacgttttttttaatctgtgccaaaaatgtgttttcagaggaaatcttattttcatattcagactttgtattgcccactcatttgtataagtgcgcttcggtacagcacgggtcctgctcccgcgatgtggaagtgtcacacggcacctgtacaaaaagactggctaacccctcttcctattaccttgatctcttcccccaacttcctaacacttattaatttatgaaactgtttttctcagcgcagttttgttttgtgtgtccattggattacaaactttattaaaaaatataaaacacaccaagtgtgagtgtgattgtcacttgggtgggaggacgaaccatgggtccttggcttatgggaacagtcagccctcatcccgcttttgatccccatgccaagtctgtacatgggaactgtttcccttctgcctcctagtcagtcagtcctcctccccaaggataattttatcttgtacaaaggagatttttgtcacggacactgaacttaaccatttctcactcttgtggtgtcttcagagtcctaactggttcttaggtaatgtggaaggaaggcacttccaattttgatacagaatataaccacaccccatgccatctcagaaacattttagcaagctttggtttcttgtctctctcttgccccctcttcccttctcccagtgtgaagcaggctgactcctgcagaggcagtggcctcctggggccctgggggctcatttgatcccgtctctgcctccagacaggagaatgggagttggggacaggcttcccctgcagctggattctctagaagctgtggagttgggacagggacatggggactataaagttggtggtctcacttggaataccaatgggctcctacaaatgggcctgtcctggtgtgagaagatagcatccccctctgaacggtgggccatagatgccggggccactgtggggggacgagatggtacctcctgactccttgctgacaggagtgagaaagctgttcc

SEQ ID NO: 336547 - DNA, 1408 bp, Homo sapiens
acagcctgtcttcactgggcaaaagtccaagtcactaatttagtgcaaaggcagtgctgtgacactctggatgtcttggtgtgtgtagacacacattgcagactcttaacgcaggaaggacttcaaacttctgctgagaccttggggtcaaggaacatttcattggttttttttgtccacccccatctcccttgctcatttggatgcgtcaccttaattctcctgctgccaccgtctttgattcaccgggatgtacagtttacagttgaagagcaaacagaaaggttttctcttggtgggatatgcagaacttgggatgtgtgtatatataaatatataatatatataaatatatataatactgacttaaaaaatcaaatcccccgacatacgttttttttaatctgtgccaaaaatgtgttttcagaggaaatcttattttcatattcagactttgtattgcccactcatttgtataagtgcgcttcggtacagcacgggtcctgctcccgcgatgtggaagtgtcacacggcacctgtacaaaaagactggctaacccctcttcctattaccttgatctcttcccccaacttcctaacacttattaatttatgaaactgtttttctcagcgcagttttgttttgtgtgtccattggattacaaactttattaaaaaatataaaacacaccaagtgtgagtgtgattgtcacttgggtgggaggacgaaccatgggtccttggcttatgggaacagtcagccctcatcccgcttttgatccccatgccaagtctgtacatgggaactgtttcccttctgcctcctagtcagtcagtcctcctccccaaggataattttatcttgtacaaaggagatttttgtcacggacactgaacttaaccatttctcactcttgtggtgtcttcagagtcctaactggttcttaggtaatgtggaaggaaggcacttccaattttgatacagaatataaccacaccccatgccatctcagaaacattttagcaagctttggtttcttgtctctctcttgccccctcttcccttctcccagtgtgaagcaggctgactcctgcagaggcagtggcctcctggggccctgggggctcatttgatcccgtctctgcctccagacaggagaatgggagttggggacaggcttcccctgcagctggattctctagaagctgtggagttgggacagggacatggggactataaagttggtggtctcacttggaataccaatgggctcctacaaatgggcctgtcctggtgtgagaagatagcatccccctctgaacggtgggccatagatgccggggccactgtggggggacgagatggtacctcctgactccttgctgacaggagtgagaaagctgttcc

SEQ ID NO: 336548 - DNA, 1115 bp, Homo sapiens
tgagctgcgaggcccgagagtcagaacctgggggagagggatggtctctgcacgggggggagccggaggagccgccgccgctgccgacgccaccgccgcagccgccgccgccgccgccccggcacccgcctcccggcgctgacggtctcgtacgaagccggcgagggggagccagcagcggcggtcgccggcacgccgcccagcatggtccgggaaaccaggcatctctgggtgggcaacttacccgagaacgtgcgggaagagaagatcatcgagcatttcaaacgatatggccgcgtggaaagtgtcaaaattcttcccaagaggggatctgaaggaggagtggctgcctttgtggattttgtggacatcaaaagtgcacagaaagctcacaactcggtcaacaaaatgggtgacagagacctacgcacggattataatgaaccaggcaccatcccgagtgctgctcggggattggatgatacagtttccatagcatctcgtagtagagaggtttctgggttcagaggaggtggtggagggcctgcttatggtcccccaccgtcacttcatgcacgagaaggacgttatgagcggagacttgatgggtaagttccaaggtttctgtaggcaggtattttgtatttgatatggtgagaaacagaaactcatatttaggggccccagatggatttaaagttttgggcattctcaatgtttcctattttgggttggaaacggaagtgatttatatcccaatggctggtatcttatggaatcgtagaggatatttcctgcagctgattggatatctgttcctgagatataatgtgatggaagatttcctatggaagcttcatttttggagttacctgtcttctagaattacttattccttctcttggataatgttaagtccttccttggatatatcccttctacctgatggagctatttggcttttgtgttcatactatatggaatatttctggaatattagagcctacagattcttttagaagttgatatctgcctctccattttcactacataaagtgtacaaacaaattggattgtaacaaaaaatggaaatgtgtacttggatgaagaagaga

SEQ ID NO: 336549 - DNA, 634 bp, Homo sapiens
cacccttgcccattaagaaggtggattacccccataagaggggccaaaattggggaagttatgttcacaattctctccctagatttaattgggattataggtcgtgtttccacacttggaaaagggcttcagataacagggagcgtgcttatgaacatagtgcctatggacaccatgaacgggggacgggaggatttgatcggacaagacattacgatcaggattactatagagatcctcgagagcggactttacaacatgggctctattacgcttctcggagtcgaagtccaaatcgctttgatgctcatgacccccgatatgaacctagggctcgcgagcagtttacactgcccagtgtggtacacagggatatctacagggatgatattacccgggaggtacgaggcagaaggccagagcggaattaccagcacagcaggagtcggtcaccacattcatcccagtctagaaatcagtctcctcagagactggctagccaagcatctagacccacaaggtcccctagcggcagcggctctagaagtagatcctccagtagtgattcaatcagcagcagcagtagtaccagcagtgacaggtaggttaacagccttttgttataacagatgag

SEQ ID NO: 336550 - DNA, 12423 bp, Homo sapiens
  misc_feature (12249)..(12251): n is a, c, g, or t
  misc_feature (12267)..(12267): n is a, c, g, or t
  misc_feature (12272)..(12273): n is a, c, g, or t
  misc_feature (12297)..(12297): n is a, c, g, or t
  misc_feature (12320)..(12320): n is a, c, g, or t
  misc_feature (12335)..(12335): n is a, c, g, or t
  misc_feature (12358)..(12358): n is a, c, g, or t
  misc_feature (12418)..(12418): n is a, c, g, or t
tgagctgcgaggcccgagagtcagaacctgggggagagggatggtctctgcacgggggggagccggaggagccgccgccgctgccgacgccaccgccgcagccgccgccgccgccgccccggcacccgcctcccggcgctgacggtctcgtacgaagccggcgagggggagccagcagcggcggtcgccggcacgccgcccagcatggtccgggaaaccaggcatctctgggtgggcaacttacccgagaacgtgcgggaagagaagatcatcgagcatttcaaacgatatggccgcgtggaaagtgtcaaaattcttcccaagaggggatctgaaggaggagtggctgcctttgtggattttgtggacatcaaaagtgcacagaaagctcacaactcggtcaacaaaatgggtgacagagacctacgcacggattataatgaaccaggcaccatcccgagtgctgctcggggattggatgatacagtttccatagcatctcgtagtagagaggtttctgggttcagaggaggtggtggagggcctgcttatggtcccccaccgtcacttcatgcacgagaaggacgttatgagcggagacttgatggggcttcagataacagggagcgtgcttatgaacatagtgcctatggacaccatgaacgggggacgggaggatttgatcggacaagacattacgatcaggattactatagagatcctcgagagcggactttacaacatgggctctattacgcttctcggagtcgaagtccaaatcgctttgatgctcatgacccccgatatgaacctagggctcgcgagcagtttacactgcccagtgtggtacacagggatatctacagggatgatattacccgggaggtacgaggcagaaggccagagcggaattaccagcacagcaggagtcggtcaccacattcatcccagtctagaaatcagtctcctcagagactggctagccaagcatctagacccacaaggtcccctagcggcagcggctctagaagtagatcctccagtagtgattcaatcagcagcagcagtagtaccagcagtgacagcagtgattccagcagtagttcaagtgatgattctccagctcgatcagttcagtctgcagcagtccctgcacccacttcccagttgctttcatctctggaaaaagatgagccccgtaaaagttttggcatcaaggtccagaatcttccagtacgctctacagatacaagccttaaagatggccttttccatgaatttaagaaatttggaaaagtaacttcagtgcagatacatggaacttcagaagagaggtatggtctggtattctttcggcagcaagaggaccaagaaaaagccttgactgcatcaaaaggaaaacttttctttggcatgcagattgaagtaacagcatggataggtccagaaacagaaagtgaaaatgaatttcgccccttggatgaaaggatagatgaatttcaccccaaagcaacaagaactctctttattggcaaccttgaaaaaaccactacttaccatgaccttcgcaacatcttccagcgctttggagaaattgtggatattgacattaagaaagtaaatggagttcctcagtatgcgtttctgcaatactgtgatattgctagcgtttgtaaagctattaagaagatggatggggaatatcttggaaataatcgcctcaagctgggttttggaaagagcatgcctacaaactgcgtgtggctagatgggctttcttcgaatgtgtcagatcagtatttaacacgacatttctgccgatatgggcctgtggtaaaggtggtgtttgaccgcttaaaaggcatggccctggttctctacaatgaaattgaatatgcacaagcagctgtaaaagagaccaaagggaggaaaatcggtgggaataaaattaaggtggattttgcaaatcgggaaagtcagctggctttttatcactgcatggagaaatctggtcaagacatcagagacttttatgaaatgttagccgaaagaagagaggaacgaagggcatcctacgactataaccaagatcgtacatattatgagagtgttcgaactccaggcacttatcctgaggattccaggcgggactatccagctcgagggagagagttttattcagaatgggaaacttaccaaggagactactatgaatcacgatactacgatgatcctcgggaatacagggattacaggaatgatccttatgaacaagatattagggaatatagttacaggcaaagggaacgagaaagagaacgtgaaagatttgagtctgaccgggacagagaccatgagaggaggccgattgaacgaagtcaaagtcctgttcacttgcgacgtccacagagtcctggagcgtctccctctcaggcagagaggttgccgagtgattctgagaggaggctttacagccgatcctcagaccggagtggaagctgtagctcactctcccctccaagatatgagaaactggacaagtctcgtttggagcgctatacaaaaaatgaaaagacagataaagaacgaacttttgatccggagagagtggagagagagagacgcttaatacggaaggaaaaagtggaaaaggacaaaactgacaagcagaaacgcaaaggaaaggttcactcccctagttctcagtcttcagaaacggaccaagaaaatgagcgagagcaaagccctgaaaagcccaggagttgtaataaactgagcagagagaaagctgacaaagagggaatagcgaaaaaccgcctggaactcatgccttgcgtggttttgactcgagtgaaagagaaagagggaaaggtcattgaccacactcctgtggaaaagttgaaagccaagcttgataatgacactgtcaaatcttctgccctggaccagaaacttcaggtctctcagacggagcctgcaaaatctgacttgtctaaactggaatcagttagaatgaaagtaccaaaggaaaaggggctttcaagccatgttgaagtggtggagaaggaaggcaggcttaaagccaggaagcacctcaagcctgagcagcctgcagatggggtaagtgctgtggatctggagaagctggaagccaggaaaaggcgctttgcagattccaatttaaaagcagaaaagcaaaaaccagaggtcaagaaaagcagtccagagatggaggatgctcgcgtgctttcaaaaaagcagcctgacgtgtcctctagagaggtcattctgctgagggaaggagaggctgaaagaaagcctgtgaggaaagaaattcttaaaagagaatctaaaaaaatcaaactggacagacttaatactgttgccagccccaaagactgtcaggagcttgccagtatttctgttgggtctggctcaaggcccagctcagacctacaagcaagactgggagaaccagcaggtgaatctgtggaaaatcaagaagtccaatcaaaaaagcccattccctcaaaaccacagctcaaacagctgcaggtattagatgatcaaggaccagagagagaagacgttaggaaaaactattgcagtcttcgtgatgaaacacctgaacgtaaatcaggccaagagaaatcacattcagtaaatactgaagaaaaaattggcattgacatcgatcacacgcagagttaccgaaaacaaatggaacagagtcgtaggaaacagcagatggaaatggaaatagccaagtctgagaagtttggcagtcctaaaaaagatgtagatgaatatgaaagacgtagcctcgttcacgaggtaggcaaaccccctcaagatgtcactgatgactctcctcctagcaaaaagaaaaggatggatcatgtcgattttgatatctgcaccaagcgagaacggaattacagaagttcacgccaaatcagcgaagattctgaaaggactggtggttctcccagtgtccgacatggttccttccatgaagatgaggatcccataggctcccctaggctactgtcagtaaaagggtctcctaaagtagatgaaaaagtcctcccctattctaacataacagtcagggaagagtctttaaaatttaatccttatgattctagcaggagagaacagatggcagatatggccaaaataaaactatctgtcttgaattctgaagatgaactaaatcgttgggactctcagatgaaacaggatgctggcagatttgatgtgagtttcccaaacagcataattaagagagatagccttcgaaaaaggtctgtacgagatctggaacctggtgaggtgccttctgattctgacgaagatggtgaacacaaatcccactcacccagagcctctgcattatatgaaagttctcgattgtcttttttattgagggacagagaagacaagctacgtgagcgagatgaaagactctctagttctttagaaaggaacaaattttactcttttgcattggataagacaatcacaccagacactaaagctttgcttgaaagagctaaatccctctcttcatctcgtgaagaaaattggtcttttcttgattgggactcccgatttgcaaattttcgaaacaacaaagataaagaaaaggttgactctgctccaagacctattccatcctggtacatgaaaaagaagaaaattaggactgattcagaagggaaaatggatgataagaaagaggaccataaagaagaagagcaagagaggcaggaattgtttgcttctcgttttttacacagctcaatctttgaacaagattccaagcgattgcagcatctagagagaaaagaggaagattctgacttcatttctggtaggatctatgggaagcagacatctgagggagcaaacagcacaactgattccattcaagaaccagtagttctgttccatagcagatttatggagctcacacggatgcaacagaaagaaaaagaaaaagaccagaaacccaaagaggttgagaaacaggaagatacagagaatcatcccaagaccccagaatctgctcctgagaataaagattcagaactgaaaactccaccttccgttgggcctccaagtgtcacagtcgtaactctagaatcagccccatcagcactagagaagaccactggtgacaaaacggtagaggcgcctttggtaacagaagagaagactgtggagccagctaccgtctcagaagaagcaaagcctgcatctgaacctgctcctgcccctgtggaacagctggaacaagtagacctgcccccaggagcagaccccgataaagaagctgccatgatgcctgcgggtgttgaggaaggttcatcaggtgaccagccgccttatctggatgccaagcctccaactcccggggcctcgttttcccaggcagagagcaacgtagatccagagcctgacagtacccagccactttcaaaaccagctcagaagtctgaggaagccaatgagccaaaggccgaaaagccagacgccactgcagatgctgagcctgatgcaaaccagaaagccgaagctgctcctgagtctcagcccccagcttctgaagatttagaggttgatcctccagttgctgcaaaggataaaaagccaaacaaaagcaagcgttcaaagacccctgttcaggcagctgcagtgagtatcgtggagaagcccgtcacaaggaagagtgagaggatagaccgggaaaaactcaagcggtccaattctcctcggggagaagcacagaagcttttggaattgaagatggaggcagagaagattacaaggactgcttctaaaaactctgctgcagaccttgaacatcccgaaccaagtttgcctctcagccgaacaaggcgccggaatgtaaggagcgtctatgcaaccatgggtgaccatgaaaaccgctctcctgtcaaagagcccgttgagcaaccaagagtgaccagaaagagattggagcgagagcttcaggaggctgcagcggttcccaccacccctcggaggggaaggcctccaaagacacgccggcgagccgatgaagaggaggagaacgaggccaaggaacctgcagaaacactcaagccacctgagggatggcggtcgccaaggtcccagaaaactgcagctggtggtggaccccaagggaaaaagggaaaaaatgaaccgaaggtggatgctacacgtcctgaggccaccactgaggtgggcccccaaataggcgtgaaagagagctccatggaacccaaggctgctgaggaggaggcagggagtgaacagaaacgtgacagaaaagatgctggcacagacaaaaacccccctgaaaccgcccctgttgaagttgtagagaaaaaaccggcccctgaaaaaaactccaaatcaaagagaggaagatctcgaaactccaggttagcagtggacaaatctgcaagtctgaaaaatgtggatgctgctgtcagtcccaggggggctgcagcacaggcaggggagagggaatctggggtggtggcagtctcccctgagaaaagtgagagtccccaaaaggaggatggtttatcatcccagttgaaaagtgatccagttgatccagacaaggaaccagagaaagaagacgtgtctgcctctgggccgtccccagaagccacccagttagccaagcagatggagctggagcaggccgtggaacacatcgcaaagctcgctgaggcctctgcctctgctgcctataaggcagatgcaccagagggccttgccccagaggacagggacaagcctgcacaccaagcaagtgaaacagagctggctgcggccatcggctccatcatcaatgacatttctggggagccagaaaacttcccagcacctccaccttatcctggagaatcccagacagatctgcaaccccccgcaggtgcacaggcgctgcagccttctgaggaaggaatggagacagatgaggctgtatctggcatcctggaaactgaggctgctacagaatcttctaggcctccagtcaatgctcctgacccctcagccggcccaacagataccaaggaagccagaggaaatagcagtgaaacctcacactcagtgccagaagccaaagggtctaaagaagtggaagtcactcttgttcggaaagacaaagggcgccagaaaacaacccgatcacgccgcaagcgaaacacaaacaagaaagtggtggctcctgtagagagccatgtccctgaatccgaccaagctcaaggtgagagtcctgctgcaaatgaggggacaacagtacagcaccccgaagccccacaggaagaaaagcagagtgagaaaccccattccactcctcctcagtcatgtacttctgacctaagcaagattccctccacagagaattcgtcccaagaaatcagtgttgaggaaaggactccaaccaaagcatctgtgcccccagaccttcccccacctccccagccagcaccggtggatgaggagcctcaagccaggttcagggtgcattccatcattgaaagtgacccggtgaccccacccagcgatccaagcatccccatacccacactgccttctgtaactgcagcaaagctctcacctcctgtcgcctctggggggatcccacaccagagcccccctactaaggtgacagagtggatcacaaggcaggaggagccacgggctcagtctactccatctccagctcttcccccagacacaaaggcctctgatgttgacaccagctccagcaccctgaggaagattctcatggaccccaagtatgtgtctgccacaagtgtcacttccacaagtgtcaccacagccattgcagagcctgtcagtgctgccccttgcctacatgaggccccgcccccgccagttgactctaaaaagcctttagaagaaaaaacagcacctccagtgacaaacaactctgagatacaagcctcggaggtgctggtagctgctgacaaggaaaaggtggctccagtcattgctcccaaaattacctctgttattagccggatgcctgtcagcattgacctggaaaattcacagaagataaccttggcaaaaccagctcctcaaaccctcactggtctggtgagcgcactcactggcctggtgaacgtctccctggtcccggtgaatgccctgaaaggccccgtgaagggctcagtgaccacactgaaaagtttggtgagcacccctgctgggcccgtgaacgtcctgaaagggcctgtgaatgttcttacggggccagtgaatgttctcaccactccagtgaacgccacggtgggcacagtgaatgccgccccaggcacagtcaatgccgctgcgagtgcagtgaatgccacagcaagtgcagtgaccgtcacagcgggtgcggttactgctgcatctggtggtgtaacggccacaacaggcacggtgacaatggcaggggcagtgattgcgccgtcaacaaagtgcaaacagagagcgagtgctaatgaaaacagtcggttccacccagggtccatgcctgtgatcgacgatcgtccggcagacgcgggctcaggggcggggctgcgtgtgaacacttctgaaggggttgtgctcctgagttactcagggcagaagaccgaaggcccacagcggatcagcgccaagatcagccagatccccccggccagtgcaatggacattgaatttcagcagtcagtgtccaagtcccaggtcaaacctgattctgtcacagcatcgcagcctccatccaaaggccctcaagctcctgcaggctatgcgaacgtggccacccattccacgttggtactgaccgcccagacatataatgcctctcctgtgatttcgtctgtgaaggccgataggccatccttggagaagcccgagcccattcacctctcggtgtccacgcctgtcacccagggaggcacagtgaaggttctcacccaggggatcaacacaccccctgtgctggttcacaaccagctggtcctcaccccaagcattgtcaccacaaacaagaagcttgctgaccccgtcacccttaaaatcgagaccaaggtccttcagccggccaacctggggtccacgctcacgccccaccaccctcctgctctgcccagcaaactgcctacagaagtcaaccatgtcccctcggggcccagcatcccagcagatcgaactgtctcccatttggcagctgcaaagctagatgctcattctcctcgaccaagtggacccgggccatcctcattcccaagggcaagccaccccagcagtactgcatctacggcgctctccaccaacgccacagtcatgctggctgcaggcatcccagtgccccagttcatctccagcatccacccagagcagtctgtcatcatgccaccccacagcatcacccagactgtgtccctgagccacctctcccagggcgaggtgagaatgaacactcccacgctgcccagtatcacctacagcatccggccagaagcgcttcactctcctcgggctccgctgcagccccagcaaatagaggtcagggccccacagcgtgccagcaccccgcagccagccccagctggtgtgcctgcactggcctcccagcaccctcccgaggaggaagtgcattatcaccttcctgtcgctcgagccacagcccctgtgcagtcagaggtactagtcatgcagtctgagtaccgactgcacccctatactgtgccacgggatgtgaggatcatggtgcatccacatgtgacggcagtcagcgagcagcccagggccgcggatggggtggtgaaggtgccaccagccagcaaggcccctcagcagccagggaaggaagctgccaagacaccagatgccaaagctgcccccacccccacccctgcccccgtccctgtccctgtcccccttcctgcccctgctcctgcccctcatggtgaggcccgtatcctcacagttacccccagtaaccaactccaggggctgcctctgacccctcctgtggtggtgacccatggggtgcagattgtgcactccagcggggagctgtttcaagagtaccggtacggcgacatccgcacctaccaccccccggcccagctcacacacactcagtttcccgccgcttcctctgttggcctgccttcccggaccaagacagctgctcagggccctcctcctgaaggtgagcccctgcagcctcctcagcctgtgcagtccacacagcctgcccagcctgcaccaccctgcccgccctcccagctcggtcagcccggccagccaccaagcagcaagatgcctcaagtgtcccaggaggcaaaggggacccagacgggagtagagcagcctcgcctcccagctggacctgcaaacaggccacctgagcctcacacccaggttcagagggcacaagcagaaacaggcccgacttccttcccctcccctgtgtctgtctccatgaagcctgaccttccagtctctcttcccactcagactgccccaaaacagccgttgtttgtcccaacaacctctggccccagcaccccaccaggactggttctgccacacactgaattccagccagcccccaaacaagattcctctccacacctgacttcccagagacccgtggatatggttcaacttctgaagaagtaccccatcgtgtggcagggcctgctggccctcaagaatgacacagctgctgtgcagctccacttcgtctctggcaacaacgtcctggcccatcggtccctgcccctttctgaaggagggcccccactaaggatcgcccagaggatgcggctggaggcaacgcagctggaaggggttgcccgaaggatgacggtggagacagattactgtctgctgctggctctgccctgtggccgtgaccaagaggatgttgtgagccagaccgagtccctcaaggctgccttcatcacttacctgcaggccaagcaggcggcagggatcatcaacgttcccaaccctggctccaatcagcctgcctacgtgctgcagatcttcccgccctgtgagttctctgagagtcacctgtcccgcctggcccctgacctccttgccagcatctccaacatctctccccacctcatgattgtcattgcctccgtgtgagccactgagtggttatcacctcagtgaatcttcccagggctctgcagtaaaaacaaaggacaacccagccaagcagaggaagaagctgccgaaggggacagactccactgccagacggccagccgtttgctgtcctgccgcccggctcagtcggccagacttcctctaggagtggtgctgctaccttgtatgtttacataatgctttagcccaaggacacatcaccaacccatggactcgcagacaccggggctgggtttctctttcctctttttggagaaaaggaacagggcagtggaatgaaaattttttgtttgtttgtttttaagaaacaagaaaacagaactgcctttgcactaaattagtgacttggacttttgcccagtgaagacaggctgtgacactctggatgtcttggtgtgtgtagacacacattgcagactcttaacgcaggaaggacttcaaacttctgctgagaccttggggtcaaggaacatttcattggttttttttgtccacccccatctcccttgctcatttggatgcgtcaccttaattctcctgctgccaccgtctttgattcaccgggatgtacagtttacagttgaagagcaaacagaaaggttttctcttggtgggatatgcagaacttgggatgtgtgtatatataaatatataatatatataaatatatataatactgacttaaaaaatcaaatcccccgacatacgttttttttaatctgtgccaaaaatgtgttttcagaggaaatcttattttcatattcagactttgtattgcccactcatttgtataagtgcgcttcggtacagcacgggtcctgctcccgcgatgtggaagtgtcacacggcacctgtacaaaaagactggctaacccctcttcctattaccttgatctcttcccccaacttcctaacacttattaatttatgaaactgtttttctcagcgcagttttgttttgtgtgtccattggattacaaactttattaaaaaatataaaacccaaaaaaaaaaaaaaaaaaaaannnccccccccccccctcnccccnnaaaaaaaaaaaaaaaaaaaaaaanaaataaaataaaataataaaaantccctctcccccccnctccccttttccctcttctcccntcctcctcccccccccccctttctcgtttgggggtccccttttttctcttttcccccctnaatta

SEQ ID NO: 336551 - DNA, 11052 bp, Homo sapiens
ctgggtgatccaaggatccctaggtcttagggaggaaaatcgttgtgaataaaattaaggtggattttgcaaatcgggaaagtcagctggctttttatcactgcatggagaaatctggtcaagacatcagagacttttatgaaatgttagccgaaagaagagaggaacgaagggcatcctacgactataaccaagatcgtacatattatgagagtgttcgaactccaggcacttatcctgaggattccaggcgggactatccagctcgagggagagagttttattcagaatgggaaacttaccaaggagactactatgaatcacgatactacgatgatcctcgggaatacagggattacaggaatgatccttatgaacaagatattagggaatatagttacaggcaaagggaacgagaaagagaacgtgaaagatttgagtctgaccgggacagagaccatgagaggaggccgattgaacgaagtcaaagtcctgttcacttgcgacgtccacagagtcctggagcgtctccctctcaggcagagaggttgccgagtgattctgagaggaggctttacagccgatcctcagaccggagtggaagctgtagctcactctcccctccaagatatgagaaactggacaagtctcgtttggagcgctatacaaaaaatgaaaagacagataaagaacgaacttttgatccggagagagtggagagagagagacgcttaatacggaaggaaaaagtggaaaaggacaaaactgacaagcagaaacgcaaaggaaaggttcactcccctagttctcagtcttcagaaacggaccaagaaaatgagcgagagcaaagccctgaaaagcccaggagttgtaataaactgagcagagagaaagctgacaaagagggaatagcgaaaaaccgcctggaactcatgccttgcgtggttttgactcgagtgaaagagaaagagggaaaggtcattgaccacactcctgtggaaaagttgaaagccaagcttgataatgacactgtcaaatcttctgccctggaccagaaacttcaggtctctcagacggagcctgcaaaatctgacttgtctaaactggaatcagttagaatgaaagtaccaaaggaaaaggggctttcaagccatgttgaagtggtggagaaggaaggcaggcttaaagccaggaagcacctcaagcctgagcagcctgcagatggggtaagtgctgtggatctggagaagctggaagccaggaaaaggcgctttgcagattccaatttaaaagcagaaaagcaaaaaccagaggtcaagaaaagcagtccagagatggaggatgctcgcgtgctttcaaaaaagcagcctgacgtgtcctctagagaggtcattctgctgagggaaggagaggctgaaagaaagcctgtgaggaaagaaattcttaaaagagaatctaaaaaaatcaaactggacagacttaatactgttgccagccccaaagactgtcaggagcttgccagtatttctgttgggtctggctcaaggcccagctcagacctacaagcaagactgggagaaccagcaggtgaatctgtggaaaatcaagaagtccaatcaaaaaagcccattccctcaaaaccacagctcaaacagctgcaggtattagatgatcaaggaccagagagagaagacgttaggaaaaactattgcagtcttcgtgatgaaacacctgaacgtaaatcaggccaagagaaatcacattcagtaaatactgaagaaaaaattggcattgacatcgatcacacgcagagttaccgaaaacaaatggaacagagtcgtaggaaacagcagatggaaatggaaatagccaagtctgagaagtttggcagtcctaaaaaagatgtagatgaatatgaaagacgtagcctcgttcacgaggtaggcaaaccccctcaagatgtcactgatgactctcctcctagcaaaaagaaaaggatggatcatgtcgattttgatatctgcaccaagcgagaacggaattacagaagttcacgccaaatcagcgaagattctgaaaggactggtggttctcccagtgtccgacatggttccttccatgaagatgaggatcccataggctcccctaggctactgtcagtaaaagggtctcctaaagtagatgaaaaagtcctcccctattctaacataacagtcagggaagagtctttaaaatttaatccttatgattctagcaggagagaacagatggcagatatggccaaaataaaactatctgtcttgaattctgaagatgaactaaatcgttgggactctcagatgaaacaggatgctggcagatttgatgtgagtttcccaaacagcataattaagagagatagccttcgaaaaaggtctgtacgagatctggaacctggtgaggtgccttctgattctgacgaagatggtgaacacaaatcccactcacccagagcctctgcattatatgaaagttctcgattgtcttttttattgagggacagagaagacaagctacgtgagcgagatgaaagactctctagttctttagaaaggaacaaattttactcttttgcattggataagacaatcacaccagacactaaagctttgcttgaaagagctaaatccctctcttcatctcgtgaagaaaattggtcttttcttgattgggactcccgatttgcaaattttcgaaacaacaaagataaagaaaaggttgactctgctccaagacctattccatcctggtacatgaaaaagaagaaaattaggactgattcagaagggaaaatggatgataagaaagaggaccataaagaagaagagcaagagaggcaggaattgtttgcttctcgttttttacacagctcaatctttgaacaagattccaagcgattgcagcatctagagagaaaagaggaagattctgacttcatttctggtaggatctatgggaagcagacatctgagggagcaaacagcacaactgattccattcaagaaccagtagttctgttccatagcagatttatggagctcacacggatgcaacagaaagaaaaagaaaaagaccagaaacccaaagaggttgagaaacaggaagatacagagaatcatcccaagaccccagaatctgctcctgagaataaagattcagaactgaaaactccaccttccgttgggcctccaagtgtcacagtcgtaactctagaatcagccccatcagcactagagaagaccactggtgacaaaacggtagaggcgcctttggtaacagaagagaagactgtggagccagctaccgtctcagaagaagcaaagcctgcatctgaacctgctcctgcccctgtggaacagctggaacaagtagacctgcccccaggagcagaccccgataaagaagctgccatgatgcctgcgggtgttgaggaaggttcatcaggtgaccagccgccttatctggatgccaagcctccaactcccggggcctcgttttcccaggcagagagcaacgtagatccagagcctgacagtacccagccactttcaaaaccagctcagaagtctgaggaagccaatgagccaaaggccgaaaagccagacgccactgcagatgctgagcctgatgcaaaccagaaagccgaagctgctcctgagtctcagcccccagcttctgaagatttagaggttgatcctccagttgctgcaaaggataaaaagccaaacaaaagcaagcgttcaaagacccctgttcaggcagctgcagtgagtatcgtggagaagcccgtcacaaggaagagtgagaggatagaccgggaaaaactcaagcggtccaattctcctcggggagaagcacagaagcttttggaattgaagatggaggcagagaagattacaaggactgcttctaaaaactctgctgcagaccttgaacatcccgaaccaagtttgcctctcagccgaacaaggcgccggaatgtaaggagcgtctatgcaaccatgggtgaccatgaaaaccgctctcctgtcaaagagcccgttgagcaaccaagagtgaccagaaagagattggagcgagagcttcaggaggctgcagcggttcccaccacccctcggaggggaaggcctccaaagacacgccggcgagccgatgaagaggaggagaacgaggccaaggaacctgcagaaacactcaagccacctgagggatggcggtcgccaaggtcccagaaaactgcagctggtggtggaccccaagggaaaaagggaaaaaatgaaccgaaggtggatgctacacgtcctgaggccaccactgaggtgggcccccaaataggcgtgaaagagagctccatggaacccaaggctgctgaggaggaggcagggagtgaacagaaacgtgacagaaaagatgctggcacagacaaaaacccccctgaaaccgcccctgttgaagttgtagagaaaaaaccggcccctgaaaaaaactccaaatcaaagagaggaagatctcgaaactccaggttagcagtggacaaatctgcaagtctgaaaaatgtggatgctgctgtcagtcccaggggggctgcagcacaggcaggggagagggaatctggggtggtggcagtctcccctgagaaaagtgagagtccccaaaaggaggatggtttatcatcccagttgaaaagtgatccagttgatccagacaaggaaccagagaaagaagacgtgtctgcctctgggccgtccccagaagccacccagttagccaagcagatggagctggagcaggccgtggaacacatcgcaaagctcgctgaggcctctgcctctgctgcctataaggcagatgcaccagagggccttgccccagaggacagggacaagcctgcacaccaagcaagtgaaacagagctggctgcggccatcggctccatcatcaatgacatttctggggagccagaaaacttcccagcacctccaccttatcctggagaatcccagacagatctgcaaccccccgcaggtgcacaggcgctgcagccttctgaggaaggaatggagacagatgaggctgtatctggcatcctggaaactgaggctgctacagaatcttctaggcctccagtcaatgctcctgacccctcagccggcccaacagataccaaggaagccagaggaaatagcagtgaaacctcacactcagtgccagaagccaaagggtctaaagaagtggaagtcactcttgttcggaaagacaaagggcgccagaaaacaacccgatcacgccgcaagcgaaacacaaacaagaaagtggtggctcctgtagagagccatgtccctgaatccgaccaagctcaaggtgagagtcctgctgcaaatgaggggacaacagtacagcaccccgaagccccacaggaagaaaagcagagtgagaaaccccattccactcctcctcagtcatgtacttctgacctaagcaagattccctccacagagaattcgtcccaagaaatcagtgttgaggaaaggactccaaccaaagcatctgtgcccccagaccttcccccacctccccagccagcaccggtggatgaggagcctcaagccaggttcagggtgcattccatcattgaaagtgacccggtgaccccacccagcgatccaagcatccccatacccacactgccttctgtaactgcagcaaagctctcacctcctgtcgcctctggggggatcccacaccagagcccccctactaaggtgacagagtggatcacaaggcaggaggagccacgggctcagtctactccatctccagctcttcccccagacacaaaggcctctgatgttgacaccagctccagcaccctgaggaagattctcatggaccccaagtatgtgtctgccacaagtgtcacttccacaagtgtcaccacagccattgcagagcctgtcagtgctgccccttgcctacatgaggccccgcccccgccagttgactctaaaaagcctttagaagaaaaaacagcacctccagtgacaaacaactctgagatacaagcctcggaggtgctggtagctgctgacaaggaaaaggtggctccagtcattgctcccaaaattacctctgttattagccggatgcctgtcagcattgacctggaaaattcacagaagataaccttggcaaaaccagctcctcaaaccctcactggtctggtgagcgcactcactggcctggtgaacgtctccctggtcccggtgaatgccctgaaaggccccgtgaagggctcagtgaccacactgaaaagtttggtgagcacccctgctgggcccgtgaacgtcctgaaagggcctgtgaatgttcttacggggccagtgaatgttctcaccactccagtgaacgccacggtgggcacagtgaatgccgccccaggcacagtcaatgccgctgcgagtgcagtgaatgccacagcaagtgcagtgaccgtcacagcgggtgcggttactgctgcatctggtggtgtaacggccacaacaggcacggtgacaatggcaggggcagtgattgcgccgtcaacaaagtgcaaacagagagcgagtgctaatgaaaacagtcggttccacccagggtccatgcctgtgatcgacgatcgtccggcagacgcgggctcaggggcggggctgcgtgtgaacacttctgaaggggttgtgctcctgagttactcagggcagaagaccgaaggcccacagcggatcagcgccaagatcagccagatccccccggccagtgcaatggacattgaatttcagcagtcagtgtccaagtcccaggtcaaacctgattctgtcacagcatcgcagcctccatccaaaggccctcaagctcctgcaggctatgcgaacgtggccacccattccacgttggtactgaccgcccagacatataatgcctctcctgtgatttcgtctgtgaaggccgataggccatccttggagaagcccgagcccattcacctctcggtgtccacgcctgtcacccagggaggcacagtgaaggttctcacccaggggatcaacacaccccctgtgctggttcacaaccagctggtcctcaccccaagcattgtcaccacaaacaagaagcttgctgaccccgtcacccttaaaatcgagaccaaggtccttcagccggccaacctggggtccacgctcacgccccaccaccctcctgctctgcccagcaaactgcctacagaagtcaaccatgtcccctcggggcccagcatcccagcagatcgaactgtctcccatttggcagctgcaaagctagatgctcattctcctcgaccaagtggacccgggccatcctcattcccaagggcaagccaccccagcagtactgcatctacggcgctctccaccaacgccacagtcatgctggctgcaggcatcccagtgccccagttcatctccagcatccacccagagcagtctgtcatcatgccaccccacagcatcacccagactgtgtccctgagccacctctcccagggcgaggtgagaatgaacactcccacgctgcccagtatcacctacagcatccggccagaagcgcttcactctcctcgggctccgctgcagccccagcaaatagaggtcagggccccacagcgtgccagcaccccgcagccagccccagctggtgtgcctgcactggcctcccagcaccctcccgaggaggaagtgcattatcaccttcctgtcgctcgagccacagcccctgtgcagtcagaggtactagtcatgcagtctgagtaccgactgcacccctatactgtgccacgggatgtgaggatcatggtgcatccacatgtgacggcagtcagcgagcagcccagggccgcggatggggtggtgaaggtgccaccagccagcaaggcccctcagcagccagggaaggaagctgccaagacaccagatgccaaagctgcccccacccccacccctgcccccgtccctgtccctgtcccccttcctgcccctgctcctgcccctcatggtgaggcccgtatcctcacagttacccccagtaaccaactccaggggctgcctctgacccctcctgtggtggtgacccatggggtgcagattgtgcactccagcggggagctgtttcaagagtaccggtacggcgacatccgcacctaccaccccccggcccagctcacacacactcagtttcccgccgcttcctctgttggcctgccttcccggaccaagacagctgctcagggccctcctcctgaaggtgagcccctgcagcctcctcagcctgtgcagtccacacagcctgcccagcctgcaccaccctgcccgccctcccagctcggtcagcccggccagccaccaagcagcaagatgcctcaagtgtcccaggaggcaaaggggacccagacgggagtagagcagcctcgcctcccagctggacctgcaaacaggccacctgagcctcacacccaggttcagagggcacaagcagaaacaggcccgacttccttcccctcccctgtgtctgtctccatgaagcctgaccttccagtctctcttcccactcagactgccccaaaacagccgttgtttgtcccaacaacctctggccccagcaccccaccaggactggttctgccacacactgaattccagccagcccccaaacaagattcctctccacacctgacttcccagagacccgtggatatggttcaacttctgaagaagtaccccatcgtgtggcagggcctgctggccctcaagaatgacacagctgctgtgcagctccacttcgtctctggcaacaacgtcctggcccatcggtccctgcccctttctgaaggagggcccccactaaggatcgcccagaggatgcggctggaggcaacgcagctggaaggggttgcccgaaggatgacggtggagacagattactgtctgctgctggctctgccctgtggccgtgaccaagaggatgttgtgagccagaccgagtccctcaaggctgccttcatcacttacctgcaggccaagcaggcggcagggatcatcaacgttcccaaccctggctccaatcagcctgcctacgtgctgcagatcttcccgccctgtgagttctctgagagtcacctgtcccgcctggcccctgacctccttgccagcatctccaacatctctccccacctcatgattgtcattgcctccgtgtgagccactgagtggttatcacctcagtgaatcttcccagggctctgcagtaaaaacaaaggacaacccagccaagcagaggaagaagctgccgaaggggacagactccactgccagacggccagccgtttgctgtcctgccgcccggctcagtcggccagacttcctctaggagtggtgctgctaccttgtatgtttacataatgctttagcccaaggacacatcaccaacccatggactcgcagacaccggggctgggtttctctttcctctttttggagaaaaggaacagggcagtggaatgaaaattttttgtttgtttgtttttaagaaacaagaaaacagaactgcctttgcactaaattagtgacttggacttttgcccagtgaagacaggctgtgacactctggatgtcttggtgtgtgtagacacacattgcagactcttaacgcaggaaggacttcaaacttctgctgagaccttggggtcaaggaacatttcattggttttttttgtccacccccatctcccttgctcatttggatgcgtcaccttaattctcctgctgccaccgtctttgattcaccgggatgtacagtttacagttgaagagcaaacagaaaggttttctcttggtgggatatgcagaacttgggatgtgtgtatatataaatatataatatatataaatatatataatactgacttaaaaaatcaaatcccccgacatacgttttttttaatctgtgccaaaaatgtgttttcagaggaaatcttattttcatattcagactttgtattgcccactcatttgtataagtgcgcttcggtacagcacgggtcctgctcccgcgatgtggaagtgtcacacggcacctgtacaaaaagactggctaacccctcttcctattaccttgatctcttcccccaacttcctaacacttattaatttatgaaactgtttttctcagcgcagttttgttttgtgtgtccattggattacaaactttattaaaaaatataaaacacaccaagtgtgagtgtgattgtcacttgggtgggaggacgaaccatgggtccttggcttatgggaacagtcagccctcatcccgcttttgatccccatgccaagtctgtacatgggaactgtttcccttctgcctcctagtcagtcagtcctcctccccaaggataattttatcttgtacaaaggagatttttgtcacggacactgaacttaaccatttctcactcttgtggtgtcttcagagtcctaactggttcttaggtaatgtggaaggaaggcacttccaattttgatacagaatataaccacaccccatgccatctcagaaacattttagcaagctttggtttcttgtctctctcttgccccctcttcccttctcccagtgtgaagcaggctgactcctgcagaggcagtggcctcctggggccctgggggctcatttgatcccgtctctgcctccagacaggagaatgggagttggggacaggcttcccctgcagctggattctctagaagctgtggagttgggacagggacatggggactataaagttggtggtctcacttggaataccaatgggctcctacaaatgggcctgtcctggtgtgagaagatagcatccccctctgaacggtgggccatagatgccggggccactgtggggggacgagatggtacctcctgactccttgctgacaggagtgagaaagctgttcc

SEQ ID NO: 336552 - DNA, 12782 bp, Homo sapiens
tgagctgcgaggcccgagagtcagaacctgggggagagggatggtctctgcacgggggggagccggaggagccgccgccgctgccgacgccaccgccgcagccgccgccgccgccgccccggcacccgcctcccggcgctgacggtctcgtacgaagccggcgagggggagccagcagcggcggtcgccggcacgccgcccagcatggtccgggaaaccaggcatctctgggtgggcaacttacccgagaacgtgcgggaagagaagatcatcgagcatttcaaacgatatggccgcgtggaaagtgtcaaaattcttcccaagaggggatctgaaggaggagtggctgcctttgtggattttgtggacatcaaaagtgcacagaaagctcacaactcggtcaacaaaatgggtgacagagacctacgcacggattataatgaaccaggcaccatcccgagtgctgctcggggattggatgatacagtttccatagcatctcgtagtagagaggtttctgggttcagaggaggtggtggagggcctgcttatggtcccccaccgtcacttcatgcacgagaaggacgttatgagcggagacttgatggggcttcagataacagggagcgtgcttatgaacatagtgcctatggacaccatgaacgggggacgggaggatttgatcggacaagacattacgatcaggattactatagagatcctcgagagcggactttacaacatgggctctattacgcttctcggagtcgaagtccaaatcgctttgatgctcatgacccccgatatgaacctagggctcgcgagcagtttacactgcccagtgtggtacacagggatatctacagggatgatattacccgggaggtacgaggcagaaggccagagcggaattaccagcacagcaggagtcggtcaccacattcatcccagtctagaaatcagtctcctcagagactggctagccaagcatctagacccacaaggtcccctagcggcagcggctctagaagtagatcctccagtagtgattcaatcagcagcagcagtagtaccagcagtgacagcagtgattccagcagtagttcaagtgatgattctccagctcgatcagttcagtctgcagcagtccctgcacccacttcccagttgctttcatctctggaaaaagatgagccccgtaaaagttttggcatcaaggtccagaatcttccagtacgctctacagatacaagccttaaagatggccttttccatgaatttaagaaatttggaaaagtaacttcagtgcagatacatggaacttcagaagagaggtatggtctggtattctttcggcagcaagaggaccaagaaaaagccttgactgcatcaaaaggaaaacttttctttggcatgcagattgaagtaacagcatggataggtccagaaacagaaagtgaaaatgaatttcgccccttggatgaaaggatagatgaatttcaccccaaagcaacaagaactctctttattggcaaccttgaaaaaaccactacttaccatgaccttcgcaacatcttccagcgctttggagaaattgtggatattgacattaagaaagtaaatggagttcctcagtatgcgtttctgcaatactgtgatattgctagcgtttgtaaagctattaagaagatggatggggaatatcttggaaataatcgcctcaagctgggttttggaaagagcatgcctacaaactgcgtgtggctagatgggctttcttcgaatgtgtcagatcagtatttaacacgacatttctgccgatatgggcctgtggtaaaggtggtgtttgaccgcttaaaaggcatggccctggttctctacaatgaaattgaatatgcacaagcagctgtaaaagagaccaaagggaggaaaatcggtgggaataaaattaaggtggattttgcaaatcgggaaagtcagctggctttttatcactgcatggagaaatctggtcaagacatcagagacttttatgaaatgttagccgaaagaagagaggaacgaagggcatcctacgactataaccaagatcgtacatattatgagagtgttcgaactccaggcacttatcctgaggattccaggcgggactatccagctcgagggagagagttttattcagaatgggaaacttaccaaggagactactatgaatcacgatactacgatgatcctcgggaatacagggattacaggaatgatccttatgaacaagatattagggaatatagttacaggcaaagggaacgagaaagagaacgtgaaagatttgagtctgaccgggacagagaccatgagaggaggccgattgaacgaagtcaaagtcctgttcacttgcgacgtccacagagtcctggagcgtctccctctcaggcagagaggttgccgagtgattctgagaggaggctttacagccgatcctcagaccggagtggaagctgtagctcactctcccctccaagatatgagaaactggacaagtctcgtttggagcgctatacaaaaaatgaaaagacagataaagaacgaacttttgatccggagagagtggagagagagagacgcttaatacggaaggaaaaagtggaaaaggacaaaactgacaagcagaaacgcaaaggaaaggttcactcccctagttctcagtcttcagaaacggaccaagaaaatgagcgagagcaaagccctgaaaagcccaggagttgtaataaactgagcagagagaaagctgacaaagagggaatagcgaaaaaccgcctggaactcatgccttgcgtggttttgactcgagtgaaagagaaagagggaaaggtcattgaccacactcctgtggaaaagttgaaagccaagcttgataatgacactgtcaaatcttctgccctggaccagaaacttcaggtctctcagacggagcctgcaaaatctgacttgtctaaactggaatcagttagaatgaaagtaccaaaggaaaaggggctttcaagccatgttgaagtggtggagaaggaaggcaggcttaaagccaggaagcacctcaagcctgagcagcctgcagatggggtaagtgctgtggatctggagaagctggaagccaggaaaaggcgctttgcagattccaatttaaaagcagaaaagcaaaaaccagaggtcaagaaaagcagtccagagatggaggatgctcgcgtgctttcaaaaaagcagcctgacgtgtcctctagagaggtcattctgctgagggaaggagaggctgaaagaaagcctgtgaggaaagaaattcttaaaagagaatctaaaaaaatcaaactggacagacttaatactgttgccagccccaaagactgtcaggagcttgccagtatttctgttgggtctggctcaaggcccagctcagacctacaagcaagactgggagaaccagcaggtgaatctgtggaaaatcaagaagtccaatcaaaaaagcccattccctcaaaaccacagctcaaacagctgcaggtattagatgatcaaggaccagagagagaagacgttaggaaaaactattgcagtcttcgtgatgaaacacctgaacgtaaatcaggccaagagaaatcacattcagtaaatactgaagaaaaaattggcattgacatcgatcacacgcagagttaccgaaaacaaatggaacagagtcgtaggaaacagcagatggaaatggaaatagccaagtctgagaagtttggcagtcctaaaaaagatgtagatgaatatgaaagacgtagcctcgttcacgaggtaggcaaaccccctcaagatgtcactgatgactctcctcctagcaaaaagaaaaggatggatcatgtcgattttgatatctgcaccaagcgagaacggaattacagaagttcacgccaaatcagcgaagattctgaaaggactggtggttctcccagtgtccgacatggttccttccatgaagatgaggatcccataggctcccctaggctactgtcagtaaaagggtctcctaaagtagatgaaaaagtcctcccctattctaacataacagtcagggaagagtctttaaaatttaatccttatgattctagcaggagagaacagatggcagatatggccaaaataaaactatctgtcttgaattctgaagatgaactaaatcgttgggactctcagatgaaacaggatgctggcagatttgatgtgagtttcccaaacagcataattaagagagatagccttcgaaaaaggtctgtacgagatctggaacctggtgaggtgccttctgattctgacgaagatggtgaacacaaatcccactcacccagagcctctgcattatatgaaagttctcgattgtcttttttattgagggacagagaagacaagctacgtgagcgagatgaaagactctctagttctttagaaaggaacaaattttactcttttgcattggataagacaatcacaccagacactaaagctttgcttgaaagagctaaatccctctcttcatctcgtgaagaaaattggtcttttcttgattgggactcccgatttgcaaattttcgaaacaacaaagataaagaaaaggttgactctgctccaagacctattccatcctggtacatgaaaaagaagaaaattaggactgattcagaagggaaaatggatgataagaaagaggaccataaagaagaagagcaagagaggcaggaattgtttgcttctcgttttttacacagctcaatctttgaacaagattccaagcgattgcagcatctagagagaaaagaggaagattctgacttcatttctggtaggatctatgggaagcagacatctgagggagcaaacagcacaactgattccattcaagaaccagtagttctgttccatagcagatttatggagctcacacggatgcaacagaaagaaaaagaaaaagaccagaaacccaaagaggttgagaaacaggaagatacagagaatcatcccaagaccccagaatctgctcctgagaataaagattcagaactgaaaactccaccttccgttgggcctccaagtgtcacagtcgtaactctagaatcagccccatcagcactagagaagaccactggtgacaaaacggtagaggcgcctttggtaacagaagagaagactgtggagccagctaccgtctcagaagaagcaaagcctgcatctgaacctgctcctgcccctgtggaacagctggaacaagtagacctgcccccaggagcagaccccgataaagaagctgccatgatgcctgcgggtgttgaggaaggttcatcaggtgaccagccgccttatctggatgccaagcctccaactcccggggcctcgttttcccaggcagagagcaacgtagatccagagcctgacagtacccagccactttcaaaaccagctcagaagtctgaggaagccaatgagccaaaggccgaaaagccagacgccactgcagatgctgagcctgatgcaaaccagaaagccgaagctgctcctgagtctcagcccccagcttctgaagatttagaggttgatcctccagttgctgcaaaggataaaaagccaaacaaaagcaagcgttcaaagacccctgttcaggcagctgcagtgagtatcgtggagaagcccgtcacaaggaagagtgagaggatagaccgggaaaaactcaagcggtccaattctcctcggggagaagcacagaagcttttggaattgaagatggaggcagagaagattacaaggactgcttctaaaaactctgctgcagaccttgaacatcccgaaccaagtttgcctctcagccgaacaaggcgccggaatgtaaggagcgtctatgcaaccatgggtgaccatgaaaaccgctctcctgtcaaagagcccgttgagcaaccaagagtgaccagaaagagattggagcgagagcttcaggaggctgcagcggttcccaccacccctcggaggggaaggcctccaaagacacgccggcgagccgatgaagaggaggagaacgaggccaaggaacctgcagaaacactcaagccacctgagggatggcggtcgccaaggtcccagaaaactgcagctggtggtggaccccaagggaaaaagggaaaaaatgaaccgaaggtggatgctacacgtcctgaggccaccactgaggtgggcccccaaataggcgtgaaagagagctccatggaacccaaggctgctgaggaggaggcagggagtgaacagaaacgtgacagaaaagatgctggcacagacaaaaacccccctgaaaccgcccctgttgaagttgtagagaaaaaaccggcccctgaaaaaaactccaaatcaaagagaggaagatctcgaaactccaggttagcagtggacaaatctgcaagtctgaaaaatgtggatgctgctgtcagtcccaggggggctgcagcacaggcaggggagagggaatctggggtggtggcagtctcccctgagaaaagtgagagtccccaaaaggaggatggtttatcatcccagttgaaaagtgatccagttgatccagacaaggaaccagagaaagaagacgtgtctgcctctgggccgtccccagaagccacccagttagccaagcagatggagctggagcaggccgtggaacacatcgcaaagctcgctgaggcctctgcctctgctgcctataaggcagatgcaccagagggccttgccccagaggacagggacaagcctgcacaccaagcaagtgaaacagagctggctgcggccatcggctccatcatcaatgacatttctggggagccagaaaacttcccagcacctccaccttatcctggagaatcccagacagatctgcaaccccccgcaggtgcacaggcgctgcagccttctgaggaaggaatggagacagatgaggctgtatctggcatcctggaaactgaggctgctacagaatcttctaggcctccagtcaatgctcctgacccctcagccggcccaacagataccaaggaagccagaggaaatagcagtgaaacctcacactcagtgccagaagccaaagggtctaaagaagtggaagtcactcttgttcggaaagacaaagggcgccagaaaacaacccgatcacgccgcaagcgaaacacaaacaagaaagtggtggctcctgtagagagccatgtccctgaatccgaccaagctcaaggtgagagtcctgctgcaaatgaggggacaacagtacagcaccccgaagccccacaggaagaaaagcagagtgagaaaccccattccactcctcctcagtcatgtacttctgacctaagcaagattccctccacagagaattcgtcccaagaaatcagtgttgaggaaaggactccaaccaaagcatctgtgcccccagaccttcccccacctccccagccagcaccggtggatgaggagcctcaagccaggttcagggtgcattccatcattgaaagtgacccggtgaccccacccagcgatccaagcatccccatacccacactgccttctgtaactgcagcaaagctctcacctcctgtcgcctctggggggatcccacaccagagcccccctactaaggtgacagagtggatcacaaggcaggaggagccacgggctcagtctactccatctccagctcttcccccagacacaaaggcctctgatgttgacaccagctccagcaccctgaggaagattctcatggaccccaagtatgtgtctgccacaagtgtcacttccacaagtgtcaccacagccattgcagagcctgtcagtgctgccccttgcctacatgaggccccgcccccgccagttgactctaaaaagcctttagaagaaaaaacagcacctccagtgacaaacaactctgagatacaagcctcggaggtgctggtagctgctgacaaggaaaaggtggctccagtcattgctcccaaaattacctctgttattagccggatgcctgtcagcattgacctggaaaattcacagaagataaccttggcaaaaccagctcctcaaaccctcactggtctggtgagcgcactcactggcctggtgaacgtctccctggtcccggtgaatgccctgaaaggccccgtgaagggctcagtgaccacactgaaaagtttggtgagcacccctgctgggcccgtgaacgtcctgaaagggcctgtgaatgttcttacggggccagtgaatgttctcaccactccagtgaacgccacggtgggcacagtgaatgccgccccaggcacagtcaatgccgctgcgagtgcagtgaatgccacagcaagtgcagtgaccgtcacagcgggtgcggttactgctgcatctggtggtgtaacggccacaacaggcacggtgacaatggcaggggcagtgattgcgccgtcaacaaagtgcaaacagagagcgagtgctaatgaaaacagtcggttccacccagggtccatgcctgtgatcgacgatcgtccggcagacgcgggctcaggggcggggctgcgtgtgaacacttctgaaggggttgtgctcctgagttactcagggcagaagaccgaaggcccacagcggatcagcgccaagatcagccagatccccccggccagtgcaatggacattgaatttcagcagtcagtgtccaagtcccaggtcaaacctgattctgtcacagcatcgcagcctccatccaaaggccctcaagctcctgcaggctatgcgaacgtggccacccattccacgttggtactgaccgcccagacatataatgcctctcctgtgatttcgtctgtgaaggccgataggccatccttggagaagcccgagcccattcacctctcggtgtccacgcctgtcacccagggaggcacagtgaaggttctcacccaggggatcaacacaccccctgtgctggttcacaaccagctggtcctcaccccaagcattgtcaccacaaacaagaagcttgctgaccccgtcacccttaaaatcgagaccaaggtccttcagccggccaacctggggtccacgctcacgccccaccaccctcctgctctgcccagcaaactgcctacagaagtcaaccatgtcccctcggggcccagcatcccagcagatcgaactgtctcccatttggcagctgcaaagctagatgctcattctcctcgaccaagtggacccgggccatcctcattcccaagggcaagccaccccagcagtactgcatctacggcgctctccaccaacgccacagtcatgctggctgcaggcatcccagtgccccagttcatctccagcatccacccagagcagtctgtcatcatgccaccccacagcatcacccagactgtgtccctgagccacctctcccagggcgaggtgagaatgaacactcccacgctgcccagtatcacctacagcatccggccagaagcgcttcactctcctcgggctccgctgcagccccagcaaatagaggtcagggccccacagcgtgccagcaccccgcagccagccccagctggtgtgcctgcactggcctcccagcaccctcccgaggaggaagtgcattatcaccttcctgtcgctcgagccacagcccctgtgcagtcagaggtactagtcatgcagtctgagtaccgactgcacccctatactgtgccacgggatgtgaggatcatggtgcatccacatgtgacggcagtcagcgagcagcccagggccgcggatggggtggtgaaggtgccaccagccagcaaggcccctcagcagccagggaaggaagctgccaagacaccagatgccaaagctgcccccacccccacccctgcccccgtccctgtccctgtcccccttcctgcccctgctcctgcccctcatggtgaggcccgtatcctcacagttacccccagtaaccaactccaggggctgcctctgacccctcctgtggtggtgacccatggggtgcagattgtgcactccagcggggagctgtttcaagagtaccggtacggcgacatccgcacctaccaccccccggcccagctcacacacactcagtttcccgccgcttcctctgttggcctgccttcccggaccaagacagctgctcagggccctcctcctgaaggtgagcccctgcagcctcctcagcctgtgcagtccacacagcctgcccagcctgcaccaccctgcccgccctcccagctcggtcagcccggccagccaccaagcagcaagatgcctcaagtgtcccaggaggcaaaggggacccagacgggagtagagcagcctcgcctcccagctggacctgcaaacaggccacctgagcctcacacccaggttcagagggcacaagcagaaacaggcccgacttccttcccctcccctgtgtctgtctccatgaagcctgaccttccagtctctcttcccactcagactgccccaaaacagccgttgtttgtcccaacaacctctggccccagcaccccaccaggactggttctgccacacactgaattccagccagcccccaaacaagattcctctccacacctgacttcccagagacccgtggatatggttcaacttctgaagaagtaccccatcgtgtggcagggcctgctggccctcaagaatgacacagctgctgtgcagctccacttcgtctcgtgaccaagaggatgttgtgagccagaccgagtccctcaaggctgccttcatcacttacctgcaggccaagcaggcggcagggatcatcaacgttcccaaccctggctccaatcagcctgcctacgtgctgcagatcttcccgccctgtgagttctctgagagtcacctgtcccgcctggcccctgacctccttgccagcatctccaacatctctccccacctcatgattgtcattgcctccgtgtgagccactgagtggttatcacctcagtgaatcttcccagggctctgcagtaaaaacaaaggacaacccagccaagcagaggaagaagctgccgaaggggacagactccactgccagacggccagccgtttgctgtcctgccgcccggctcagtcggccagacttcctctaggagtggtgctgctaccttgtatgtttacataatgctttagcccaaggacacatcaccaacccatggactcgcagacaccggggctgggtttctctttcctctttttggagaaaaggaacagggcagtggaatgaaaattttttgtttgtttgtttttaagaaacaagaaaacagaactgcctttgcactaaattagtgacttggacttttgcccagtgaagacaggctgtgacactctggatgtcttggtgtgtgtagacacacattgcagactcttaacgcaggaaggacttcaaacttctgctgagaccttggggtcaaggaacatttcattggttttttttgtccacccccatctcccttgctcatttggatgcgtcaccttaattctcctgctgccaccgtctttgattcaccgggatgtacagtttacagttgaagagcaaacagaaaggttttctcttggtgggatatgcagaacttgggatgtgtgtatatataaatatataatatatataaatatatataatactgacttaaaaaatcaaatcccccgacatacgttttttttaatctgtgccaaaaatgtgttttcagaggaaatcttattttcatattcagactttgtattgcccactcatttgtataagtgcgcttcggtacagcacgggtcctgctcccgcgatgtggaagtgtcacacggcacctgtacaaaaagactggctaacccctcttcctattaccttgatctcttcccccaacttcctaacacttattaatttatgaaactgtttttctcagcgcagttttgttttgtgtgtccattggattacaaactttattaaaaaatataaaacacaccaagtgtgagtgtgattgtcacttgggtgggaggacgaaccatgggtccttggcttatgggaacagtcagccctcatcccgcttttgatccccatgccaagtctgtacatgggaactgtttcccttctgcctcctagtcagtcagtcctcctccccaaggataattttatcttgtacaaaggagatttttgtcacggacactgaacttaaccatttctcactcttgtggtgtcttcagagtcctaactggttcttaggtaatgtggaaggaaggcacttccaattttgatacagaatataaccacaccccatgccatctcagaaacattttagcaagctttggtttcttgtctctctcttgccccctcttcccttctcccagtgtgaagcaggctgactcctgcagaggcagtggcctcctggggccctgggggctcatttgatcccgtctctgcctccagacaggagaatgggagttggggacaggcttcccctgcagctggattctctagaagctgtggagttgggacagggacatggggactataaagttggtggtctcacttggaataccaatgggctcctacaaatgggcctgtcctggtgtgagaagatagcatccccctctgaacggtgggccatagatgccggggccactgtggggggacgagatggtacctcctgactccttgctgacaggagtgagaaagctgttcc

SEQ ID NO: 336553 - DNA, 11306 bp, Homo sapiens
tgagctgcgaggcccgagagtcagaacctgggggagagggatggtctctgcacgggggggagccggaggagccgccgccgctgccgacgccaccgccgcagccgccgccgccgccgccccggcacccgcctcccggcgctgacggtctcgtacgaagccggcgagggggagccagcagcggcggtcgccggcacgccgcccagcatggtccgggaaaccaggcatctctgggtgggcaacttacccgagaacgtgcgggaagagaagatcatcgagcatttcaaacgatatggccgcgtggaaagtgtcaaaattcttcccaagaggggatctgaaggaggagtggctgcctttgtggattttgtggacatcaaaagtgcacagaaagctcacaactcggtcaacaaaatgggtgacagagacctacgcacggattataatgaaccaggcaccatcccgagtgctgctcggggattggatgatacagtttccatagcatctcgtagtagagaggtttctgggttcagaggaggtggtggagggcctgcttatggtcccccaccgtcacttcatgcacgagaaggacgttatgagcggagacttgatggggcttcagataacagggagcgtgcttatgaacatagtgcctatggacaccatgaacgggggacgggaggatttgatcggacaagacattacgatcaggattactatagagatcctcgagagcggactttacaacatgggctctattacgcttctcggagtcgaagtccaaatcgctttgatgctcatgacccccgatatgaacctagggctcgcgagcagtttacactgcccagtgtggtacacagggatatctacagggatgatattacccgggaggtacgaggcagaaggccagagcggaattaccagcacagcaggagtcggtcaccacattcatcccagtctagaaatcagtctcctcagagactggctagccaagcatctagacccacaaggtcccctagcggcagcggctctagaagtagatcctccagtagtgattcaatcagcagcagcagtagtaccagcagtgacagcagtgattccagcagtagttcaagtgatgattctccagctcgatcagttcagtctgcagcagtccctgcacccacttcccagttgctttcatctctggaaaaagatgagccccgtaaaagttttggcatcaaggtccagaatcttccagtacgctctacagatacaagccttaaagatggccttttccatgaatttaagaaatttggaaaagtaacttcagtgcagatacatggaacttcagaagagaggtatggtctggtattctttcggcagcaagaggaccaagaaaaagccttgactgcatcaaaaggaaaacttttctttggcatgcagattgaagtaacagcatggataggtccagaaacagaaagtgaaaatgaatttcgccccttggatgaaaggatagatgaatttcaccccaaagcaacaagaactctctttattggcaaccttgaaaaaaccactacttaccatgaccttcgcaacatcttccagcgctttggagaaattgtggatattgacattaagaaagtaaatggagttcctcagtatgcgtttctgcaatactgtgatattgctagcgtttgtaaagctattaagaagatggatggggaatatcttggaaataatcgcctcaagctgggttttggaaagagcatgcctacaaactgcgtgtggctagatgggctttcttcgaatgtgtcagatcagtatttaacacgacatttctgccgatatgggcctgtggtaaaggtggtgtttgaccgcttaaaaggcatggccctggttctctacaatgaaattgaatatgcacaagcagctgtaaaagagaccaaagggaggaaaatcggtgggaataaaattaaggtggattttgcaaatcgggaaagtcagctggctttttatcactgcatggagaaatctggtcaagacatcagagacttttatgaaatgttagccgaaagaagagaggaacgaagggcatcctacgactataaccaagatcgtacatattatgagagtgttcgaactccaggcacttatcctgaggattccaggcgggactatccagctcgagggagagagttttattcagaatgggaaacttaccaaggagactactatgaatcacgatactacgatgatcctcgggaatacagggattacaggaatgatccttatgaacaagatattagggaatatagttacaggcaaagggaacgagaaagagaacgtgaaagatttgagtctgaccgggacagagaccatgagaggaggccgattgaacgaagtcaaagtcctgttcacttgcgacgtccacagagtcctggagcgtctccctctcaggcagagaggttgccgagtgattctgagaggaggctttacagccgatcctcagaccggagtggaagctgtagctcactctcccctccaagatatgagaaactggacaagtctcgtttggagcgctatacaaaaaatgaaaagacagataaagaacgaacttttgatccggagagagtggagagagagagacgcttaatacggaaggaaaaagtggaaaaggacaaaactgacaagcagaaacgcaaaggaaaggttcactcccctagttctcagtcttcagaaacggaccaagaaaatgagcgagagcaaagccctgaaaagcccaggagttgtaataaactgagcagagagaaagctgacaaagagggaatagcgaaaaaccgcctggaactcatgccttgcgtggttttgactcgagtgaaagagaaagagggaaaggtcattgaccacactcctgtggaaaagttgaaagccaagcttgataatgacactgtcaaatcttctgccctggaccagaaacttcaggtctctcagacggagcctgcaaaatctgacttgtctaaactggaatcagttagaatgaaagtaccaaaggaaaaggggctttcaagccatgttgaagtggtggagaaggaaggcaggcttaaagccaggaagcacctcaagcctgagcagcctgcagatggggtaagtgctgtggatctggagaagctggaagccaggaaaaggcgctttgcagattccaatttaaaagcagaaaagcaaaaaccagaggtcaagaaaagcagtccagagatggaggatgctcgcgtgctttcaaaaaagcagcctgacgtgtcctctagagaggtcattctgctgagggaaggagaggctgaaagaaagcctgtgaggaaagaaattcttaaaagagaatctaaaaaaatcaaactggacagacttaatactgttgccagccccaaagactgtcaggagcttgccagtatttctgttgggtctggctcaaggcccagctcagacctacaagcaagactgggagaaccagcaggtgaatctgtggaaaatcaagaagtccaatcaaaaaagcccattccctcaaaaccacagctcaaacagctgcaggtattagatgatcaaggaccagagagagaagacgttaggaaaaactattgcagtcttcgtgatgaaacacctgaacgtaaatcaggccaagagaaatcacattcagtaaatactgaagaaaaaattggcattgacatcgatcacacgcagagttaccgaaaacaaatggaacagagtcgtaggaaacagcagatggaaatggaaatagccaagtctgagaagtttggcagtcctaaaaaagatgtagatgaatatgaaagacgtagcctcgttcacgaggtaggcaaaccccctcaagatgtcactgatgactctcctcctagcaaaaagaaaaggatggatcatgtcgattttgatatctgcaccaagcgagaacggaattacagaagttcacgccaaatcagcgaagattctgaaaggactggtggttctcccagtgtccgacatggttccttccatgaagatgaggatcccataggctcccctaggctactgtcagtaaaagggtctcctaaagtagatgaaaaagtcctcccctattctaacataacagtcagggaagagtctttaaaatttaatccttatgattctagcaggagagaacagatggcagatatggccaaaataaaactatctgtcttgaattctgaagatgaactaaatcgttgggactctcagatgaaacaggatgctggcagatttgatgtgagtttcccaaacagcataattaagagagatagccttcgaaaaaggtctgtacgagatctggaacctggtgaggtgccttctgattctgacgaagatggtgaacacaaatcccactcacccagagcctctgcattatatgaaagttctcgattgtcttttttattgagggacagagaagacaagctacgtgagcgagatgaaagactctctagttctttagaaaggaacaaattttactcttttgcattggataagacaatcacaccagacactaaagctttgcttgaaagagctaaatccctctcttcatctcgtgaagaaaattggtcttttcttgattgggactcccgatttgcaaattttcgaaacaacaaagataaagaaaaggttgactctgctccaagacctattccatcctggtacatgaaaaagaagaaaattaggactgattcagaagggaaaatggatgataagaaagaggaccataaagaagaagagcaagagaggcaggaattgtttgcttctcgttttttacacagctcaatctttgaacaagattccaagcgattgcagcatctagagagaaaagaggaagattctgacttcatttctggtaggatctatgggaagcagacatctgagggagcaaacagcacaactgattccattcaagaaccagtagttctgttccatagcagatttatggagctcacacggatgcaacagaaagaaaaagaaaaagaccagaaacccaaagaggttgagaaacaggaagatacagagaatcatcccaagaccccagaatctgctcctgagaataaagattcagaactgaaaactccaccttccgttgggcctccaagtgtcacagtcgtaactctagaatcagccccatcagcactagagaagaccactggtgacaaaacggtagaggcgcctttggtaacagaagagaagactgtggagccagctaccgtctcagaagaagcaaagcctgcatctgaacctgctcctgcccctgtggaacagctggaacaagtagacctgcccccaggagcagaccccgataaagaagctgccatgatgcctgcgggtgttgaggaaggttcatcaggtgaccagccgccttatctggatgccaagcctccaactcccggggcctcgttttcccaggcagagagcaacgtagatccagagcctgacagtacccagccactttcaaaaccagctcagaagtctgaggaagccaatgagccaaaggccgaaaagccagacgccactgcagatgctgagcctgatgcaaaccagaaagccgaagctgctcctgagtctcagcccccagcttctgaagatttagaggttgatcctccagttgctgcaaaggataaaaagccaaacaaaagcaagcgttcaaagacccctgttcaggcagctgcagtgagtatcgtggagaagcccgtcacaaggaagagtgagaggatagaccgggaaaaactcaagcggtccaattctcctcggggagaagcacagaagcttttggaattgaagatggaggcagagaagattacaaggactgcttctaaaaactctgctgcagaccttgaacatcccgaaccaagtttgcctctcagccgaacaaggcgccggaatgtaaggagcgtctatgcaaccatgggtgaccatgaaaaccgctctcctgtcaaagagcccgttgagcaaccaagagtgaccagaaagagattggagcgagagcttcaggaggctgcagcggttcccaccacccctcggaggggaaggcctccaaagacacgccggcgagccgatgaagaggaggagaacgaggccaaggaacctgcagaaacactcaagccacctgagggatggcggtcgccaaggtcccagaaaactgcagctggtggtggaccccaagggaaaaagggaaaaaatgaaccgaaggtggatgctacacgtcctgaggccaccactgaggtgggcccccaaataggcgtgaaagagagctccatggaacccaaggctgctgaggaggaggcagggagtgaacagaaacgtgacagaaaagatgctggcacagacaaaaacccccctgaaaccgcccctgttgaagttgtagagaaaaaaccggcccctgaaaaaaactccaaatcaaagagaggaagatctcgaaactccaggttagcagtggacaaatctgcaagtctgaaaaatgtggatgctgctgtcagtcccaggggggctgcagcacaggcaggggagagggaatctggggtggtggcagtctcccctgagaaaagtgagagtccccaaaaggaggatggtttatcatcccagttgaaaagtgatccagttgatccagacaaggaaccagagaaagaagacgtgtctgcctctgggccgtccccagaagccacccagttagccaagcagatggagctggagcaggccgtggaacacatcgcaaagctcgctgaggcctctgcctctgctgcctataaggcagatgcaccagagggccttgccccagaggacagggacaagcctgcacaccaagcaagtgaaacagagctggctgcggccatcggctccatcatcaatgacatttctggggagccagaaaacttcccagcacctccaccttatcctggagaatcccagacagatctgcaaccccccgcaggtgcacaggcgctgcagccttctgaggaaggaatggagacagatgaggctgtatctggcatcctggaaactgaggctgctacagaatcttctaggcctccagtcaatgctcctgacccctcagccggcccaacagataccaaggaagccagaggaaatagcagtgaaacctcacactcagtgccagaagccaaagggtctaaagaagtggaagtcactcttgttcggaaagacaaagggcgccagaaaacaacccgatcacgccgcaagcgaaacacaaacaagaaagtggtggctcctgtagagagccatgtccctgaatccgaccaagctcaaggtgagagtcctgctgcaaatgaggggacaacagtacagcaccccgaagccccacaggaagaaaagcagagtgagaaaccccattccactcctcctcagtcatgtacttctgacctaagcaagattccctccacagagaattcgtcccaagaaatcagtgttgaggaaaggactccaaccaaagcatctgtgcccccagaccttcccccacctccccagccagcaccggtggatgaggagcctcaagccaggttcagggtgcattccatcattgaaagtgacccggtgaccccacccagcgatccaagcatccccatacccacactgccttctgtaactgcagcaaagctctcacctcctgtcgcctctggggggatcccacaccagagcccccctactaaggtgacagagtggatcacaaggcaggaggagccacgggctcagtctactccatctccagctcttcccccagacacaaaggcctctgatgttgacaccagctccagcaccctgaggaagattctcatggaccccaagtatgtgtctgccacaagtgtcacttccacaagtgtcaccacagccattgcagagcctgtcagtgctgccccttgcctacatgaggccccgcccccgccagttgactctaaaaagcctttagaagaaaaaacagcacctccagtgacaaacaactctgagatacaagcctcggaggtgctggtagctgctgacaaggaaaaggtggctccagtcattgctcccaaaattacctctgttattagccggatgcctgtcagcattgacctggaaaattcacagaagataaccttggcaaaaccagctcctcaaaccctcactggtctggtgagcgcactcactggcctggtgaacgtctccctggtcccggtgaatgccctgaaaggccccgtgaagggctcagtgaccacactgaaaagtttggtgagcacccctgctgggcccgtgaacgtcctgaaagggcctgtgaatgttcttacggggccagtgaatgttctcaccactccagtgaacgccacggtgggcacagtgaatgccgccccaggcacagtcaatgccgctgcgagtgcagtgaatgccacagcaagtgcagtgaccgtcacagcgggtgcggttactgctgcatctggtggtgtaacggccacaacaggcacggtgacaatggcaggggcagtgattgcgccgtcaacaaagtgcaaacagagagcgagtgctaatgaaaacagtcggttccacccagggtccatgcctgtgatcgacgatcgtccggcagacgcgggctcaggggcggggctgcgtgtgaacacttctgaaggggttgtgctcctgagttactcagggcagaagaccgaaggcccacagcggatcagcgccaagatcagccagatccccccggccagtgcaatggacattgaatttcagcagtcagtgtccaagtcccaggtcaaacctgattctgtcacagcatcgcagcctccatccaaaggccctcaagctcctgcaggctatgcgaacgtggccacccattccacgttggtactgaccgcccagacatataatgcctctcctgtgatttcgtctgtgaaggccgataggccatccttggagaagcccgagcccattcacctctcggtgtccacgcctgtcacccagggaggcacagtgaaggttctcacccaggggatcaacacaccccctgtgctggttcacaaccagctggtcctcaccccaagcattgtcaccacaaacaagaagcttgctgaccccgtcacccttaaaatcgagaccaaggtccttcagccggccaacctggggtccacgctcacgccccaccaccctcctgctctgcccagcaaactgcctacagaagtcaaccatgtcccctcggggcccagcatcccagcagatcgaactgtctcccatttggcagctgcaaagctagatgctcattctcctcgaccaagtggacccgggccatcctcattcccaagggcaagccaccccagcagtactgcatctacggcgctctccaccaacgccacagtcatgctggctgcaggcatcccagtgccccagttcatctccagcatccacccagagcagtctgtcatcatgccaccccacagcatcacccagactgtgtccctgagccacctctcccagggcgaggtgagaatgaacactcccacgctgcccagtatcacctacagcatccggccagaagcgcttcactctcctcgggctccgctgcagccccagcaaatagaggtcagggccccacagcgtgccagcaccccgcagccagccccagctggtgtgcctgcactggcctcccagcaccctcccgaggaggaagtgcattatcaccttcctgtcgctcgagccacagcccctgtgcagtcagaggtactagtcatgcagtctgagtaccgactgcacccctatactgtgccacgggatgtgaggatcatggtgcatccacatgtgacggcagtcagcgagcagcccagggccgcggatggggtggtgaaggtgccaccagccagcaaggcccctcagcagccagggaaggaagctgccaagacaccagatgccaaagctgcccccacccccacccctgcccccgtccctgtccctgtcccccttcctgcccctgctcctgcccctcatggtgaggcccgtatcctcacagttacccccagtaaccaactccaggggctgcctctgacccctcctgtggtggtgacccatggggtgcagattgtgcactccagcggggagctgtttcaagagtaccggtacggcgacatccgcacctaccaccccccggcccagctcacacacactcagtttcccgccgcttcctctgttggcctgccttcccggaccaagacagctgctcagggccctcctcctgaaggtgagcccctgcagcctcctcagcctgtgcagtccacacagcctgcccagcctgcaccaccctgcccgccctcccagctcggtcagcccggccagccaccaagcagcaagatgcctcaagtgtcccaggaggcaaaggggacccagacgggagtagagcagcctcgcctcccagctggacctgcaaacaggccacctgagcctcacacccaggttcagagggcacaagcagaaacaggcccgacttccttcccctcccctgtgtctgtctccatgaagcctgaccttccagtctctcttcccactcagactgccccaaaacagccgttgtttgtcccaacaacctctggccccagcaccccaccaggactggttctgccacacactgaattccagccagcccccaaacaagattcctctccacacctgacttcccagagacccgtggatatggttcaacttctgaagaagtaccccatcgtgtggcagggcctgctggccctcaagaatgacacagctgctgtgcagctccacttcgtctctggcaacaacgtcctggcccatcggtccctgcccctttctgaaggagggcccccactaaggatcgcccagaggatgcggctggaggcaacgcagctggaaggggttgcccgaaggatgacggtggagacagattactgtctgctgctggctctgccctgtggccgtgaccaagaggatgttgtgagccagaccgagtccctcaaggctgccttcatcacttacctgcaggccaagcaggcggcagggatcatcaacgttcccaaccctggctccaatcagcctgcctacgtgctgcagatcttcccgccctgtgagttctctgagagtcacctgtcccgcctggcccctgacctccttgccagcatctccaacatctctccccacctcatgattgtcattgcctccgtgtgagccactgagtggttatcacctcagtgaatcttcccagggctctgcagtaaaaacaaaggacaacccagcctgggtgacagagagagagtcttgtctcaaaaaaaaaa

SEQ ID NO: 336554 - DNA, 2390 bp, Homo sapiens
caaacaggaagcgagctcatggcccctcgctgagccatgctggacacagccagaggctgtagcttgtgggtctgttaactagggaatcttaggacatttgacatggcataaaacttgggggccaggaagggcagcccctgctcatgcttacctgcagaagtaccccatcgtgtggcagggcctgctggccctcaagaatgacacagctgctgtgcagctccacttcgtctctggcaacaacgtcctggcccatcggtccctgcccctttctgaaggagggcccccactaaggatcgcccagaggatgcggctggaggcaacgcagctggaaggggttgcccgaaggatgacggtggagacagattactgtctgctgctggctctgccctgtggccgtgaccaagaggatgttgtgagccagaccgagtccctcaaggctgccttcatcacttacctgcaggccaagcaggcggcagggatcatcaacgttcccaaccctggctccaatcagcctgcctacgtgctgcagatcttcccgccctgtgagttctctgagagtcacctgtcccgcctggcccctgacctccttgccagcatctccaacatctctccccacctcatgattgtcattgcctccgtgtgagccactgagtggttatcacctcagtgaatcttcccagggctctgcagtaaaaacaaaggacaacccagccaagcagaggaagaagctgccgaaggggacagactccactgccagacggccagccgtttgctgtcctgccgcccggctcagtcggccagacttcctctaggagtggtgctgctaccttgtatgtttacataatgctttagcccaaggacacatcaccaacccatggactcgcagacaccggggctgggtttctctttcctctttttggagaaaaggaacagggcagtggaatgaaaattttttgtttgtttgtttttaagaaacaagaaaacagaactgcctttgcactaaattagtgacttggacttttgcccagtgaagacaggctgtgacactctggatgtcttggtgtgtgtagacacacattgcagactcttaacgcaggaaggacttcaaacttctgctgagaccttggggtcaaggaacatttcattggttttttttgtccacccccatctcccttgctcatttggatgcgtcaccttaattctcctgctgccaccgtctttgattcaccgggatgtacagtttacagttgaagagcaaacagaaaggttttctcttggtgggatatgcagaacttgggatgtgtgtatatataaatatataatatatataaatatatataatactgacttaaaaaatcaaatcccccgacatacgttttttttaatctgtgccaaaaatgtgttttcagaggaaatcttattttcatattcagactttgtattgcccactcatttgtataagtgcgcttcggtacagcacgggtcctgctcccgcgatgtggaagtgtcacacggcacctgtacaaaaagactggctaacccctcttcctattaccttgatctcttcccccaacttcctaacacttattaatttatgaaactgtttttctcagcgcagttttgttttgtgtgtccattggattacaaactttattaaaaaatataaaacacaccaagtgtgagtgtgattgtcacttgggtgggaggacgaaccatgggtccttggcttatgggaacagtcagccctcatcccgcttttgatccccatgccaagtctgtacatgggaactgtttcccttctgcctcctagtcagtcagtcctcctccccaaggataattttatcttgtacaaaggagatttttgtcacggacactgaacttaaccatttctcactcttgtggtgtcttcagagtcctaactggttcttaggtaatgtggaaggaaggcacttccaattttgatacagaatataaccacaccccatgccatctcagaaacattttagcaagctttggtttcttgtctctctcttgccccctcttcccttctcccagtgtgaagcaggctgactcctgcagaggcagtggcctcctggggccctgggggctcatttgatcccgtctctgcctccagacaggagaatgggagttggggacaggcttcccctgcagctggattctctagaagctgtggagttgggacagggacatggggactataaagttggtggtctcacttggaataccaatgggctcctacaaatgggcctgtcctggtgtgagaagatagcatccccctctgaacggtgggccatagatgccggggccactgtggggggacgagatggtacctcctgactccttgctgacaggagtgagaaagctgttcc

SEQ ID NO: 336555 - DNA, 2173 bp, Homo sapiens
ttcattcaaatatcagggtagcctttaaagtcatctcagaggtgggggtttttgtggacctgatactgtgggttggatgtgggctgctgtttgactaggaggcccctgctcactggcagctggcctctgcctcaggtggagacagattactgtctgctgctggctctgccctgtggccgtgaccaagaggatgttgtgagccagaccgagtccctcaaggctgccttcatcacttacctgcaggccaagcaggcggcagggatcatcaacgttcccaaccctggctccaatcagcctgcctacgtgctgcagatcttcccgccctgtgagttctctgagagtcacctgtcccgcctggcccctgacctccttgccagcatctccaacatctctccccacctcatgattgtcattgcctccgtgtgagccactgagtggttatcacctcagtgaatcttcccagggctctgcagtaaaaacaaaggacaacccagccaagcagaggaagaagctgccgaaggggacagactccactgccagacggccagccgtttgctgtcctgccgcccggctcagtcggccagacttcctctaggagtggtgctgctaccttgtatgtttacataatgctttagcccaaggacacatcaccaacccatggactcgcagacaccggggctgggtttctctttcctctttttggagaaaaggaacagggcagtggaatgaaaattttttgtttgtttgtttttaagaaacaagaaaacagaactgcctttgcactaaattagtgacttggacttttgcccagtgaagacaggctgtgacactctggatgtcttggtgtgtgtagacacacattgcagactcttaacgcaggaaggacttcaaacttctgctgagaccttggggtcaaggaacatttcattggttttttttgtccacccccatctcccttgctcatttggatgcgtcaccttaattctcctgctgccaccgtctttgattcaccgggatgtacagtttacagttgaagagcaaacagaaaggttttctcttggtgggatatgcagaacttgggatgtgtgtatatataaatatataatatatataaatatatataatactgacttaaaaaatcaaatcccccgacatacgttttttttaatctgtgccaaaaatgtgttttcagaggaaatcttattttcatattcagactttgtattgcccactcatttgtataagtgcgcttcggtacagcacgggtcctgctcccgcgatgtggaagtgtcacacggcacctgtacaaaaagactggctaacccctcttcctattaccttgatctcttcccccaacttcctaacacttattaatttatgaaactgtttttctcagcgcagttttgttttgtgtgtccattggattacaaactttattaaaaaatataaaacacaccaagtgtgagtgtgattgtcacttgggtgggaggacgaaccatgggtccttggcttatgggaacagtcagccctcatcccgcttttgatccccatgccaagtctgtacatgggaactgtttcccttctgcctcctagtcagtcagtcctcctccccaaggataattttatcttgtacaaaggagatttttgtcacggacactgaacttaaccatttctcactcttgtggtgtcttcagagtcctaactggttcttaggtaatgtggaaggaaggcacttccaattttgatacagaatataaccacaccccatgccatctcagaaacattttagcaagctttggtttcttgtctctctcttgccccctcttcccttctcccagtgtgaagcaggctgactcctgcagaggcagtggcctcctggggccctgggggctcatttgatcccgtctctgcctccagacaggagaatgggagttggggacaggcttcccctgcagctggattctctagaagctgtggagttgggacagggacatggggactataaagttggtggtctcacttggaataccaatgggctcctacaaatgggcctgtcctggtgtgagaagatagcatccccctctgaacggtgggccatagatgccggggccactgtggggggacgagatggtacctcctgactccttgctgacaggagtgagaaagctgttcc

SEQ ID NO: 336556 - DNA, 1592 bp, Homo sapiens
ctgccgcggtaaggggggtggtaggtgcggctgtcgctagcggtactcttgaaacagcgcccccagctggtgtgcctgcactggcctcccagcaccctcccgaggaggaagtgcattatcaccttcctgtcgctcgagccacagcccctgtgcagtcagaggtactagtcatgcagtctgagtaccgactgcacccctatactgtgccacgggatgtgaggatcatggtgcatccacatgtgacggcagtcagcgagcagcccagggccgcggatggggtggtgaaggtgccaccagccagcaaggcccctcagcagccagggaaggaagctgccaagacaccagatgccaaagctgcccccacccccatctcccttgctcatttggatgcgtcaccttaattctcctgctgccaccgtctttgattcaccgggatgtacagtttacagttgaagagcaaacagaaaggttttctcttggtgggatatgcagaacttgggatgtgtgtatatataaatatataatatatataaatatatataatactgacttaaaaaatcaaatcccccgacatacgttttttttaatctgtgccaaaaatgtgttttcagaggaaatcttattttcatattcagactttgtattgcccactcatttgtataagtgcgcttcggtacagcacgggtcctgctcccgcgatgtggaagtgtcacacggcacctgtacaaaaagactggctaacccctcttcctattaccttgatctcttcccccaacttcctaacacttattaatttatgaaactgtttttctcagcgcagttttgttttgtgtgtccattggattacaaactttattaaaaaatataaaacacaccaagtgtgagtgtgattgtcacttgggtgggaggacgaaccatgggtccttggcttatgggaacagtcagccctcatcccgcttttgatccccatgccaagtctgtacatgggaactgtttcccttctgcctcctagtcagtcagtcctcctccccaaggataattttatcttgtacaaaggagatttttgtcacggacactgaacttaaccatttctcactcttgtggtgtcttcagagtcctaactggttcttaggtaatgtggaaggaaggcacttccaattttgatacagaatataaccacaccccatgccatctcagaaacattttagcaagctttggtttcttgtctctctcttgccccctcttcccttctcccagtgtgaagcaggctgactcctgcagaggcagtggcctcctggggccctgggggctcatttgatcccgtctctgcctccagacaggagaatgggagttggggacaggcttcccctgcagctggattctctagaagctgtggagttgggacagggacatggggactataaagttggtggtctcacttggaataccaatgggctcctacaaatgggcctgtcctggtgtgagaagatagcatccccctctgaacggtgggccatagatgccggggccactgtggggggacgagatggtacctcctgactccttgctgacaggagtgagaaagctgttcc

SEQ ID NO: 336557 - DNA, 330 bp, Homo sapiens
tgctccacctgctccataatccactctcatcattgtgtagcaatgtttctaaaacacctgccaaaacatgttacttccagtggcttcccaatgccccttagaatataattcaggtttcttaacttggcctacaatctgccttcctctccagattcaattctcaccatcttcttcccaaatctttaagctcagtgattctcaaagcatggtccctgggccagcagcatcagcatcacctgcaaacttgttagagatgcaaattctcaagccccaccccaaatctaacaaatctcaaactctgggtctaggactcagcaatctctcttttaa

SEQ ID NO: 336558 - DNA, 711 bp, Homo sapiens
gacaaatgtatgccttgaaacgcgcaatgtgtttttattctgtggatgtaccaaatagcccttcttggaaatgatcgggggaattcaaataggcagaaatcctctggtcagcacaaactacaagctagcaattctcaagacagcatgagctgttttttagtgtcagctatggtcagaagcgtgtgttgtggcatttggaaaaggaattagggcagttagctaattgcacgcttgaaaatgagaagctctttgaaaattcaaaagtctgattccagttcaaaaagaaattggtgttgctttgaactccaaagttgttattgtatactgaatttcaagtacttcctactaaacatggaaaatttgctttccccccaaccttatcctgagtgtattgctattcttagcccatgttttgaagtgttcttgatttaaaagatggagagaatgggttatatcagttccattaatttaataaacagccttgctttgcggtgtaagtattttccatctatattctgcagtagtgtttggggtagattgtgagctttctaatcaggggccatgagtcaaggaatagcctattgaccagttagtcttggaggtttcaggaatccttaacactttatgatggatcaactagggtactttccccatattttctttatacagagttaacaaaaatctggagattttttttttcttttttgatac

SEQ ID NO: 336559 - DNA, 175 bp, Homo sapiens
  misc_feature (155)..(155): n is a, c, g, or t
ataagatagaaaatatgaaagacaaattaaaagacatgaaaaacagaatgaaaatcccaaacatatacctaacagttctaggaaaagaaaagtggtctctgaatgaagccatgagaccttattattttttttaaaaaaacagaaagtgcctaagntatttcctctgtgtagctgt

SEQ ID NO: 336560 - DNA, 325 bp, Homo sapiens
aacacactgcttccttcatcaagaaaaatgtcagttgtactaaatagtatagttaccaatgtagttaaataacattctggtacaacctcattttgtcatggaccaataaaacttgcaaacaattggtgtaatagcaagcagctggtctgcatacaaaattaggcagcactttgtacaacagaagttaacagacccatggtagattaaaaatgtttaacagtgttttaaaactgaaaagggactgctaatgtagaatatccaaggaactcttccagatcaacaaggatgagcaaaggatatggataggcaatttatagaacaggaa

SEQ ID NO: 336561 - DNA, 188 bp, Homo sapiens
atgaacaaagtttcttggagacctgaaatttcttcccatttctcttccttctcgtttcttcttatgattaaaatataaatattgaaataacgtgccttccctaatatcagtggattcgttcaacttgatatagctgaaaaaactttctcatttaaaaaagccctttcaggcagttttagcagttaacg

SEQ ID NO: 336562 - DNA, 298 bp, Homo sapiens
ggcttgatttaaaacagtgctgttggagatggagaggagataccaaattctggagacatttctgagttagaatctacagtatttatcagacaagggaaagattagacaaaggagttaagaatgactcccaggtttcagtttggggcaggtaactaggacatgttttgaaaagtaatgtattagatctcttaccattggaactatgtatgtggagccaaattaaaatttgtacatgtatataactctccccccaccaccagtaactacttccctaactctctactttgtagccagactt

SEQ ID NO: 336563 - DNA, 145 bp, Homo sapiens
caccgctcctggccctgagactgggtaatttataaaagaagtttatttgcctcatagttctgcaggctgtacaagcatctgctaggcttctggtgaagcgtcaggaagcttttactcctggcgggaggcaaagagggagcagacg

SEQ ID NO: 336564 - DNA, 279 bp, Homo sapiens
tcccctgatgagagtacccggttgtgggtggcaaccctgggcatgtaccaccatccctaccccgcccctagcacactctgctttaggggtggctctctgggtccttgaagctccctggtgcttgtgccaaagctgacctggatttgaccttatcccagaagtccttcctggcaaccagagcttaccaaggccattgcttgctaagcactatatgaggcctagatgaaaaaggcctttctaggaggggtttgtagtttagttggggagacgagactgtag

SEQ ID NO: 336565 - DNA, 269 bp, Homo sapiens
aatgttattttcaaaatgtatactggatgttgacctgtcactgatttcccgttgcatttggaatccaaactccttaccatgacccaaaagaaagcagcctctctccaacctcatcttatccagtctttccctagatcattagatgccagcccaatagccttctctcagttcctagaacaaggccagttactttgctcttaagaggccttcatgaggctcctccctctttagaaatactcctgttgcttgttatcttccctgaccctcac

SEQ ID NO: 336566 - DNA, 234 bp, Homo sapiens
aacatttcccaatcattctgcaaaatcattagctttctttccctcaacaaaatggtgatgaaataattttgaactcagatttttaagattacagaacatagaacgtaatgcttccaggcagggtagcttgtagcagaattacatcctgccaaaaacaatgagaaagggaagattaaaaagaatgcgtttaggccaggcgcagtggctcacgcctgttatcccaacactttggga

SEQ ID NO: 336567 - DNA, 351 bp, Homo sapiens
ggtgcaattcagaagacttagaaaatacagtaattgaaaatgtattgactttgtaataacgaagaagttattagcattttaaagagagaaaagagttataaagaatacttagcatgtacactgaaagctttaaagtcttttcatttgtttctcctaattgccttatgacagtgaaaacagctgtattcctgttacatgggaggtcaaacatgatcaattctaaagcagactctacattgtggctaactttggtggcacttacagtggtcactgaatccagacttcaaaaaaatacattaatattatatgttagaattttctaaagggaaaagaaatgtatgtaaggatcca

SEQ ID NO: 336568 - DNA, 907 bp, Homo sapiens
gtaagtgtatctgtggaagagtggtgaatgttcaaagtggtttacattgaaacgttactttcctcttaagtttctcttctggggttataaatgactgcagatcctccctactgtcttgctgaagcccctcacgcccctggtttgaattcttctccaatcttataaacctcttacaggttattctaacatttttatatctgggggagcttctgcttgtcccataacaaaccctcatttacagcagtgggactggtagctaagttgaggtttgatacatgtttttacttttacttttctttaggttactttgcatcagcagactgcaaactttttcttaaagagccagataggaaatagtccaatcctgaagtgggccatgtggcaatacgtaagcaaataggcctgctgtgtttcaataaaactttatttaataaaacaggtggtgggctgagctgctttgtataatcttaggtaccttgaatccatagtccaaggatggtagaaagacaagagagagaaggaattgggcccggaagtaaaggcttgttaaataggttcattcttttttttttttctcaacaaattctgagcaactgccttttttcaagaattggtctcagcacaatggttaaactggtgattaaacagatgagtccctgctttatgaaatttacattttctacctagtgtacattgttcactaaccctaacatgagtcagaaataacatgtaataaagaatggcttggttatatgcattttctcaaaaggagatacatagaaaacacttaaaagagcccaacctaaaaatctgttacctaaagtaagacatcccataattttcttcaaatcagtggttctcagccttgattctacattaaaagcacctggtaagatttaaaaaaaaa

SEQ ID NO: 336569 - DNA, 1444 bp, Homo sapiens
taccctaaccgtgcaaaggtagcataatcacttgttccttaattagggacctgtatgaatggctccacgagggttcagctgtctcttacttttaaccagtgaaattgacctgcccgtgaagaggcgggcatgacacagcaagacgagaagaccctatggagctttaatttattaatgcaaacagtacctaacaaacccacaggtcctaaactaccaaacctgcattaaaaatttcggttggggcgacctcggagcagaacccaacctccgagcagtacatgctaagacttcaccagtcaaagcgaactactatactcaattgatccaataacttgaccaacggaacggggtcaggatggacgaggacgtgctaaccaccctgaagatcctcatcatcggcgagagtggggtgggcaagtccagcctgctcttgaggttcacagatgatacgtttgatccagaacttgcagcaacaataggtgttgactttaaggtgaaaacaatttcagtggatggaaataaggctaaacttgcaatatgggatactgctggtcaagagaggtttagaacattaactcccagctattatagaggtgcacagggtgttatattagtttatgatgtcacaagaagagatacatttgttaaactggataattggttaaatgaattggaaacatactgtacaagaaatgacatagtaaacatgctagttggaaataaaatcgataaggaaaatcgtgaagtcgatagaaatgaaggcctgaaatttgcacgaaagcattccatgttatttatagaggcaagtgcaaaaacctgtgatggtgtacaatgtgcctttgaagaacttgttgaaaagatcattcagacccctggactgtgggaaagtgagaaccagaataaaggagtcaaactgtcacacagggaagaaggccaaggaggaggagcctgtggtggttattgctctgtgttataaactctgggaaattccatctcttgcatatttgatcagatagtgacatctttctgtatataaactctttaactgctattttagggaccttgcagtttgcacataattgttttatatcatagcagtaaatatttgcaagaaatcccactcatcgaccccgggtaaaatgttatggtaagcatgcacagtttgcagtctacagtttttttatgtagcacaaaataggtgtacctttataagtacattcaattttatgatttacatttatcatgtaatttttaaaaaaatccatctatctaggatatgttgatacaaagtctgcttttgctattctttttgcttaaatactcctatcattttctgaattacttggtatttagaactcctagcaccacggggaagaatagaggtatcatcaaacgtggcaaattttctttcaggaataataaagagcatgattccacagctttt

SEQ ID NO: 336570 - DNA, 2502 bp, Homo sapiens
tggcagacgtggagcggcgcgcatgcgcagcagctcactctgctgaagggctgagaggcgcacccgggcggccagctgggctcggagcggaacggggtcaggatggacgaggacgtgctaaccaccctgaagatcctcatcatcggcgagagtggggtgggcaagtccagcctgctcttgaggttcacagatgatacgtttgatccagaacttgcagcaacaataggtgttgactttaaggtgaaaacaatttcagtggatggaaataaggctaaacttgcaatatgggatactgctggtcaagagaggtttagaacattaactcccagctattatagaggtgcacagggtgttatattagtttatgatgtcacaagaagagatacatttgttaaactggataattggttaaatgaattggaaacatactgtacaagaaatgacatagtaaacatgctagttggaaataaaatcgataaggaaaatcgtgaagtcgatagaaatgaaggcctgaaatttgcacgaaagcattccatgttatttatagaggcaagtgcaaaaacctgtgatggtgtacaatgtgcctttgaagaacttgttgaaaagatcattcagacccctggactgtgggaaagtgagaaccagaataaaggagtcaaactgtcacacagggaagaaggccaaggaggaggagcctgtggtggttattgctctgtgttataaactctgggaaattccatctcttgcatatttgatcagatagtgacatctttctgtatataaactctttaactgctattttagggaccttgcagtttgcacataattgttttatatcatagcagtaaatatttgcaagaaatcccactcatcgaccccgggtaaaatgttatggtaagcatgcacagtttgcagtctacagtttttttatgtagcacaaaataggtgtacctttataagtacattcaattttatgatttacatttatcatgtaatttttaaaaaaatccatctatctaggatatgttgatacaaagtctgcttttgctattctttttgcttaaatactcctatcattttctgaattacttggtatttagaactcctagcaccacggggaagaatagaggtatcatcaaacgtggcaaattttctttcaggaataataaagagcatgattccacagcttttctgggatgtttgagattcttttttagtactaagcaaaattctcatcacagaatgtagcccaggccaatttataactaaatctctatttgttcggatgatgcttctaaaacagcattgataggttaaagaagcttggtatttttaatttacttcaatgattagctcagttgcttaactggagttttaatcctgtgatatgtacattggattcatgactgtgcagcatttttagttatgtggtgtttggcagaatgacaataaggttttcccccattttggtttcaggaggacatgaatagtgtgtttattgtaactcctcatacacttttaaaaccaacatcttttttcataaatgttggtagtgtttgtccaggtaccttaactgtagcttgtgtaatgttgatgaatatctgtatcttacggcttccataatggctagttgatattcaaaaacctatttctgtgttttgaggggtggggaaaaaaaacactaagtgataatttgaaaaaggcatattgcttccagattctgatgtgtgagggaaaatactgtcacaatgaaaatcttgacaatttacttaacaagtaaccagtagttcatcaaaaccaacttgtacagactaataaatctttttcacagtattcagttttctcacctcttgctattgtatattgtagatttttttcattcatgtgttatttaatttacactgatctctgctattttaaccccccaaataagttatttgtcctttaaggttggttactataatacccctcagtaagattccagtattaatttctgggcagtttgttctctgtatacaattgcaaatgataagcatttttgtgagtgaccacctttgcaatatgtttgttaatttacttcatgttgggttctttctgaaatgtacatctttacatataaaaacctcacattctacttgatttacacttcctagtctacattacatgtggttgaaggttttatacattctatatgcttttactaaatatacaagatttactactagaaatttggagaaagaacactaacacatgtacttgtgatttgttcatgttatattaaaacttgagatttgtgtatttatgtagagtctgtattgacaagactgttgttttttgctccttgagctatataataatctgtgtattggattgttgtcttgatttggtctaaatttgaatatatatgagttacttgaatataacaaaaatgaattttgtttgatagatttatattgtaacctttttctagttcttgaataaatatagcctgctttccctaga

SEQ ID NO: 336571 - DNA, 2693 bp, Homo sapiens
tggcagacgtggagcggcgcgcatgcgcagcagctcactctgctgaagggctgagaggcgcacccgggcggccagctgggctcggagcggaacggggtcaggatggacgaggacgtgctaaccaccctgaagatcctcatcatcggcgagagtggggtgggcaagtccagcctgctcttgaggttcacagatgatacgtttgatccagaacttgcagcaacaataggtgttgactttaaggtgaaaacaatttcagtggatggaaataaggctaaacttgcaatatgggatactgctggtcaagagaggtttagaacattaactcccagctattatagaggtgcacagggtgttatattagtttatgatgtcacaagaagagatacatttgttaaactggataattggttaaatgaattggaaacatactgtacaagaaatgacatagtaaacatgctagttggaaataaaatcgataaggaaaatcgtgaagtcgatagaaatgaaggcctgaaatttgcacgaaagcattccatgttatttatagaggcaagtgcaaaaacctgtgatggtgtacaatgtgcctttgaagaacttgttgaaaagatcattcagacccctggactgtgggaaagtgagaaccagaataaaggagtcaaactgtcacacagggaagaaggccaaggaggaggagcctgtggtggttattgctctgtgttataaactctgggaaattccatctcttgcatatttgatcagatagtgacatctttctgtatataaactctttaactgctattttagggaccttgcagtttgcacataattgttttatatcatagcagtaaatatttgcaagaaatcccactcatcgaccccgggtaaaatgttatggtaagcatgcacagtttgcagtctacagtttttttatgtagcacaaaataggtgtacctttataagtacattcaattttatgatttacatttatcatgtaatttttaaaaaaatccatctatctaggatatgttgatacaaagtctgcttttgctattctttttgcttaaatactcctatcattttctgaattacttggtatttagaactcctagcaccacggggaagaatagaggtatcatcaaacgtggcaaattttctttcaggaataataaagagcatgattccacagcttttctgggatgtttgagattcttttttagtactaagcaaaattctcatcacagaatgtagcccaggccaatttataactaaatctctatttgttcggatgatgcttctaaaacagcattgataggttaaagaagcttggtatttttaatttacttcaatgattagctcagttgcttaactggagttttaatcctgtgatatgtacattggattcatgactgtgcagcatttttagttatgtggtgtttggcagaatgacaataaggttttcccccattttggtttcaggaggacatgaatagtgtgtttattgtaactcctcatacacttttaaaaccaacatcttttttcataaatgttggtagtgtttgtccaggtaccttaactgtagcttgtgtaatgttgatgaatatctgtatcttacggcttccataatggctagttgatattcaaaaacctatttctgtgttttgaggggtggggaaaaaaaacactaagtgataatttgaaaaaggcatattgcttccagattctgatgtgtgagggaaaatactgtcacaatgaaaatcttgacaatttacttaacaagtaaccagtagttcatcaaaaccaacttgtacagactaataaatctttttcacagtattcagttttctcacctcttgctattgtatattgtagatttttttcattcatgtgttatttaatttacactgatctctgctattttaaccccccaaataagttatttgtcctttaaggttggttactataatacccctcagtaagattccagtattaatttctgggcagtttgttctctgtatacaattgcaaatgataagcatttttgtgagtgaccacctttgcaatatgtttgttaatttacttcatgttgggttctttctgaaatgtacatctttacatataaaaacctcacattctacttgatttacacttcctagtctacattacatgtggttgaaggttttatacattctatatgcttttactaaatatacaagatttactactagaaatttggagaaagaacactaacacatgtacttgtgatttgttcatgttatattaaaacttgagatttgtgtatttatgtagagtctgtattgacaagactgttgttttttgctccttgagctatataataatctgtgtattggattgttgtcttgatttggtctaaatttgaatatatatgagttacttgaatataacaaaaatgaattttgtttgatagatttatattgtaacctttttctagttcttgaataaatatagcctgctttccctagaaaaaaaaacagaacacaagacgcaacacaacacccacacaggagcaacaccacccacaaacacattgggcggcgccccccgaaataacaaccgggggggcgcccacgaagaaaaagggccggccaagaacggcgcaggggggtccaaaaaagggcgcggggaaaacgggggggggcagcggacacccgcgg

SEQ ID NO: 336572 - DNA, 2448 bp, Homo sapiens
tggcagacgtggagcggcgcgcatgcgcagcagctcactctgctgaagggctgagaggcgcacccgggcggccagctgggctcggagcggaacggggtcaggatggacgaggacgtgctaaccaccctgaagatcctcatcatcggcgagagtggggtgggcaagtccagcctgctcttgaggttcacagatgatacgtttgatccagaacttgcagcaacaataggtgttgactttaaggtgaaaacaatttcagtggatggaaataaggctaaacttgcaatatgggatactgctggtcaagagaggtttagaacattaactcccagctattatagaggtgcacagggtgttatattagtttatgatgtcacaagaagagatacatttgttaaactggataattggttaaatgaattggaaacatactgtacaagaaatgacatagtaaacatgctagttggaaataaaatcgataaggaaaatcgtgaagtcgatagaaatgaaggcctgaaatttgcacgaaagcattccatgttatttatagaggcaagtgcaaaaacctgtgatggtgtacaatgtgcctttgaagaacttgttgaaaagatcattcagacccctggactgtgggaaagtgagaaccagaataaaggagtcaaactgtcacacagggaagaaggccaaggaggaggagcctgtggtggttattgctctgtgttataaactctgggaaattccatctcttgcatatttgatcagatagtgacatctttctgtatataaactctttaactgctattttagggaccttgcagtttgcacataattgttttatatcatagcagtaaatatttgcaagaaatcccactcatcgaccccgggtaaaatgttatggtaagcatgcacagtttgcagtctacagtttttttatgtagcacaaaataggtgtacctttataagtacattcaattttatgatttacatttatcatgtaatttttaaaaaaatccatctatctaggatatgttgatacaaagtctgcttttgctattctttttgcttaaatactcctatcattttctgaattacttggtatttagaactcctagcaccacggggaagaatagaggtatcatcaaacgtggcaaattttctttcaggaataataaagagcatgattccacagcttttctgggatgtttgagattcttttttagtactaagcaaaattctcatcacagaatgtagcccaggccaatttataactaaatctctatttgttcggatgatgcttctaaaacagcattgataggttaaagaagcttggtatttttaatttacttcaatgattagctcagttgcttaactggagttttaatcctgtgatatgtacattggattcatgactgtgcagcatttttagttatgtggtgtttggcagaatgacaataaggttttcccccattttggtttcaggaggacatgaatagtgtgtttattgtaactcctcatacacttttaaaaccaacatcttttttcataaatgttggtagtgtttgtccaggtaccttaactgtagcttgtgtaatgttgatgaatatctgtatcttacggcttccataatggctagttgatattcaaaaacctatttctgtgttttgaggggtggggaaaaaaaacactaagtgataatttgaaaaaggcatattgcttccagattctgatgtgtgagggaaaatactgtcacaatgaaaatcttgacaatttacttaacaagtaaccagtagttcatcaaaaccaacttgtacagactaataaatctttttcacagtattcagttttctcacctcttgctattgtatattgtagatttttttcattcatgtgttatttaatttacactgatctctgctattttaaccccccaaataagttatttgtcctttaaggttggttactataatacccctcagtaagattccatttgtgagtgaccacctttgcaatatgtttgttaatttacttcatgttgggttctttctgaaatgtacatctttacatataaaaacctcacattctacttgatttacacttcctagtctacattacatgtggttgaaggttttatacattctatatgcttttactaaatatacaagatttactactagaaatttggagaaagaacactaacacatgtacttgtgatttgttcatgttatattaaaacttgagatttgtgtatttatgtagagtctgtattgacaagactgttgttttttgctccttgagctatataataatctgtgtattggattgttgtcttgatttggtctaaatttgaatatatatgagttacttgaatataacaaaaatgaattttgtttgatagatttatattgtaacctttttctagttcttgaataaatatagcctgctttccctaga

SEQ ID NO: 336573 - DNA, 2442 bp, Homo sapiens
tggcagacgtggagcggcgcgcatgcgcagcagctcactctgctgaagggctgagaggcgcacccgggcggccagctgggctcggagcggaacggggtcaggatggacgaggacgtgctaaccaccctgaagatcctcatcatcggcgagagtggggtgggcaagtccagcctgctcttgaggttcacagatgatacgtttgatccagaacttgcagcaacaataggtgttgactttaaggtgaaaacaatttcagtggatggaaataaggctaaacttgcaatatgggatactgctggtcaagagaggtttagaacattaactcccagctattatagaggtgcacagggtgttatattagtttatgatgtcacaagaagagatacatttgttaaactggataattggttaaatgaattggaaacatactgtacaagaaatgacatagtaaacatgctagttggaaataaaatcgataaggaaaatcgtgaagtcgatagaaatgaaggcctgaaatttgcacgaaagcattccatgttatttatagaggcaagtgcaaaaacctgtgatggtgtacaatgtgcctttgaagaacttgttgaaaagatcattcagacccctggactgtgggaaagtgagaaccagaataaaggagtcaaactgtcacacagggaagaaggccaaggaggaggagcctgtggtggttattgctctgtgttataaactctgggaaattccatctcttgcatatttgatcagatagtgacatctttctgtatataaactctttaactgctattttagggaccttgcagtttgcacataattgttttatatcatagcagtaaatatttgcaagaaatcccactcatcgaccccgggtaaaatgttatggtaagcatgcacagtttgcagtctacagtttttttatgtagcacaaaataggtgtacctttataagtacattcaattttatgatttacatttatcatgtaatttttaaaaaaatccatctatctaggatatgttgatacaaagtctgcttttgctattctttttgcttaaatactcctatcattttctgaattacttggtatttagaactcctagcaccacggggaagaatagaggtatcatcaaacgtggcaaattttctttcaggaataataaagagcatgattccacagcttttctgggatgtttgagattcttttttagtactaagcaaaattctcatcacagaatgtagcccaggccaatttataactaaatctctatttgttcggatgatgcttctaaaacagcattgataggttaaagaagcttggtatttttaatttacttcaatgattagctcagttgcttaactggagttttaatcctgtgatatgtacattggattcatgactgtgcagcatttttagttatgtggtgtttggcagaatgacaataaggttttcccccattttggtttcaggaggacatgaatagtgtgtttattgtaactcctcatacacttttaaaaccaacatcttttttcataaatgttggtagtgtttgtccaggtaccttaactgtagcttgtgtaatgttgatgaatatctgtatcttacggcttccataatggctagttgatattcaaaaacctatttctgtgttttgaggggtggggaggaaaatactgtcacaatgaaaatcttgacaatttacttaacaagtaaccagtagttcatcaaaaccaacttgtacagactaataaatctttttcacagtattcagttttctcacctcttgctattgtatattgtagatttttttcattcatgtgttatttaatttacactgatctctgctattttaaccccccaaataagttatttgtcctttaaggttggttactataatacccctcagtaagattccagtattaatttctgggcagtttgttctctgtatacaattgcaaatgataagcatttttgtgagtgaccacctttgcaatatgtttgttaatttacttcatgttgggttctttctgaaatgtacatctttacatataaaaacctcacattctacttgatttacacttcctagtctacattacatgtggttgaaggttttatacattctatatgcttttactaaatatacaagatttactactagaaatttggagaaagaacactaacacatgtacttgtgatttgttcatgttatattaaaacttgagatttgtgtatttatgtagagtctgtattgacaagactgttgttttttgctccttgagctatataataatctgtgtattggattgttgtcttgatttggtctaaatttgaatatatatgagttacttgaatataacaaaaatgaattttgtttgatagatttatattgtaacctttttctagttcttgaataaatatagcctgctttccctaga

SEQ ID NO: 336574 - DNA, 2473 bp, Homo sapiens
ctcactaaaatgacagcatacaactggtttatgaaattattagatctgctgaagggctgagaggcgcacccgggcggccagctgggctcggagcggaacggggtcaggatggacgaggacgtgctaaccaccctgaagatccctgctcttgaggttcacagatgatacgtttgatccagaacttgcagcaacaataggtgttgactttaaggtgaaaacaatttcagtggatggaaataaggctaaacttgcaatatgggatactgctggtcaagagaggtttagaacattaactcccagctattatagaggtgcacagggtgttatattagtttatgatgtcacaagaagagatacatttgttaaactggataattggttaaatgaattggaaacatactgtacaagaaatgacatagtaaacatgctagttggaaataaaatcgataaggaaaatcgtgaagtcgatagaaatgaaggcctgaaatttgcacgaaagcattccatgttatttatagaggcaagtgcaaaaacctgtgatggtgtacaatgtgcctttgaagaacttgttgaaaagatcattcagacccctggactgtgggaaagtgagaaccagaataaaggagtcaaactgtcacacagggaagaaggccaaggaggaggagcctgtggtggttattgctctgtgttataaactctgggaaattccatctcttgcatatttgatcagatagtgacatctttctgtatataaactctttaactgctattttagggaccttgcagtttgcacataattgttttatatcatagcagtaaatatttgcaagaaatcccactcatcgaccccgggtaaaatgttatggtaagcatgcacagtttgcagtctacagtttttttatgtagcacaaaataggtgtacctttataagtacattcaattttatgatttacatttatcatgtaatttttaaaaaaatccatctatctaggatatgttgatacaaagtctgcttttgctattctttttgcttaaatactcctatcattttctgaattacttggtatttagaactcctagcaccacggggaagaatagaggtatcatcaaacgtggcaaattttctttcaggaataataaagagcatgattccacagcttttctgggatgtttgagattcttttttagtactaagcaaaattctcatcacagaatgtagcccaggccaatttataactaaatctctatttgttcggatgatgcttctaaaacagcattgataggttaaagaagcttggtatttttaatttacttcaatgattagctcagttgcttaactggagttttaatcctgtgatatgtacattggattcatgactgtgcagcatttttagttatgtggtgtttggcagaatgacaataaggttttcccccattttggtttcaggaggacatgaatagtgtgtttattgtaactcctcatacacttttaaaaccaacatcttttttcataaatgttggtagtgtttgtccaggtaccttaactgtagcttgtgtaatgttgatgaatatctgtatcttacggcttccataatggctagttgatattcaaaaacctatttctgtgttttgaggggtggggaaaaaaaacactaagtgataatttgaaaaaggcatattgcttccagattctgatgtgtgagggaaaatactgtcacaatgaaaatcttgacaatttacttaacaagtaaccagtagttcatcaaaaccaacttgtacagactaataaatctttttcacagtattcagttttctcacctcttgctattgtatattgtagatttttttcattcatgtgttatttaatttacactgatctctgctattttaaccccccaaataagttatttgtcctttaaggttggttactataatacccctcagtaagattccagtattaatttctgggcagtttgttctctgtatacaattgcaaatgataagcatttttgtgagtgaccacctttgcaatatgtttgttaatttacttcatgttgggttctttctgaaatgtacatctttacatataaaaacctcacattctacttgatttacacttcctagtctacattacatgtggttgaaggttttatacattctatatgcttttactaaatatacaagatttactactagaaatttggagaaagaacactaacacatgtacttgtgatttgttcatgttatattaaaacttgagatttgtgtatttatgtagagtctgtattgacaagactgttgttttttgctccttgagctatataataatctgtgtattggattgttgtcttgatttggtctaaatttgaatatatatgagttacttgaatataacaaaaatgaattttgtttgatagatttatattgtaacctttttctagttcttgaataaatatagcctgctttccctaga

SEQ ID NO: 336575 - DNA, 2741 bp, Homo sapiens
acccgcgcctgcctggttcccggcctttgccaggcccaagttctctgggtcgctctccctcctgtagcgccgagaaaacaccattccgagggccgccgctcggccggcagtcggctgtgaaagaactggatcttgtgactgctggaaaatttcgctttagtgtaaggtccgagtgcttcagccgtgggccacctttgaaaataaaatgtaattgttatttctcattttgccacatcctgtggagacagaagattagtgttgtgctttcattttttactttttccttggggaaaataatattgacagtggagttgagtataagcctgctcttgaggttcacagatgatacgtttgatccagaacttgcagcaacaataggtgttgactttaaggtgaaaacaatttcagtggatggaaataaggctaaacttgcaatatgggttactttgcatcagcagactgcaaactttttcttaaagagccagataggaaatagtccaatcctgaagtgggccatgtggcaatacgatactgctggtcaagagaggtttagaacattaactcccagctattatagaggtgcacagggtgttatattagtttatgatgtcacaagaagagatacatttgttaaactggataattggttaaatgaattggaaacatactgtacaagaaatgacatagtaaacatgctagttggaaataaaatcgataaggaaaatcgtgaagtcgatagaaatgaaggcctgaaatttgcacgaaagcattccatgttatttatagaggcaagtgcaaaaacctgtgatggtgtacaatgtgcctttgaagaacttgttgaaaagatcattcagacccctggactgtgggaaagtgagaaccagaataaaggagtcaaactgtcacacagggaagaaggccaaggaggaggagcctgtggtggttattgctctgtgttataaactctgggaaattccatctcttgcatatttgatcagatagtgacatctttctgtatataaactctttaactgctattttagggaccttgcagtttgcacataattgttttatatcatagcagtaaatatttgcaagaaatcccactcatcgaccccgggtaaaatgttatggtaagcatgcacagtttgcagtctacagtttttttatgtagcacaaaataggtgtacctttataagtacattcaattttatgatttacatttatcatgtaatttttaaaaaaatccatctatctaggatatgttgatacaaagtctgcttttgctattctttttgcttaaatactcctatcattttctgaattacttggtatttagaactcctagcaccacggggaagaatagaggtatcatcaaacgtggcaaattttctttcaggaataataaagagcatgattccacagcttttctgggatgtttgagattcttttttagtactaagcaaaattctcatcacagaatgtagcccaggccaatttataactaaatctctatttgttcggatgatgcttctaaaacagcattgataggttaaagaagcttggtatttttaatttacttcaatgattagctcagttgcttaactggagttttaatcctgtgatatgtacattggattcatgactgtgcagcatttttagttatgtggtgtttggcagaatgacaataaggttttcccccattttggtttcaggaggacatgaatagtgtgtttattgtaactcctcatacacttttaaaaccaacatcttttttcataaatgttggtagtgtttgtccaggtaccttaactgtagcttgtgtaatgttgatgaatatctgtatcttacggcttccataatggctagttgatattcaaaaacctatttctgtgttttgaggggtggggaaaaaaaacactaagtgataatttgaaaaaggcatattgcttccagattctgatgtgtgagggaaaatactgtcacaatgaaaatcttgacaatttacttaacaagtaaccagtagttcatcaaaaccaacttgtacagactaataaatctttttcacagtattcagttttctcacctcttgctattgtatattgtagatttttttcattcatgtgttatttaatttacactgatctctgctattttaaccccccaaataagttatttgtcctttaaggttggttactataatacccctcagtaagattccagtattaatttctgggcagtttgttctctgtatacaattgcaaatgataagcatttttgtgagtgaccacctttgcaatatgtttgttaatttacttcatgttgggttctttctgaaatgtacatctttacatataaaaacctcacattctacttgatttacacttcctagtctacattacatgtggttgaaggttttatacattctatatgcttttactaaatatacaagatttactactagaaatttggagaaagaacactaacacatgtacttgtgatttgttcatgttatattaaaacttgagatttgtgtatttatgtagagtctgtattgacaagactgttgttttttgctccttgagctatataataatctgtgtattggattgttgtcttgatttggtctaaatttgaatatatatgagttacttgaatataacaaaaatgaattttgtttgatagatttatattgtaacctttttctagttcttgaataaatatagcctgctttccctaga

SEQ ID NO: 336576 - DNA, 2446 bp, Homo sapiens
ctcactaaaatgacagcatacaactggtttatgaaattattagatctgctgaagggctgagaggcgcacccgggcggccagctgggctcggagcggaacggggtcaggatggacgaggacgtgctaaccaccctgaagatcctcatcatcggcgagagtggggtgggcaagtccagcctgctcttgaggttcacagatgatacgtttgatccagaacttgcagcaacaataggatactgctggtcaagagaggtttagaacattaactcccagctattatagaggtgcacagggtgttatattagtttatgatgtcacaagaagagatacatttgttaaactggataattggttaaatgaattggaaacatactgtacaagaaatgacatagtaaacatgctagttggaaataaaatcgataaggaaaatcgtgaagtcgatagaaatgaaggcctgaaatttgcacgaaagcattccatgttatttatagaggcaagtgcaaaaacctgtgatggtgtacaatgtgcctttgaagaacttgttgaaaagatcattcagacccctggactgtgggaaagtgagaaccagaataaaggagtcaaactgtcacacagggaagaaggccaaggaggaggagcctgtggtggttattgctctgtgttataaactctgggaaattccatctcttgcatatttgatcagatagtgacatctttctgtatataaactctttaactgctattttagggaccttgcagtttgcacataattgttttatatcatagcagtaaatatttgcaagaaatcccactcatcgaccccgggtaaaatgttatggtaagcatgcacagtttgcagtctacagtttttttatgtagcacaaaataggtgtacctttataagtacattcaattttatgatttacatttatcatgtaatttttaaaaaaatccatctatctaggatatgttgatacaaagtctgcttttgctattctttttgcttaaatactcctatcattttctgaattacttggtatttagaactcctagcaccacggggaagaatagaggtatcatcaaacgtggcaaattttctttcaggaataataaagagcatgattccacagcttttctgggatgtttgagattcttttttagtactaagcaaaattctcatcacagaatgtagcccaggccaatttataactaaatctctatttgttcggatgatgcttctaaaacagcattgataggttaaagaagcttggtatttttaatttacttcaatgattagctcagttgcttaactggagttttaatcctgtgatatgtacattggattcatgactgtgcagcatttttagttatgtggtgtttggcagaatgacaataaggttttcccccattttggtttcaggaggacatgaatagtgtgtttattgtaactcctcatacacttttaaaaccaacatcttttttcataaatgttggtagtgtttgtccaggtaccttaactgtagcttgtgtaatgttgatgaatatctgtatcttacggcttccataatggctagttgatattcaaaaacctatttctgtgttttgaggggtggggaaaaaaaacactaagtgataatttgaaaaaggcatattgcttccagattctgatgtgtgagggaaaatactgtcacaatgaaaatcttgacaatttacttaacaagtaaccagtagttcatcaaaaccaacttgtacagactaataaatctttttcacagtattcagttttctcacctcttgctattgtatattgtagatttttttcattcatgtgttatttaatttacactgatctctgctattttaaccccccaaataagttatttgtcctttaaggttggttactataatacccctcagtaagattccagtattaatttctgggcagtttgttctctgtatacaattgcaaatgataagcatttttgtgagtgaccacctttgcaatatgtttgttaatttacttcatgttgggttctttctgaaatgtacatctttacatataaaaacctcacattctacttgatttacacttcctagtctacattacatgtggttgaaggttttatacattctatatgcttttactaaatatacaagatttactactagaaatttggagaaagaacactaacacatgtacttgtgatttgttcatgttatattaaaacttgagatttgtgtatttatgtagagtctgtattgacaagactgttgttttttgctccttgagctatataataatctgtgtattggattgttgtcttgatttggtctaaatttgaatatatatgagttacttgaatataacaaaaatgaattttgtttgatagatttatattgtaacctttttctagttcttgaataaatatagcctgctttccctaga

SEQ ID NO: 336577 - DNA, 2448 bp, Homo sapiens
tggcagacgtggagcggcgcgcatgcgcagcagctcactctgctgaagggctgagaggcgcacccgggcggccagctgggctcggagcggaacggggtcaggatggacgaggacgtgctaaccaccctgaagatcctcatcatcggcgagagtggggtgggcaagtccagcctgctcttgaggttcacagatgatacgtttgatccagaacttgcagcaacaataggtgttgactttaaggtgaaaacaatttcagtggatggaaataaggctaaacttgcaatatgggatactgctggtcaagagaggtttagaacattaactcccagctattatagaggtgcacagggtgttatattagtttatgatgtcacaagaagagatacatttgttaaactggataattggttaaatgaattggaaacatactgtacaagaaatgacatagtaaacatgctagttggaaataaaatcgataaggaaaatcgtgaagtcgatagaaatgaaggcctgaaatttgcacgaaagcattccatgttatttatagaggcaagtgcaaaaacctgtgatggtgtacaatgtgcctttgaagaacttgttgtcaaactgtcacacagggaagaaggccaaggaggaggagcctgtggtggttattgctctgtgttataaactctgggaaattccatctcttgcatatttgatcagatagtgacatctttctgtatataaactctttaactgctattttagggaccttgcagtttgcacataattgttttatatcatagcagtaaatatttgcaagaaatcccactcatcgaccccgggtaaaatgttatggtaagcatgcacagtttgcagtctacagtttttttatgtagcacaaaataggtgtacctttataagtacattcaattttatgatttacatttatcatgtaatttttaaaaaaatccatctatctaggatatgttgatacaaagtctgcttttgctattctttttgcttaaatactcctatcattttctgaattacttggtatttagaactcctagcaccacggggaagaatagaggtatcatcaaacgtggcaaattttctttcaggaataataaagagcatgattccacagcttttctgggatgtttgagattcttttttagtactaagcaaaattctcatcacagaatgtagcccaggccaatttataactaaatctctatttgttcggatgatgcttctaaaacagcattgataggttaaagaagcttggtatttttaatttacttcaatgattagctcagttgcttaactggagttttaatcctgtgatatgtacattggattcatgactgtgcagcatttttagttatgtggtgtttggcagaatgacaataaggttttcccccattttggtttcaggaggacatgaatagtgtgtttattgtaactcctcatacacttttaaaaccaacatcttttttcataaatgttggtagtgtttgtccaggtaccttaactgtagcttgtgtaatgttgatgaatatctgtatcttacggcttccataatggctagttgatattcaaaaacctatttctgtgttttgaggggtggggaaaaaaaacactaagtgataatttgaaaaaggcatattgcttccagattctgatgtgtgagggaaaatactgtcacaatgaaaatcttgacaatttacttaacaagtaaccagtagttcatcaaaaccaacttgtacagactaataaatctttttcacagtattcagttttctcacctcttgctattgtatattgtagatttttttcattcatgtgttatttaatttacactgatctctgctattttaaccccccaaataagttatttgtcctttaaggttggttactataatacccctcagtaagattccagtattaatttctgggcagtttgttctctgtatacaattgcaaatgataagcatttttgtgagtgaccacctttgcaatatgtttgttaatttacttcatgttgggttctttctgaaatgtacatctttacatataaaaacctcacattctacttgatttacacttcctagtctacattacatgtggttgaaggttttatacattctatatgcttttactaaatatacaagatttactactagaaatttggagaaagaacactaacacatgtacttgtgatttgttcatgttatattaaaacttgagatttgtgtatttatgtagagtctgtattgacaagactgttgttttttgctccttgagctatataataatctgtgtattggattgttgtcttgatttggtctaaatttgaatatatatgagttacttgaatataacaaaaatgaattttgtttgatagatttatattgtaacctttttctagttcttgaataaatatagcctgctttccctaga

SEQ ID NO: 336578 - DNA, 1446 bp, Homo sapiens
cccttatgttcggacccaccagcagtttcaataccaagggacagaggagtgacatccacagagcagcaaatcttgaacattctcagacttgtctccagacaagatggctgcctggacagctgcaccataagcaacctgggatgtttgagattcttttttagtactaagcaaaattctcatcacagaatgtagcccaggccaatttataactaaatctctatttgttcggatgatgcttctaaaacagcattgataggttaaagaagcttggtatttttaatttacttcaatgattagctcagttgcttaactggagttttaatcctgtgatatgtacattggattcatgactgtgcagcatttttagttatgtggtgtttggcagaatgacaataaggttttcccccattttggtttcaggaggacatgaatagtgtgtttattgtaactcctcatacacttttaaaaccaacatcttttttcataaatgttggtagtgtttgtccaggtaccttaactgtagcttgtgtaatgttgatgaatatctgtatcttacggcttccataatggctagttgatattcaaaaacctatttctgtgttttgaggggtggggaaaaaaaacactaagtgataatttgaaaaaggcatattgcttccagattctgatgtgtgagggaaaatactgtcacaatgaaaatcttgacaatttacttaacaagtaaccagtagttcatcaaaaccaacttgtacagactaataaatctttttcacagtattcagttttctcacctcttgctattgtatattgtagatttttttcattcatgtgttatttaatttacactgatctctgctattttaaccccccaaataagttatttgtcctttaaggttggttactataatacccctcagtaagattccagtattaatttctgggcagtttgttctctgtatacaattgcaaatgataagcatttttgtgagtgaccacctttgcaatatgtttgttaatttacttcatgttgggttctttctgaaatgtacatctttacatataaaaacctcacattctacttgatttacacttcctagtctacattacatgtggttgaaggttttatacattctatatgcttttactaaatatacaagatttactactagaaatttggagaaagaacactaacacatgtacttgtgatttgttcatgttatattaaaacttgagatttgtgtatttatgtagagtctgtattgacaagactgttgttttttgctccttgagctatataataatctgtgtattggattgttgtcttgatttggtctaaatttgaatatatatgagttacttgaatataacaaaaatgaattttgtttgatagatttatattgtaacctttttctagttcttgaataaatatagcctgctttccctaga

SEQ ID NO: 336579 - DNA, 1106 bp, Homo sapiens
tgaagaactccactgttttcaagttaaaggtcacctcgtaggccaggcgcagtggctcatgcctgtaatctcagcctcccaaagtgctaggattacaggtgtgagccaccacgcccagcccacacatgagttttaaacataaaaacaattacttaatggccttgtgaaaattagtgttttatgaaaattggtattttaccccacagtaaaatagtagtaaggaaagtgtattgttaccttttagtaacttagtgagacacttaagtttctgtcttgcataaaatactcttttaagataattgttggatttgggatttgcagatggtactataaagttagcattcttctttcttggcaattagctaaaaacaacaaagagagggaaaaactgacacacaaacccagcattccactaaactagaagacagttaaaaaccccaagccacaaaataggtggaaatgttgccaggagcagtggccatcaggctggctgcatgtgggaagaagtaggtaggatgccgtggctgtggagctcagagacaacaagaaacacccatgaaactgcaaggcccccctgaggtataaaacctaaaccccttgtttacaaaagtgaagtgggtttcttcagctcaaggcaggagctttcctgcacctggtttaattctaagaagtcggggaaatgaagccaaacaaggagtcacataaacaagccatttttgcaggaagtaatatgtgtctatctctatagcagttggggaggagatgactgcattgtgaaaaacctccagactgcctgtctgcattggctgttgagaagtaaaatgctaaactgtctcttaggtaaatctctgaatcacgaaaaagttgtcagtccagaactggaggcactctggccttctgcataaacctcctacaaatatcaggttctggacaaccagcacttcttcagagatgaataatcaaaaggaattcattaagcttgactgccacaaatgtttggaaataaaaaaggaagaaagaaacagaaaaacaaaggacagatgaaaatagaagtaagtactggtatggagcatcgacatgttcggggtcctctagagtcgcccgag

SEQ ID NO: 336580 - DNA, 837 bp, Homo sapiens
taccctaaccgtgcaaaggtagcataatcacttgttccttaattagggacctgtatgaatggctccacgagggttcagctgtctcttacttttaaccagtgaaattgacctgcccgtgaagaggcgggcatgacacagcaagacgagaagaccctatggagctttaatttattaatgcaaacagtacctaacaaacccacaggtcctaaactaccaaacctgcattaaaaatttcggttggggcgacctcggagcagaacccaacctccgagcagtacatgctaagacttcaccagtcaaagcgaactactatactcaattgatccaataacttgaccaacggaacggggtcaggatggacgaggacgtgctaaccaccctgaagatcctcatcatcggcgagagtggggtgggcaagtccagcctgctcttgaggttcacagatgatacgtttgatccagaacttgcagcaacaatagcagttggggaggagatgactgcattgtgaaaaacctccagactgcctgtctgcattggctgttgagaagtaaaatgctaaactgtctcttaggtaaatctctgaatcacgaaaaagttgtcagtccagaactggaggcactctggccttctgcataaacctcctacaaatatcaggttctggacaaccagcacttcttcagagatgaataatcaaaaggaattcattaagcttgactgccacaaatgtttggaaataaaaaaggaagaaagaaacagaaaaacaaaggacagatgaaaatagaagtaagtactggtatggagcatcgacatgttcggggtcctctagagtcgcccgag

SEQ ID NO: 336581 - DNA, 593 bp, Homo sapiens
gtaagtgtttactttaatgtactatttaaaaatatttattggagtttctgattgtcctagtctgtgaaagttaatatgtctttgttttacttctcgttagagctacttttatgtaacttgtagttgtattaacttcatgtaatattaatgaatattaaaacttttgattttagtcttgtctagcacttaaaaaatagacaaggctaatttatttggtttgaaaacacatgtcaatgagaacgtaattgaggattaatcagcatatgttggactgtcttggagtattacagaaactgggcttctgttatcagcatattaatatttgctgtagtttataaaggacgaaaagtatttgttgattagtagaatctgctttattagtcctaaaaatatcacaaagcacttaacactattgatttataatcaaacaaaatttagaaaccagatgtggattctcagtgtaatttgttgaaaagtgcttgttcttgatattcctgggaaactgtttaaaatgaatattgatcaattgtattaataggtagaattctctttttttaaatattatggcttggtagtgacagccttttggttca

SEQ ID NO: 336582 - DNA, 427 bp, Homo sapiens
caggcctacatcagttatttttatctgcatctaataatttgtgaccaaataatcatgaacacatttatcatatgattagaaaattcaagttcccaacctgtctttttaatatctctttcagcctgctcttgaggttcacagatgatacgtttgatccagaacttgcagcaacaatagtaagcctgtgtttaaaaattctatagaaatggccagtattttcttgcctttggcctttttaatctaaatccttctaccttcctctcaccaccccactgcctccatgtctgttgaaatcttatttgtccttcaagacttaattttggtatcattaaatctttgaagcctttctagatcttaccaagagaaaataacttccttatctgttgtctcatgatactttattaaaactgctaatgtgattatctgt

SEQ ID NO: 336583 - DNA, 1197 bp, Homo sapiens
ctcactaaaatgacagcatacaactggtttatgaaattattagatctgctgaagggctgagaggcgcacccgggcggccagctgggctcggagcggaacggggtcaggatggacgaggacgtgctaaccaccctgaagatcctcatcatcggcgagagtggggtgggcaagtccagcctgctcttgaggttcacagatgatacgtttgatccagaacttgcagcaacaataggtgttgactttaaggtgaaaacaatttcagtggatggaaataaggctaaacttgcaatatgggatactgctggtcaagagaggtttagaacattaactcccagctattatagaggtgcacagggtgttatattagtttatgatgtcacaagaagagatacatttgttaaactggataattggttaaatgaattggaaacatactgtacaagaaatgacatagtaaacatgctagttggaaataaaatcgataaggaaaatcgtgaagtcgatagaaatgaaggcctgaaatttgcacgaaagcattccatgttatttatagaggcaagtgcaaaaacctgtgatggtgtacaatgtgcctttgaagaacttgttgaaaagatcattcagacccctggactgtgggaaagtgagaaccagaataaaggagtcaaactgtcacacagggaagaaggccaaggaggaggagcctgtggtggttattgctctgtgttataaactctgggaaattccatctcttgcatatttgatcagatagtgacatctttctgtatataaactctttaactgctattttagggaccttgcagtttgcacataattgttttatatcatagcagtaaatatttgcaagaaatcccactcatcgaccccgggtaaaatgttatggtaagcatgcacagtttgcagtctacagtttttttatgtagcacaaaataggtgtacctttataagtacattcaattttatgatttacatttatcatgtaatttttaaaaaaatccatctatctaggatatgttgatacaaagtctgcttttgctattctttttgcttaaatactcctatcattttctgaattacttggtatttagaactcctagcaccacggggaagaatagaggtatcatcaaacgtggcaaattttctttcaggaataataaagagcatgattccacagctttt

SEQ ID NO: 336584 - DNA, 2840 bp, Homo sapiens
tggcagacgtggagcggcgcgcatgcgcagcagctcactctgctgaagggctgagaggcgcacccgggcggccagctgggctcggagcggaacggggtcaggatggacgaggacgtgctaaccaccctgaagatcctcatcatcggcgagagtggggtgggcaagtccagcctgctcttgaggttcacagatgatacgtttgatccagaacttgcagcaacaataggtgttgactttaaggtgaaaacaatttcagtggatggaaataaggctaaacttgcaatatgggatactgctggtcaagagaggtttagaacattaactcccagctattatagaggtgcacagggtgttatattagtttatgatgtcacaagaagagatacatttgttaaactggataattggttaaatgaattggaaacatactgtacaagaaatgacatagtaaacatgctagttggaaataaaatcgataaggaaaatcgtgaagtcgatagaaatgaaggcctgaaatttgcacgaaagcattccatgttatttatagaggcaagtgcaaaaacctgtgatggtgtacaatgtgcctttgaagaacttgttgaaaagatcattcagacccctggactgtgggaaagtgagaaccagaataaaggagtcaaactgtcacacagggaagaaggccaaggaggaggagcctgtggtggttattgctctgtgttataaactctgggaaattccatctcttgcatatttgatcagatagtgacatctttctgtatataaactctttaactgctattttagggaccttgcagtttgcacataattgttttatatcatagcagtaaatatttgcaagaaatcccactcatcgaccccgggtaaaatgttatggtaagcatgcacagtttgcagtctacagtttttttatgtagcacaaaataggtgtacctttataagtacattcaattttatgatttacatttatcatgtaatttttaaaaaaatccatctatctaggatatgttgatacaaagtctgcttttgctattctttttgcttaaatactcctatcattttctgaattacttggtatttagaactcctagcaccacggggaagaatagaggtatcatcaaacgtggcaaattttctttcaggaataataaagagcatgattccacagcttttctgggatgtttgagattcttttttagtactaagcaaaattctcatcacagaatgtagcccaggccaatttataactaaatctctatttgttcggatgatgcttctaaaacagcattgataggttaaagaagcttggtatttttaatttacttcaatgattagctcagttgcttaactggagttttaatcctgtgatatgtacattggattcatgactgtgcagcatttttagttatgtggtgtttggcagaatgacaataaggttttcccccattttggtttcaggaggacatgaatagtgtgtttattgtaactcctcatacacttttaaaaccaacatcttttttcataaatgttggtagtgtttgtccaggtaccttaactgtagcttgtgtaatgttgatgaatatctgtatcttacggcttccataatggctagttgatattcaaaaacctatttctgtgttttgaggggtggggaaaaaaaacactaagtgataatttgaaaaaggcatattgcttccagattctgatgtgtgagggaaaatactgtcacaatgaaaatcttgacaatttacttaacaagtaaccagtagttcatcaaaaccaacttgtacagactaataaatctttttcacagtattcagttttctcacctcttgctattgtatattgtagatttttttcattcatgtgttatttaatttacactgatctctgctattttaaccccccaaataagttatttgtcctttaaggttggttactataatacccctcagtaagattccagtattaatttctgggcagtttgttctctgtatacaattgcaaatgataagcatttttgtgagtgaccacctttgcaatatgtttgttaatttacttcatgttgggttctttctgaaatgtacatctttacatataaaaacctcacattctacttgatttacacttcctagtctacattacatgtggttgaaggttttatacattctatatgcttttactaaatatacaagatttactactagaaatttggagaaagaacactaacacatgtacttgtgatttgttcatgttatattaaaacttgagatttgtgtatttatgtagagtctgtattgacaagactgttgttttttgctccttgagctatataataatctgtgtattggattgttgtcttgatttggtctaaatttgaatatatatgagttacttgaatataacaaaaatgaattttgtttgatagatttatattgtaacctttttctagttcttgaataaatatagcctgctttccctagatgcatttgtgtaggaagtatatacatttccctattactctcatcagctgaagaatatgtactattgtgttactcaaattatgtggctttcattttgttgttttgttgcaagcttagtgttttgtagtggaggttttgtaaatgaaacagttgtaatatctaaggtcaggcacctagtaacagggttttgttaattcttttcagaatcattgaagcagtcttaaagggtcttttgcagatggtacaaattagaacaattagaatatagtattttgagttctagtagtactgagattgacccaaacaaataaaaaactattcaatttctgagtaatagtt

SEQ ID NO: 336585 - DNA, 3137 bp, Homo sapiens
tggcagacgtggagcggcgcgcatgcgcagcagctcactctgctgaagggctgagaggcgcacccgggcggccagctgggctcggagcggaacggggtcaggatggacgaggacgtgctaaccaccctgaagatcctcatcatcggcgagagtggggtgggcaagtccagcctgctcttgaggttcacagatgatacgtttgatccagaacttgcagcaacaataggtgttgactttaaggtgaaaacaatttcagtggatggaaataaggctaaacttgcaatatgggatactgctggtcaagagaggtttagaacattaactcccagctattatagaggtgcacagggtgttatattagtttatgatgtcacaagaagagatacatttgttaaactggataattggttaaatgaattggaaacatactgtacaagaaatgacatagtaaacatgctagttggaaataaaatcgataaggaaaatcgtgaagtcgatagaaatgaaggcctgaaatttgcacgaaagcattccatgttatttatagaggcaagtgcaaaaacctgtgatggtgtacaatgtgcctttgaagaacttgttgaaaagatcattcagacccctggactgtgggaaagtgagaaccagaataaaggagtcaaactgtcacacagggaagaaggccaaggaggaggagcctgtggtggttattgctctgtgttataaactctgggaaattccatctcttgcatatttgatcagatagtgacatctttctgtatataaactctttaactgctattttagggaccttgcagtttgcacataattgttttatatcatagcagtaaatatttgcaagaaatcccactcatcgaccccgggtaaaatgttatggtaagcatgcacagtttgcagtctacagtttttttatgtagcacaaaataggtgtacctttataagtacattcaattttatgatttacatttatcatgtaatttttaaaaaaatccatctatctaggatatgttgatacaaagtctgcttttgctattctttttgcttaaatactcctatcattttctgaattacttggtatttagaactcctagcaccacggggaagaatagaggtatcatcaaacgtggcaaattttctttcaggaataataaagagcatgattccacagcttttctgggatgtttgagattcttttttagtactaagcaaaattctcatcacagaatgtagcccaggccaatttataactaaatctctatttgttcggatgatgcttctaaaacagcattgataggttaaagaagcttggtatttttaatttacttcaatgattagctcagttgcttaactggagttttaatcctgtgatatgtacattggattcatgactgtgcagcatttttagttatgtggtgtttggcagaatgacaataaggttttcccccattttggtttcaggaggacatgaatagtgtgtttattgtaactcctcatacacttttaaaaccaacatcttttttcataaatgttggtagtgtttgtccaggtaccttaactgtagcttgtgtaatgttgatgaatatctgtatcttacggcttccataatggctagttgatattcaaaaacctatttctgtgttttgaggggtggggaaaaaaaacactaagtgataatttgaaaaaggcatattgcttccagattctgatgtgtgagggaaaatactgtcacaatgaaaatcttgacaatttacttaacaagtaaccagtagttcatcaaaaccaacttgtacagactaataaatctttttcacagtattcagttttctcacctcttgctattgtatattgtagatttttttcattcatgtgttatttaatttacactgatctctgctattttaaccccccaaataagttatttgtcctttaaggttggttactataatacccctcagtaagattccagtattaatttctgggcagtttgttctctgtatacaattgcaaatgataagcatttttgtgagtgaccacctttgcaatatgtttgttaatttacttcatgttgggttctttctgaaatgtacatctttacatataaaaacctcacattctacttgatttacacttcctagtctacattacatgtggttgaaggttttatacattctatatgcttttactaaatatacaagatttactactagaaatttggagaaagaacactaacacatgtacttgtgatttgttcatgttatattaaaacttgagatttgtgtatttatgtagagtctgtattgacaagactgttgttttttgctccttgagctatataataatctgtgtattggattgttgtcttgatttggtctaaatttgaatatatatgagttacttgaatataacaaaaatgaattttgtttgatagatttatattgtaacctttttctagttcttgaataaatatagcctgctttccctagatgcatttgtgtaggaagtatatacatttccctattactctcatcagctgaagaatatgtactattgtgttactcaaattatgtggctttcattttgttgttttgttgcaagcttagtgttttgtagtggaggttttgtaaatgaaacagttgtaatatctaaggtcaggcacctagtaacagggttttgttaattcttttcagaatcattgaagcagtcttaaagggtcttttgcagatggtacaaattagaacaattagaatatagtattttgagttctagtagtactgagattgacccaaacaaataaaaaactattcaatttctgagtaatagttaatatttattgaaagcttccttggtgccagatgcctttctaagtgctgaattatctcattaaacctcacagcaaccttaagagattagtactcctattatgcccattttaaaggtgaggacaacacaatgtaggtatgttaggtaacccccaaagatcacatagctactcagtcactgagctggattccagtcatggcatttttacttctgagcccatactcttcaccatcgctcattttacaatgggtagttagttaccagctttttgtaacacaaccaagttaaggcagttccac

SEQ ID NO: 336586 - DNA, 2786 bp, Homo sapiens
tggcagacgtggagcggcgcgcatgcgcagcagctcactctgctgaagggctgagaggcgcacccgggcggccagctgggctcggagcggaacggggtcaggatggacgaggacgtgctaaccaccctgaagatcctcatcatcggcgagagtggggtgggcaagtccagcctgctcttgaggttcacagatgatacgtttgatccagaacttgcagcaacaataggtgttgactttaaggtgaaaacaatttcagtggatggaaataaggctaaacttgcaatatgggatactgctggtcaagagaggtttagaacattaactcccagctattatagaggtgcacagggtgttatattagtttatgatgtcacaagaagagatacatttgttaaactggataattggttaaatgaattggaaacatactgtacaagaaatgacatagtaaacatgctagttggaaataaaatcgataaggaaaatcgtgaagtcgatagaaatgaaggcctgaaatttgcacgaaagcattccatgttatttatagaggcaagtgcaaaaacctgtgatggtgtacaatgtgcctttgaagaacttgttgaaaagatcattcagacccctggactgtgggaaagtgagaaccagaataaaggagtcaaactgtcacacagggaagaaggccaaggaggaggagcctgtggtggttattgctctgtgttataaactctgggaaattccatctcttgcatatttgatcagatagtgacatctttctgtatataaactctttaactgctattttagggaccttgcagtttgcacataattgttttatatcatagcagtaaatatttgcaagaaatcccactcatcgaccccgggtaaaatgttatggtaagcatgcacagtttgcagtctacagtttttttatgtagcacaaaataggtgtacctttataagtacattcaattttatgatttacatttatcatgtaatttttaaaaaaatccatctatctaggatatgttgatacaaagtctgcttttgctattctttttgcttaaatactcctatcattttctgaattacttggtatttagaactcctagcaccacggggaagaatagaggtatcatcaaacgtggcaaattttctttcaggaataataaagagcatgattccacagcttttctgggatgtttgagattcttttttagtactaagcaaaattctcatcacagaatgtagcccaggccaatttataactaaatctctatttgttcggatgatgcttctaaaacagcattgataggttaaagaagcttggtatttttaatttacttcaatgattagctcagttgcttaactggagttttaatcctgtgatatgtacattggattcatgactgtgcagcatttttagttatgtggtgtttggcagaatgacaataaggttttcccccattttggtttcaggaggacatgaatagtgtgtttattgtaactcctcatacacttttaaaaccaacatcttttttcataaatgttggtagtgtttgtccaggtaccttaactgtagcttgtgtaatgttgatgaatatctgtatcttacggcttccataatggctagttgatattcaaaaacctatttctgtgttttgaggggtggggaaaaaaaacactaagtgataatttgaaaaaggcatattgcttccagattctgatgtgtgagggaaaatactgtcacaatgaaaatcttgacaatttacttaacaagtaaccagtagttcatcaaaaccaacttgtacagactaataaatctttttcacagtattcagttttctcacctcttgctattgtatattgtagatttttttcattcatgtgttatttaatttacactgatctctgctattttaaccccccaaataagttatttgtcctttaaggttggttactataatacccctcagtaagattccagtattaatttctgggcagtttgttctctgtatacaattgcaaatgataagcatttttgtgagtgaccacctttgcaatatgtttgttaatttacttcatgttgggttctttctgaaatgtacatctttacatataaaagttttatacattctatatgcttttactaaatatacaagatttactactagaaatttggagaaagaacactaacacatgtacttgtgatttgttcatgttatattaaaacttgagatttgtgtatttatgtagagtctgtattgacaagactgttgttttttgctccttgagctatataataatctgtgtattggattgttgtcttgatttggtctaaatttgaatatatatgagttacttgaatataacaaaaatgaattttgtttgatagatttatattgtaacctttttctagttcttgaataaatatagcctgctttccctagatgcatttgtgtaggaagtatatacatttccctattactctcatcagctgaagaatatgtactattgtgttactcaaattatgtggctttcattttgttgttttgttgcaagcttagtgttttgtagtggaggttttgtaaatgaaacagttgtaatatctaaggtcaggcacctagtaacagggttttgttaattcttttcagaatcattgaagcagtcttaaagggtcttttgcagatggtacaaattagaacaattagaatatagtattttgagttctagtagtactgagattgacccaaacaaataaaaaactattcaatttctgagtaatagtt

SEQ ID NO: 336587 - DNA, 1191 bp, Homo sapiens
tggcagacgtggagcggcgcgcatgcgcagcagctcactctgctgaagggctgagaggcgcacccgggcggccagctgggctcggagcggaacggggtcaggatggacgaggacgtgctaaccaccctgaagatcctcatcatcggcgagagtggggtgggcaagtccagcctgctcttgaggttcacagatgatacgtttgatccagaacttgcagcaacaataggtgttgactttaaggtgaaaacaatttcagtggatggaaataaggctaaacttgcaatatgggatactgctggtcaagagaggtttagaacattaactcccagctattatagaggtgcacagggtgttatattagtttatgatgtcacaagaagagatacatttgttaaactggataattggttaaatgaattggaaacatactgtacaagaaatgacatagtaaacatgctagttggaaataaaatcgataaggaaaatcgtgaagtcgatagaaatgaaggcctgaaatttgcacgaaagcattccatgttatttatagaggcaagtgcaaaaacctgtgatggtgtacaatgtgcctttgaagaacttgttgaaaagatcattcagacccctggactgtgggaaagtgagaaccagaataaaggagtcaaactgtcacacagggaagaaggccaaggaggaggagcctgtggtggttattgctctgtgttataaactctgggaaattccatctcttgcatatttgatcagatagtgacatctttctgtatataaactctttaactgctattttagggaccttgcagtttgcacataattgttttatatcatagcagtaaatatttgcaagaaatcccactcatcgaccccgggtaaaatgttatggtaagcatgcacagtttgcagtctacagtttttttatgtagcacaaaataggtgtacctttataagtacattcaattttatgatttacatttatcatgtaatttttaaaaaaatccatctatctaggatatgttgatacaaagtctgcttttgctattctttttgcttaaatactcctatcattttctgaattacttggtatttagaactcctagcaccacggggaagaatagaggtatcatcaaacgtggcaaattttctttcaggaataataaagagcatgattccacagctttt

SEQ ID NO: 336588 - DNA, 2373 bp, Homo sapiens
ctcactaaaatgacagcatacaactggtttatgaaattattagatctgctgaagggctgagaggcgcacccgggcggccagctgggctcggagcggaacggggtcaggatggacgaggacgtgctaaccaccctgaagatcctcatcatcggcgagagtggggtgggcaagtccagcctgctcttgaggttcacagatgatacgtttgatccagaacttgcagcaacaatagtttatgatgtcacaagaagagatacatttgttaaactggataattggttaaatgaattggaaacatactgtacaagaaatgacatagtaaacatgctagttggaaataaaatcgataaggaaaatcgtgaagtcgatagaaatgaaggcctgaaatttgcacgaaagcattccatgttatttatagaggcaagtgcaaaaacctgtgatggtgtacaatgtgcctttgaagaacttgttgaaaagatcattcagacccctggactgtgggaaagtgagaaccagaataaaggagtcaaactgtcacacagggaagaaggccaaggaggaggagcctgtggtggttattgctctgtgttataaactctgggaaattccatctcttgcatatttgatcagatagtgacatctttctgtatataaactctttaactgctattttagggaccttgcagtttgcacataattgttttatatcatagcagtaaatatttgcaagaaatcccactcatcgaccccgggtaaaatgttatggtaagcatgcacagtttgcagtctacagtttttttatgtagcacaaaataggtgtacctttataagtacattcaattttatgatttacatttatcatgtaatttttaaaaaaatccatctatctaggatatgttgatacaaagtctgcttttgctattctttttgcttaaatactcctatcattttctgaattacttggtatttagaactcctagcaccacggggaagaatagaggtatcatcaaacgtggcaaattttctttcaggaataataaagagcatgattccacagcttttctgggatgtttgagattcttttttagtactaagcaaaattctcatcacagaatgtagcccaggccaatttataactaaatctctatttgttcggatgatgcttctaaaacagcattgataggttaaagaagcttggtatttttaatttacttcaatgattagctcagttgcttaactggagttttaatcctgtgatatgtacattggattcatgactgtgcagcatttttagttatgtggtgtttggcagaatgacaataaggttttcccccattttggtttcaggaggacatgaatagtgtgtttattgtaactcctcatacacttttaaaaccaacatcttttttcataaatgttggtagtgtttgtccaggtaccttaactgtagcttgtgtaatgttgatgaatatctgtatcttacggcttccataatggctagttgatattcaaaaacctatttctgtgttttgaggggtggggaaaaaaaacactaagtgataatttgaaaaaggcatattgcttccagattctgatgtgtgagggaaaatactgtcacaatgaaaatcttgacaatttacttaacaagtaaccagtagttcatcaaaaccaacttgtacagactaataaatctttttcacagtattcagttttctcacctcttgctattgtatattgtagatttttttcattcatgtgttatttaatttacactgatctctgctattttaaccccccaaataagttatttgtcctttaaggttggttactataatacccctcagtaagattccagtattaatttctgggcagtttgttctctgtatacaattgcaaatgataagcatttttgtgagtgaccacctttgcaatatgtttgttaatttacttcatgttgggttctttctgaaatgtacatctttacatataaaaacctcacattctacttgatttacacttcctagtctacattacatgtggttgaaggttttatacattctatatgcttttactaaatatacaagatttactactagaaatttggagaaagaacactaacacatgtacttgtgatttgttcatgttatattaaaacttgagatttgtgtatttatgtagagtctgtattgacaagactgttgttttttgctccttgagctatataataatctgtgtattggattgttgtcttgatttggtctaaatttgaatatatatgagttacttgaatataacaaaaatgaattttgtttgatagatttatattgtaacctttttctagttcttgaataaatatagcctgctttccctaga

SEQ ID NO: 336589 - DNA, 217 bp, Homo sapiens
aaaatagataaacttctggcaagactgataaataggaagacagaaataaatgaagaacaaaaaagggaaataaccacagatttataatagaggtttttaaattataagaatgttacaaagagctacaaacagaaagatctgaaaactttcatagaaattttccagaaaatcctacccaaatttacttttaaaataattcaggctgggcgtggtggct

SEQ ID NO: 336590 - DNA, 205 bp, Homo sapiens
atgaggacttggagatgtggggatgggttaggaggctagaatcaagagatatttagtaactatatagctgactgaaaggtgagcctacattttgcctcagggacttcacagaaagtaatctgacaatttgctttgatgtttcacaaactcctcaagttcactcatccagtatcttccctgctaacctcctccctcatcagtggtc

SEQ ID NO: 336591 - DNA, 512 bp, Homo sapiens
gctcactcatcacagccaccctcccccttctgcttctcctgccttggagacaggatggatggactagaaacatgggccagcaaacagggatggacgacaggagcacagggaaggatgtggacagggacagacagcaacagagaacggccaggtgaactgtgtgcctatctacatccccgtgcttggtctggggccacagactgacaccaggaggccatgaaccccaccaaggtccacgctgtgaatgtcagcagctctcatgagtttaagagggttcctggcaaagtcaagaaccactgtggcgatgcttgaaggcagcatgctcattaagagtcatcaccactccctaatctcaagtacccagggacacaaacacgcagaaggccgcagggtcctctgcctaggaaaaccagagacctctgttcacttgtttatctgctgaccttccctccacatccgtcctgtgaccctgccaaatccccctctgcgagaaacacccaagaatgatcaat

SEQ ID NO: 336592 - DNA, 256 bp, Homo sapiens
ccaagtaactaaaaccagactggttaggttaagagctctttgaaaatggtggtgtatatattgtggccttcacagcacttgtcttattttctggaattgaaactcaagctacagcagttgtggaatgccatctagaaatgaaaacatgctcggacaatctatttagagaagttgttgagggctgttttcgatgtggatgataaccctgatagagcataaactttcagtgagaaatgaaaatggtcatacccggata

SEQ ID NO: 336593 - DNA, 280 bp, Homo sapiens
ataatgtttttataccagtgtgaataaacttagcatttttcaacaagtatgagtgttcatatgtctgaaaggggttagttgattatgtggatatgataaagttcttttaaagagactgagaactgtgttggatttcccaaaaaaaaaaggagtcctgtgttttatagggatggggtgctggggaagcaaggttttcatattgttttaaatgtagtttgatcattagtatctctagagctaacctacttaattattctattcctcagtatatcaatggaga

SEQ ID NO: 336594 - DNA, 228 bp, Homo sapiens
ctcttgttctgtacagcagtaacagtaagatgatgaaaagtagaaattaatgcagtaaggagataaagtcttgatgtctacctcatctttatgaccccagaacctagcaaggtgcctggcatgtagtaggcgcacagtaaatgctgaagaaatgaataaatgagaaaggaaaccatgctacttccatatggacattttcagttctcctggatggtggtgatggcggtg

SEQ ID NO: 336595 - DNA, 541 bp, Homo sapiens
gttgcagtgagccgagattgtacgcattccagcttgggcagcagaacgagactctgtctcaaaaaaaaaaaaaagccacgtaggaaattatccacagcatcaattggacttgatcttggctcagggaccaggcccggtgccttgatattggtagatttatttgccatcagactaatgagctggggacattgactgtttcctggcaactgagtcctctgattgtgtaaacaatttgcctgcaaacaaaacctgagtgcttgaaagggtaagtgatcctgatctgccatagaaaccttcatgcttagggagtttccctagctaattcctcagctaagattctccccaggagtttcactcacctgtttccagtgcctcctttgggctgtcagcatctgtgattccacattccccagagggagattcctccccaaagctggttgtatttactgccagtcctgggctgtagccagggcagtctttgaacacattatcaagaatactttttaaaataaaagtctgtttcgacttcaaaaaaatattt

SEQ ID NO: 336596 - DNA, 2473 bp, Homo sapiens
acactgcctcggttcggcaagtgggtcagttggctggggctcacttggcaacgggacgcgggaacgaggggcgcggacgcaggcccgggaggacgcggcggcgggaacctgggggcgcagggctagggcagcgggcccgacccgcacggctttcctggaaagcgctgcccctcgccgcggcgatgacctcgctgtggagagaaatcctcttggagtcgctgctgggatgtgtttcttggtctctctaccatgacctgggaccgatgatctattactttcctttgcaaacactagaactcactgggcttgaaggttttagtatagcatttctttctccaatattcctaacaattactcctttctggaaattggttaacaagaagtggatgctaaccctgctgaggataatcactattggcagcatagcctccttccaggctccaaatgccaaacttcgactgatggttcttgcgcttggggtgtcttcctcactgatagtgcaagctgtgacttggtggtcaggaagtcatttgcaaaggtacctcagaatttggggattcattttaggacagattgttcttgttgttctacgcatatggtatacttcactaaacccaatctggagttatcagatgtccaacaaagtgatactgacattaagtgccatagccacacttgatcgtattggcacagatggtgactgcagtaaacctgaagaaaagaagactggtgaggtagccacggggatggcctctagacccaactggctgctggcaggggctgcttttggtagccttgtgttcctcacccactgggtttttggagaagtctctcttgtttccagatgggcagtgagtgggcatccacatccagggccagatcctaacccatttggaggtgcagtactgctgtgcttggcaagtggattgatgcttccatcttgtttgtggtttcgtggtactggtttgatctggtgggttacaggaacagcttcagctgcggggctcctttacctgcacacatgggcagctgctgtgtctggctgtgtcttcgccatctttactgcatccatgtggccccaaacacttggacaccttattaactcagggacaaaccctgggaaaaccatgaccattgccatgatattttatcttctagaaatatttttctgtgcctggtgcacagcttttaagtttgtcccaggaggtgtctacgctagagaaagatcagatgtgcttttggggacaatgatgttaattatcgggctgaatatgctatttggtcctaagaaaaaccttgatttgcttcttcaaacaaaaaacagttctaaagtgcttttcagaaagagtgaaaaatacatgaaactttttctgtggctgcttgttggtgtgggattgttgggattaggactacggcataaagcctatgagagaaaactgggcaaagtggcaccaaccaaagaggtctctgctgccatctggcctttcaggtttggatatgacaatgaagggtggtctagtctagaaagatcagctcacctgctcaatgaaacaggtgcagatttcataacaattttggagagtgatgcttctaagccctatatggggaacaatgacttaaccatgtggctaggggaaaagttgggtttctatacagactttggtccaagcacaaggtatcacacttgggggattatggctttgtcaagatacccaattgtgaaatctgagcatcaccttcttccgtcaccagagggcgagatcgcaccagccatcacattgaccgttaacatttcgggcaagctggtggattttgtcgtgacacactttgggaaccacgaagatgacctcgacaggaaactgcaggctattgctgtttcaaaactactgaaaagtagctctaatcaagtgatatttctgggatatatcacttcagcacctggctccagagattatctacagctcactgaacatggcaatgtgaaggatatcgacagcactgatcatgacagatggtgtgaatacattatgtatcgagggctgatcaggttgggttatgcaagaatctcccatgctgaactgagtgattcagaaattcagatggcaaaatttaggatccctgatgaccccactaattatagagacaaccagaaagtggtcatagaccacagagaagtttctgagaaaattcattttaatcccagatttggatcctacaaagaaggacacaattatgaaaacaaccataattttcatatgaatactcccaaatactttttatgaaacatttaaaacaagaagttattggctgggaaaatctaagaaaaaaagtatgtaagataaaaagaagagattaatgaaagtgggaaaatacacatgaagaacctcaacttaaaaaacacatggtatctatgcagtgggaaattacctccatttgtaaactatgttgcttaataaaaacatttctctaaatt

SEQ ID NO: 336597 - DNA, 2006 bp, Homo sapiens
acactgcctcggttcggcaagtgggtcagttggctggggctcacttggcaacgggacgcgggaacgaggggcgcggacgcaggcccgggaggacgcggcggcgggaacctgggggcgcagggctagggcagcgggcccgacccgcacggctttcctggaaagcgctgcccctcgccgcggcgatgacctcgctgtggagagaaatcctcttggagtcgctgctgggatgtgtttcttggtctctctaccatgacctgggaccgatgatctattactttcctttgcaaacactagaactcactgggcttgaaggttttagtatagcatttctttctccaatattcctaacaattactcctttctggaaattggttaacaagaagtggatgctaaccctgctgaggataatcactattggcagcatagcctccttccaggctccaaatgccaaacttcgactgatggttcttgcgcttggggtgtcttcctcactgatagtgcaagctgtgacttggtggtcaggaagtcatttgcaaaggtacctcagaatttggggattcattttaggacagattgttcttgttgttctacgcatatggtatacttcactaaacccaatctggagttatcagatgtccaacaaagtgatactgacattaagtgccatagccacacttgatcgtattggcacagatggtgactgcagtaaacctgaagaaaagaagactggtgaggtagccacggggatggcctctagacccaactggctgctggcaggggctgcttttggtagccttgtgttcctcacccactgggtttttggagaagtctctcttgtttccagatgggcagtgagtgggcatccacatccagggccagatcctaacccatttggaggtgcagtactgctgtgcttggcaagtggattgatgcttccatcttgtttgtggtttcgtggtactggtttgatctggtgggttacaggaacagcttcagctgcggggctcctttacctgcacacatgggcagctgctgtgtctggctgtgtcttcgccatctttactgcatccatgtggccccaaacacttggacaccttattaactcagggacaaaccctgggaaaaccatgaccattgccatgatattttatcttctagaaatatttttctgtgcctggtgcacagcttttaagtttgtcccaggaggtgtctacgctagagaaagatcagatgtgcttttggggacaatgatgttaattatcgggctgaatatgctatttggtcctaagaaaaaccttgatttgcttcttcaaacaaaaaacagttctaaagtgcttttcagaaagagtgaaaaatacatgaaactttttctgtggctgcttgttggtgtgggattgttgggattaggactacggcataaagcctatgagagaaaactgggcaaagtggcaccaaccaaagaggtctctgctgccatctggcctttcaggtttggatatgacaatgaagggtggtctagtctagaaagatcagctcacctgctcaatgaaacaggtgcagatttcataacaattttggagagtgatgcttctaagccctatatggggaacaatgacttaaccatgtggctaggggaaaagttgggtttctatacagactttggtccaagcacaaggtatcacacttgggggtgagtataccttgggagttaatcccgaagatagtcatgaaaggctaggctgcataggcttggagtggcaagttgatattgtaatatctttggtgaatgtgccccagtgatgcttcttgggggatgaggaggtgctggagatatgcacattctgtaatttttcaaatggtttttctgtggctggatatttccagttcttcagcattataaaccaatcaatctaggagctgaggttgcagcaccaagcatgtctggcctggatgctgtcctcatggagcttaccttccagtgtaagacagaaaatcaacatgtacac

SEQ ID NO: 336598 - DNA, 554 bp, Homo sapiens
taggcaaatgcaaaagtatgctgaaatgttggacagctcccacacacaaagattagggctcaagtcaaattctggggtattctggtagcattccttaatgtcagtcttctcaattagtctctgtctggggggagagcgccatctcctactcaaggaagcatggttctcaagacatccatcatgagttcttgctttcctgccaggcatgaacttttggacacaatcaatggtcatggccaagtagggcctacactagtaggataaagaaccagaactgtcctatttcctaaatccagcaaaaatcgagttggtaaggctgagaagggggcagatgactcctcagctggtcttcaacctggcaatctcatggggagggagtcacatccataccaagagtttagtcaccacctgaagtgttagggacatcaggcaggagctacacatcctcccgacctccccagaactttccctcaacaggaattttttctatccctggaacaacttctttctgtgacctggagaaggacttagctctaagtagagaaactggtgta

SEQ ID NO: 336599 - DNA, 147 bp, Homo sapiens
tctccccacacccgccggagatgccacccttcaactgcaacgatgttctcactcatctcttgatctttcgtgacaaagcacacactgcttttcttgcttccaaatttttcataaccaactggcacaccctcgctcatcagtcaagag

SEQ ID NO: 336600 - DNA, 530 bp, Homo sapiens
tcagctgggtgtgtttgtgcacacctatagtcccagctactctggagacgaaggtggatcacttgagtctggaaggcagaggttgcagagagccaagatctggccactgcactccaccctgggcaacagagtgagaccctgtctctttaaaaaataaagaaaaggaaaaagctgcctttgtggacacctaaataaaaaataaaatgaacctaaaacctactgggtgcagtggctcagaggccggggtgagaggatgtttgtgcccaggtgttgatgaccagcctagacaatggtgggagaccccaaccctacaaaaaaaaaaaaaaattagctaagcatggtcctgtatgcctgccatcccaactacacgggacgctggggtgagggaggttgaggctactgtgagtcacgatctcaccactgcactccagcctgggagacaagcccatctgggcaacacagtgagactcaatcactaattgaacaaaatccaaaaattttaaaaaatcaataatgcggtccaggaatgg

SEQ ID NO: 336601 - DNA, 202 bp, Homo sapiens
ccaagtttataataacactttaacgtctaatctgcggattcagaaaacccacatggacccaaacagggcttgtagtgggaaccatttctcttcactctaagtcactcccaccattaaatggagattgaccttagggaattgggaaggaaactttcactgtttttcactcttttccatttatctggtagatgtaaccagaaaa

SEQ ID NO: 336602 - DNA, 210 bp, Homo sapiens
cttcatcccagtgcccagttctagcacatgggcaagccagtatccatatgacccctagctgatatcaggggaaaaacctaaatcagtatgccaggttaactgtattatagtaagattaaattcacccattaatcaataagtagtcactgactacttgttatgtgaccagcattgtgccaagtactacgaggctaaaagagatcccccgtt

SEQ ID NO: 336603 - DNA, 831 bp, Homo sapiens
aggttatagaggtggcataaatctggaggttctgcaaagtcttcccagaggtgaagtattcaggctgatctggaactctggctggataatggagaagagcaatctgggcactgttaccactgggcagaatgacatggcggccatgccctcttcataatctcttgttgtgatctatcactgggacagaaggaaggtaaaattctgagattttggaggaagaagttggcccatagaagaatcatccagttagaaccccaagatcattatttggggcatctaattattaatgtgggatgctttataaagtgtgtatgggggtcttgaaagataaagcctgtgcctctctcagtgaattcttaaattttcccttccttctgcattttgaatttgaaccaagaaaatggaacaacattgtatgtttccagtgaagataaaaacatctgttgaatatcttgagtctagaaaataacattgaaaatatagtggttgaggaccaattcctcatcctgaagtttacaatgtaatgaaaaaaaggaaatgtataattttaataaaaatgcatgcattgaaatgtgatggtgcagcaagaggctttagaaattcctgttgcagagatttatataagactgccacatcttactggagaatgatgaaataatgaagcagaaataatctgaagataatacctgagaatcaaaagggataaagtaatcacagtgcattattccactagttctaaatgttttcaaataaaaaaagattaaagacaggcttgagaggcatacaaatgatttcgacaaagccataaatttgaaaatatgctgagtaaag

SEQ ID NO: 336604 - DNA, 765 bp, Homo sapiens
aggttatagaggtggcataaatctggaggttctgcaaagtcttcccagaggtgaagtattcaggctgatctggaactctggctggataatggagaagagcaatctgggcactgttaccactgggcagaatgacatggcggccatgccctcttcataatctcttgttgtgatctatcactgggacagaaggaagatgaaaacatttacttcagactgtttactactgttcgattctatttttcctttgattttctcttctcagtcataagtggaaatggaagggattcattcaaaggtaaaattctgagattttggaggaagaagttggcccatagaagaatcatccagttagaaccccaagatcattatttggggcatctaattattaatgtgggatgctttataaagtgtgtatgggggtcttgaaagataaagcctgtgcctctctcagtgaattcttaaattttcccttccttctgcattttgaatttgaaccaagaaaatggaacaacattgtatgtttccagtgaagataaaaacatctgttgaatatcttgagtctagaaaataacattgaaaatatagtggttgaggaccaattcctcatcctgaagtttacaatgtaatgaaaaaaaggaaatgtataattttaataaaaatgcatgcattgaaatgtggtgagtatgaacatgtgcagataaaatttaaaataatatttatgagaatgtactagtttattgtaataaagaatgactcaatacatgc

SEQ ID NO: 336605 - DNA, 909 bp, Homo sapiens
aggttatagaggtggcataaatctggaggttctgcaaagtcttcccagaggtgaagtattcaggctgatctggaactctggctggataatggagaagagcaatctgggcactgttaccactgggcagaatgacatggcggccatgccctcttcataatctcttgttgtgatctatcactgggacagaaggaagccatcagaagtgcctggtttcatcaccaaattcagctttgggcatggctgtagatactgagattgcagtggtgaataagccaatcaaggcattgactctccccagtttccagcctggtagagggcaaaaatatcaagtaaatgaatgaaaacatttacttcagactgtttactactgttcgattctatttttcctttgattttctcttctcagtcataagtggaaatggaagggattcattcaaaggtaaaattctgagattttggaggaagaagttggcccatagaagaatcatccagttagaaccccaagatcattatttggggcatctaattattaatgtgggatgctttataaagtgtgtatgggggtcttgaaagataaagcctgtgcctctctcagtgaattcttaaattttcccttccttctgcattttgaatttgaaccaagaaaatggaacaacattgtatgtttccagtgaagataaaaacatctgttgaatatcttgagtctagaaaataacattgaaaatatagtggttgaggaccaattcctcatcctgaagtttacaatgtaatgaaaaaaaggaaatgtataattttaataaaaatgcatgcattgaaatgtggtgagtatgaacatgtgcagataaaatttaaaataatatttatgagaatgtactagtttattgtaataaagaatgactcaatacatgc

SEQ ID NO: 336606 - DNA, 311 bp, Homo sapiens
gagaatcgcttgaacccgggaagcagaggttgcagtgagctgagatcactccattgcactctagcctaggcaacaagaacaaaactccgtctcaaaaaaaaaactcttgaacaacatgatttgatgagcctctgggctggtgaacacatccaggtgctgggagagtgatgccccctacgcttctcttccatctggttgtttctgagctgtatcctttataataaaccataaacacaagtgaaatgcttctctgagttctgtgagccattctagcaaatgaacctgagcagggggttgtggggaccctccag

SEQ ID NO: 336607 - DNA, 258 bp, Homo sapiens
cttcatctgtacctcttcctcccttgctctgtggtcatctgtgaacttatctgtcctggtcctaagtccttcagcaagcacagccgaggggtactcacaaaaatggcatgttcatcctcaggtccttctagagtcctctcactgctctcctgtgtctgctctgtaaactttttttttttgtttgagacagggtcttgctctgtcacccaggctggagtgcactggcatgatcatagctcactgcatctcaacctcctg

SEQ ID NO: 336608 - DNA, 968 bp, Homo sapiens
aggtctgatggagatgtacaagacgactaatgttggttccctgcctgctaacacaacatccgttctgcagcccatgggtcaaagagtaatttcaactttcaagtcttattatttaagaagtgcatttcataaggctatagctgtcactgacagtgattccactgatggatctgggcaaaatatattgaaaaccttccagaaaggattcaccattcaagatgctctaggctgctctggtctgtaactttccattccaacagtaaaaaatctgggatctcctacttttcacctcagaaagctacaaatgtaaaaggaaaattaaatttgttttgagaggaaatcacttattcaaatagccatgttattctgttttgttcataatatcaacggctctataaataaagaactttaaagaaatagcaaattcacccagagaaagctctgcctgcaatatttttcaggtcatgtcacacaaagaaaaataacaatgcttgcacagcccactgagataaaatggacaaggatgttcagtggtggaggtgatggctcaagggacttaggaatctgtctggaatgctgagagaccaacacgtccactaacctacagctattcacaccatcagggaagtgctggactaaagtaacaaggctctaacaactccagggatttctagaattgtgtatcatatactattcctaaaatataaaaagtaacattaaggtctgaggttaaaaaaaaaagagaatcacaatacatatcaattgctaagcagtgtaaagggttcacttttgcagtggtctagaactaaacccacaataccttttaggtagcctgtatactaaaaaccatcaaactgtcctctttaaacggatataaattataactcaataaagcacactgaaagcgcacccgtcaatatactgacacattaaatgaaataagagttgatagtattattactataagt

SEQ ID NO: 336609 - DNA, 946 bp, Homo sapiens
aggtctgatggagatgtacaagacgactaatgttggttccctgcctgctaacacaacatccgttctgcagcccatgggtcaaagagtaatttcaactttcaagtcttattatttaagaagtgcatttcataaggctatagctgtcactgacagtgattccactgatggatctgggcaaaatatattgaaaaccttccagaaaggattcaccattcaagatgctctaggctgctctggtctgtaactttccattccaacagtaaaaaatctgggatctcctacttttcacctcagaaagctacaaatgtaaaaggaaaattaaatttgttttgagaggaaatcacttattcaaatagccatgttattctgttttgttcataatatcaacggctctataaataaagaactttaaagaaatagcaaattcacccagagaaagctctgcctgcaatatttttcaggtcatgtcacacaaagaaaaataacaatgcttgcacagcccactgagataaaatggacaaggatgttcagtggtggaggtgatggctcaagggacttaggaatctgtctggaatgctgagagaccaacacgtccactaacctacagctattcacaccatcagggaagtgctggactaaagtaacaaggctctaacaactccagggatttctagaattgtgtatcatatactattcctaaaatataaaaagtaacattaaggtctgaggttaaaaaaaaaagagaatcacaatacatatcaattgctaagcagtgtaaagggttcacttttgcagtggtctagaactaaacccacaataccttttaggtagcctgtatactaaaaaccatcaaactgtcctctttaaacggatataaattataactcaataaagcaagatgcggccggaaaacacacacccccgcaaatgaatacaccacccaacg

SEQ ID NO: 336610 - DNA, 961 bp, Homo sapiens
  misc_feature (914)..(914): n is a, c, g, or t
  misc_feature (923)..(923): n is a, c, g, or t
  misc_feature (925)..(925): n is a, c, g, or t
  misc_feature (948)..(948): n is a, c, g, or t
aggtctgatggagatgtacaagacgactaatgttggttccctgcctgctaacacaacatccgttctgcagcccatgggtcaaagagtaatttcaactttcaagtcttattatttaagaagtgcatttcataaggctatagctgtcactgacagtgattccactgatggatctgggcaaaatatattgaaaaccttccagaaaggattcaccattcaagatgctctaggctgctctggtctgtaactttccattccaacagtaaaaaatctgggatctcctacttttcacctcagaaagctacaaatgtaaaaggaaaattaaatttgttttgagaggaaatcacttattcaaatagccatgttattctgttttgttcataatatcaacggctctataaataaagaactttaaagaaatagcaaattcacccagagaaagctctgcctgcaatatttttcaggtcatgtcacacaaagaaaaataacaatgcttgcacagcccactgagataaaatggacaaggatgttcagtggtggaggtgatggctcaagggacttaggaatctgtctggaatgctgagagaccaacacgtccactaacctacagctattcacaccatcagggaagtgctggactaaagtaacaaggctctaacaactccagggatttctagaattgtgtatcatatactattcctaaaatataaaaagtaacattaaggtctgaggttaaaaaaaaaagagaatcacaatacatatcaattgctaagcagtgtaaagggttcacttttgcagtggtctagaactaaacccacaataccttttaggtagcctgtatactaaaaaccatcaaactgtcctctttaaacggatataaattataactcaataaagccgatgcgtccgaatttttntttttttancnttttttttttttttttttttttnttttctttttttt

SEQ ID NO: 336611 - DNA, 308 bp, Homo sapiens
tctgcaagtttagcaattacaatttaatttattaaactgataagatttaggccacaatggttctataaacaaaaagatcatgaacagtaagttgttaatcctgaaacccccaagaaacaataaatgcttctacttgaattaaacttaaaatcattattgaatgtttcaaatcccatggtacacagagacagcaaattacacagatacagatctttccccttcttccgagtgggtgaaagataatttctgtgtgtttaaaatgtatggggaaaaaaggaaacatttagaaattaccttcttgtaataat

SEQ ID NO: 336612 - DNA, 587 bp, Homo sapiens
tctgatgtggtttgaatgtcttgtgtgtctcattacaggatttttttttctttaagggaagagatgaacttattatgacttagaatttatctgggatggggttttccaagtgtctgtcatttgtattttgcttttaggatttttatcacatctgtgtgcccacatcatcacataatattccagctcctcttttccatgttttttttgtgtgctctcagcatttggtgttactaagattttgtttgttaaatacactgagtgacaaagtatccaaagccagacacagtatttccaattcccattaactcaaaaaacagttattgaatgcttttgtcataggacacacagctgcccacatgttgattttaccacctgcccctcaattaatgcacaccatgcagtgtcgttgaaaaaataaggcatttggaatctcttctactactaattaccagataatcgtgtacattcatgtatacacaggcaagcctgactatgcaccagagccatgtacacctgatactaggtacctgataccatgtaccagacccagtacactcaacccttaaagcaagattctcttgcccaca

SEQ ID NO: 336613 - DNA, 381 bp, Homo sapiens
tctgatgtggtttgaatgtcttgtgtgtctcattacaggatttttttttctttaagggaagagatgaacttattatgacttagaatttatctgggatggggttttccaagtgtctgtcatttgtattttgcttttaggatttttatcacatctgtgtgcccacatcatcacataatattccagctcctcttttccatgttttttttgtgtgctctcagcatttggtgttactaagattttgtttgttaaatacactgagtgacaaagtatccaaagccacggtcaacccacaagccacggtcaacccacaagccacggtcaacccacaagccacggtcaacccacaagccacggtcaacccacaagccacggtcaacccac

SEQ ID NO: 336614 - DNA, 150 bp, Homo sapiens
cagatctctgttttgtttatactttattttgagtcagttgttggttgccagatactaactggtttctctctccccactgttctgctctcctctttcctttgttctgcggtggcaactctgttgttggtggggggcttggctcatgcgcgc

SEQ ID NO: 336615 - DNA, 404 bp, Homo sapiens
aataaaagttctatggacaaaaataatagaaaaagtgacaaagtgaaagggttgagattttaagtaggttggttaggaaagtcactgagtaggtaattgaatgtgaaagtgtacagacaattttgtaaaggcatacaaagaaaacggggcaggagttggagggagaagtagagccaaaatgtgtgtttgtttttagaaagggaaaataacaacatttgcagactaatgtgaatgattatctgtagaaaatataaaaccgatgatgcaggagaagggaggataattgttagagtaagatctttgagtaggtataaggaaatacactgtaaactggagcagagctggccttggataaaagatggacaatcaaggccaggtgcggtggctcatgcctgtaatcgcag

SEQ ID NO: 336616 - DNA, 3431 bp, Homo sapiens
  misc_feature (52)..(52): n is a, c, g, or t
gagcttgtctggccgcctcgcctcggagccactgcactgctggctgcagacncaggctgcaccatgaagccagccctcctgccctgggccctgctgctgctggcgacagccctcggcccgggccccggacccacagcagatgcccaagagagctgctccatgcgctgtggcgccctggacgggccatgttcctgccacccgacgtgctctggccttggcacctgctgcttggatttccgggacttctgcctggagatattgccctactcaggatccatgatgggcggcaaggactttgtggtgcggcacttcaagatgtccagccccacagacgccagtgtgatctgcaggtttaaggacagcatccagaccctcggccatgtggactcctccgggcaagtgcactgtgtgtcacctctgctctatgagagcggccgcatccccttcactgtgtcactggacaacggccactccttccctcgtgcgggcacctggctggctgtgcaccccaacaaagtgtcaatgatggagaagagcgagttggtgaacgagacgcgttggcaatactacggcaccgccaacacctcaggcaacctcagcctgacctggcatgtcaagtcgctgcccacgcagaccatcaccatcgaactgtggggctacgaggagacaggaatgccctactcacaggagtggactgcaaagtggtcgtacctgtaccccctggccacacacatccccaactccggctctttcactttcaccccaaaacctgctcctcccagctaccagagatggcgagtgggtgcacttcggatcatcgacagcaaaaattacgcagggcagaaggacgtgcaggcgctctggaccaacgaccacgcactggcctggcacctgagcgatgacttccgagaggaccctgtggcctgggcacgaactcagtgccaggcctgggaggagctggaggatcagctgcccaacttcctggaggagctgccggactgcccctgcaccctgacccaggcccgggctgactccggccgcttcttcacggactacggctgtgacatggagcagggcagcgtgtgcacctaccaccccggggccgtgcactgtgtgcgttctgtgcaggccagcctccggtacggctcaggtcagcagtgctgctacacagcggacgggacgcagctcctgacagctgactccagcggcggcagcactcccgaccgcggccatgactggggcgcacccccgttccgcacgccaccccgagtgcccagcatgtcccactggctctacgatgtcctcagcttctattactgctgcctctgggcacccgactgcccccgctacatgcaacggcggccctccaatgactgccgcaactaccggcccccaagactggcctccgccttcggagacccacactttgtgaccttcgacggcaccaacttcacattcaatgggcgcggagagtacgtgctgctggaggcagcgctgaccgacctgagggtgcaggcgcgggcccagcccgggacgatgtccaacggcacggagacccgtggcactgggctgaccgcagtggccgtccaggagggcaactcagatgtggtggaagtcaggctggccaacaggaccggaggtctggaggtgctgctgaaccaggaggtgctgagcttcaccgagcagagctggatggacctgaaaggaatgttcctgtcggtggctgccggggacagggtctccatcatgctggcatcaggggccggcctggaggtcagcgtgcagggcccgttcctgagtgtgtccgtcctgctgcctgagaagttcctcacccacacccacggcctcctcgggacactcaacaacgaccccaccgacgacttcaccctgcacagcgggcgcgtcctgcccccaggcaccagtccccaggagctgttcctgtttggggccaactggaccgtgcacaatgcgtcctccctgctcacctacgattcctggttcctggtccacaacttcctgtaccaacccaagcacgaccccaccttcgagcccctcttccccagtgagaccaccctcaaccccagcctggcacaagaggcagccaaactatgtggggacgatcatttctgcaactttgatgtggcagccactgggagcctgagcacgggcactgccactcgggtggcccaccagctgcaccagcgtcgcatgcagagcctgcagccagtggtgtcctgtggctggctggccccacctcccaacggacaaaaggagggcaacaggtacctggcgggttccaccatctacttccactgtgacaacggctacagcctggccggggcagagaccagcacctgccaggctgacggcacctggtcctcacccaccccgaagtgccagccaggacgcagctacgcggtgctgttgggcatcatctttgggggcctcgcggtggtggcggcggttgcgctcgtctatgtgctgctgcgccgcaggaagggcaacacgcacgtctggggtgcacagccctgatgggagcagcttggctgtgagcaccaggccaagactcctgagaacaggcagcccagtcctgcgactcccgcatccccaggaccagacacctgggacctggatacttgatacctgggcatttaaccccctactctgtcatctcagaccccaggcaggaggcccagtgttccaacacccaagccccgtgctagcagcgctccgtgctcttccccaaatactcacggctctaattccccaaacctgaaacttcataccctgggattctaatacctatgtcctgagccctgacactcccacacctgagcctcagattccaatagctcactccctagagcctgacgccggggcccctgacccctgagcctcagattccaatacctcactccccagagcctgatgccggggcccctgacccctgatctacggaggcctgctcccggaccgtgcgggcaccagtgcagtgctgccttggttcctggacccctgggcccatcctgggaccccagatggggtaaggagaggccccagaaccccaaagcagacagcgagacccccagcggcagaggcctccctcggcactccaggcttataatttcgaactcttctggaaggtcactcaggaacaccctccctgcctgtgcaaagagaaaacaagcgccttgtttccttccaagaaaaaaaaaaaaaaaaaaaaaaaaaaaaaaaaaaaaaaaaaaaaaaaaaagaccacaaacaagaagacaacaacggcggcggccgccgcgccgtacagaaaagggctcaccccgcacggaggggggcgcacccaggatcttaaccgccgctgcaccacggtgatgctctgtgtgacgcaacagaagcgggcgcccaaacaataagaggcgagcgccagcaattac

SEQ ID NO: 336617 - DNA, 1929 bp, Homo sapiens
gctgttctagaggatcccatctcaggccaggacgatgtccaacggcacggagacccgtggcactgggctgaccgcagtggccgtccaggagggcaactcagatgtggtggaagtcaggctggccaacaggaccggaggtctggaggtgctgctgaaccaggaggtgctgagcttcaccgagcagagctggatggacctgaaaggaatgttcctgtcggtggctgccggggacagggtctccatcatgctggcatcaggggccggcctggaggtcagcgtgcagggcccgttcctgagtgtgtccgtcctgctgcctgagaagttcctcacccacacccacggcctcctcgggacactcaacaacgaccccaccgacgacttcaccctgcacagcgggcgcgtcctgcccccaggcaccagtccccaggagctgttcctgtttggggccaactggaccgtgcacaatgcgtcctccctgctcacctacgattcctggttcctggtccacaacttcctgtaccaacccaagcacgaccccaccttcgagcccctcttccccagtgagaccaccctcaaccccagcctggcacaagaggcagccaaactatgtggggacgatcatttctgcaactttgatgtggcagccactgggagcctgagcacgggcactgccactcgggtggcccaccagctgcaccagcgtcgcatgcagagcctgcagccagtggtgtcctgtggctggctggccccacctcccaacggacaaaaggagggcaacaggtacctggcgggttccaccatctacttccactgtgacaacggctacagcctggccggggcagagaccagcacctgccaggctgacggcacctggtcctcacccaccccgaagtgccagccaggacgcagctacgcggtgctgttgggcatcatctttgggggcctcgcggtggtggcggcggttgcgctcgtctatgtgctgctgcgccgcaggaagggcaacacgcacgtctggggtgcacagccctgatgggagcagcttggctgtgagcaccaggccaagactcctgagaacaggcagcccagtcctgcgactcccgcatccccaggaccagacacctgggacctggatacttgatacctgggcatttaaccccctactctgtcatctcagaccccaggcaggaggcccagtgttccaacacccaagccccgtgctagcagcgctccgtgctcttccccaaatactcacggctctaattccccaaacctgaaacttcataccctgggattctaatacctatgtcctgagccctgacactcccacacctgagcctcagattccaatagctcactccctagagcctgacgccggggcccctgacccctgagcctcagattccaatacctcactccccagagcctgatgccggggcccctgacccctgatctacggaggcctgctcccggaccgtgcgggcaccagtgcagtgctgccttggttcctggacccctgggcccatcctgggaccccagatggggtaaggagaggccccagaaccccaaagcagacagcgagacccccagcggcagaggcctccctcggcactccaggcttataatttcgaactcttctggaaggtcactcaggaacaccctccctgcctgtgcaaagagaaaacaagcgccttgtttccttccaagaaaaaaaaaaaaaaaaaaaaaaaaaaaaaaaaaaaaaaaaaaaaaaaaaagaccacaaacaagaagacaacaacggcggcggccgccgcgccgtacagaaaagggctcaccccgcacggaggggggcgcacccaggatcttaaccgccgctgcaccacggtgatgctctgtgtgacgcaacagaagcgggcgcccaaacaataagaggcgagcgccagcaattac

SEQ ID NO: 336618 - DNA, 265 bp, Homo sapiens
cccttcccctgcaggtgccctcacccacagcccctgggtgccgaccaccctgtcctggggctgcgggaggggacaagatgctcacagcgggtgaccctaatgcatcccccttgagcccaggaatgttcctgtcggtggctgccggggacagggtctccatcatgctggcatcaggggccggcctggaggtcagcgtgcagggcccgttcctgagtgtgtccgtcctgctgcctgagaagttcctcacccacacccacggcctcct

SEQ ID NO: 336619 - DNA, 2937 bp, Homo sapiens
  misc_feature (52)..(52): n is a, c, g, or t
gagcttgtctggccgcctcgcctcggagccactgcactgctggctgcagacncaggctgcaccatgaagccagccctcctgccctgggccctgctgctgctggcgacagccctcggcccgggccccggacccacagcagatgcccaagagagctgctccatgcgctgtggcgccctggacgggccatgttcctgccacccgacgtgctctggccttggcacctgctgcttggatttccgggacttctgcctggagatattgccctactcaggatccatgatgggcggcaaggactttgtggtgcggcacttcaagatgtccagccccacagacgccagtgtgatctgcaggtttaaggacagcatccagaccctcggccatgtggactcctccgggcaagtgcactgtgtgtcacctctgctctatgagagcggccgcatccccttcactgtgtcactggacaacggccactccttccctcgtgcgggcacctggctggctgtgcaccccaacaaagtgtcaatgatggagaagagcgagttggtgaacgagacgcgttggcaatactacggcaccgccaacacctcaggcaacctcagcctgacctggcatgtcaagtcgctgcccacgcagaccatcaccatcgaactgtggggctacgaggagacaggaatgccctactcacaggagtggactgcaaagtggtcgtacctgtaccccctggccacacacatccccaactccggctctttcactttcaccccaaaacctgctcctcccagctaccagagatggcgagtgggtgcacttcggatcatcgacagcaaaaattacgcagggcagaaggacgtgcaggcgctctggaccaacgaccacgcactggcctggcacctgagcgatgacttccgagaggaccctgtggcctgggcacgaactcagtgccaggcctgggaggagctggaggatcagctgcccaacttcctggaggagctgccggactgcccctgcaccctgacccaggcccgggctgactccggccgcttcttcacggactacggctgtgacatggagcagggcagcgtgtgcacctaccaccccggggccgtgcactgtgtgcgttctgtgcaggccagcctccggtacggctcaggtcagcagtgctgctacacagcggacgggacgcagctcctgacagctgactccagcggcggcagcactcccgaccgcggccatgactggggcgcacccccgttccgcacgccaccccgagtgcccagcatgtcccactggctctacgatgtcctcagcttctattactgctgcctctgggcacccgactgcccccgctacatgcaacggcggccctccaatgactgccgcaactaccggcccccaagactggcctccgccttcggagacccacactttgtgaccttcgacggcaccaacttcacattcaatgggcgcggagagtacgtgctgctggaggcagcgctgaccgacctgagggtgcaggcgcgggcccagcccgggacgatgtccaacggcacggagacccgtggcactgggctgaccgcagtggccgtccaggagggcaactcagatgtggtggaagtcaggctggccaacaggaccggaggtctggaggtgctgctgaaccaggaggtgctgagcttcaccgagcagagctggatggacctgaaaggaatgttcctgtcggtggctgccggggacagggtctccatcatgctggcatcaggggccggcctggaggtcagcgtgcagggcccgttcctgagtgtgtccgtcctgctgcctgagaagttcctcacccacacccacggcctcctcgggacactcaacaacgaccccaccgacgacttcaccctgcacagcgggcgcgtcctgcccccaggcaccagtccccaggagctgttcctgtttggggccaactggaccgtgcacaatgcgtcctccctgctcacctacgattcctggttcctggtccacaacttcctgtaccaacccaagcacgaccccaccttcgagcccctcttccccagtgagaccaccctcaaccccagcctggcacaagaggcagccaaactatgtggggacgatcatttctgcaactttgatgtggcagccactgggagcctgagcacgggcactgccactcgggtggcccaccagctgcaccagcgtcgcatgcagagcctgcagccagtggtgtcctgtggctggctggccccacctcccaacggacaaaaggagggcaacaggtacctggcgggttccaccatctacttccactgtgacaacggctacagcctggccggggcagagaccagcacctgccaggctgacggcacctggtcctcacccaccccgaagtgccagccaggacgcagctacgcggtgctgttgggcatcatctttgggggcctcgcggtggtggcggcggttgcgctcgtctatgtgctgctgcgccgcaggaagggcaacacgcacgtctggggtgcacagccctgatgggagcagcttggctgtgagcaccaggccaagactcctgagaacaggcagcccagtcctgcgactcccgcatccccaggaccagacacctgggacctggatacttgatacctgggcatttaaccccctaaccctccctgcctgtgcaaagagaaaacaagcgccttgtttccttccaagaaaaaaaaaaaaaaaaaaaaaaaaaaaaaaaaaaaaaaaaaaaaaaaaaagaccacaaacaagaagacaacaacggcggcggccgccgcgccgtacagaaaagggctcaccccgcacggaggggggcgcacccaggatcttaaccgccgctgcaccacggtgatgctctgtgtgacgcaacagaagcgggcgcccaaacaataagaggcgagcgccagcaattac

SEQ ID NO: 336620 - DNA, 2028 bp, Homo sapiens
  misc_feature (52)..(52): n is a, c, g, or t
gagcttgtctggccgcctcgcctcggagccactgcactgctggctgcagacncaggctgcaccatgaagccagccctcctgccctgggccctgctgctgctggcgacagccctcggcccgggccccggacccacagcagatgcccaagagagctgctccatgcgctgtggcgccctggacgggccatgttcctgccacccgacgtgctctggccttggcacctgctgcttggatttccgggacttctgcctggagatattgccctactcaggatccatgatgggcggcaaggactttgtggtgcggcacttcaagatgtccagccccacagacgccagtgtgatctgcaggtttaaggacagcatccagaccctcggccatgtggactcctccgggcaagtgcactgtgtgtcacctctgctctatgagagcggccgcatccccttcactgtgtcactggacaacggccactccttccctcgtgcgggcacctggctggctgtgcaccccaacaaagtgtcaatgatggagaagagcgagttggtgaacgagacgcgttggcaatactacggcaccgccaacacctcaggcaacctcagcctgacctggcatgtcaagtcgctgcccacgcagaccatcaccatcgaactgtggggctacgaggagacaggaatgccctactcacaggagtggactgcaaagtggtcgtacctgtaccccctggccacacacatccccaactccggctctttcactttcaccccaaaacctgctcctcccagctaccagagatggcgagtgggtgcacttcggatcatcgacagcaaaaattacgcagggcagaaggacgtgcaggcgctctggaccaacgaccacgcactggcctggcacctgagcgatgacttccgagaggaccctgtggcctgggcacgaactcagtgccaggcctgggaggagctggaggatcagctgcccaacttcctggaggagctgccggactgcccctgcaccctgacccaggcccgggctgactccggccgcttcttcacggactacggctgtgacatggagcagggcagcgtgtgcacctaccaccccggggccgtgcactgtgtgcgttctgtgcaggccagcctccggtacggctcaggtcagcagtgctgctacacagcggacgggacgcagctcctgacagctgactccagcggcggcagcactcccgaccgcggccatgactggggcgcacccccgttccgcacgccaccccgagtgcccagcatgtcccactggctctacgatgtcctcagcttctattactgctgcctctgggcacccgactgcccccgctacatgcaacggcggccctccaatgactgccgcaactaccggcccccaagactggcctccgccttcggagacccacactttgtgaccttcgacggcaccaacttcacattcaatgggcgcggagagtacgtgctgctggaggcagcgctgaccgacctgagggtgcaggcgcgggcccagcccgggacgatgtccaacggcacggagacccgtggcactgggctgaccgcagtggccgtccaggagggcaactcagatgtggtggaagtcaggctggccaacaggaccggaggtctggaggtgctgctgaaccaggaggtgctgagcttcaccgagcagagctggatggacctgaaaggaatgttcctgtcggtggctgccggggacagggtctccatcatgctggcatcaggggccggcctggaggtcagcgtgcagggcccgttcctgagtgtgtccgtcctgctgcctgagaagttcctcacccacacccacggcctcctcgggacactcaacaacgaccccaccgacgacttcaccctgcacagcgggcgcgtcctgcccccaggcaccagtccccaggagctgttcctgtttggggccaactggaccgtgcacatgcgtcctcctgctcacctacgattcctcgtcctgcctgagatgggatcctctagatcaccc

SEQ ID NO: 336621 - DNA, 92 bp, Homo sapiens
atgtgtgtatacaaatattggacaaaaagttgacatccgtcatacgcaaagttcccatcaatcaatattaaaaacaaacaagtcaatagaaa

SEQ ID NO: 336622 - DNA, 427 bp, Homo sapiens
gcattcaacattccatcctgtttcatcacgatcctacaacatattatctccccattttatagatgagaaaattgaagttcacagaggccaaccctcttaatacgtagaagagcagcgtacaagctccactctatgactccagagcctgataacctaactactatgcttcctggcttagcacttgctgggactttccacagaagactatcattccctgaactcagtgctggaaaatcaattgtgtgacccatttcaccaagccatggactcgcagagctttgtttctgtcccatttgactgagcaatgcttatgctggattgcaaaggtggaacacactccctggttcctcagaatagccactcctctttgctccaacaacattggctcttttgctgctggactagcccagcaaatgtgtcgatgaga

SEQ ID NO: 336623 - DNA, 1494 bp, Homo sapiens
ccttcccctgttctgtgctggaatcactgccaggtgctcctgggagggtccacgggatgatacccagcctgcctcttctactccacccaccctccaggcctagcatgtcttctcttgaggcctcggtttctacctctgtaaaataaagaaacctaaattcaactctatattctgactttcttaaatatttggcttgatttccccccaacaactgtgtacctcatcagctggggctgagaaactgcagcacaaggccaggatacagaaggagttcagcccaaactcatggcagtttgggcctcccttggctccttctttcttggaggacccagaacctagtgaaagggacccaagtcacccccaaggcctcggctaaaagtgccctcccctgccctcagccagtcctttattccatttcgtaaaggaaacctatcagctactccttttggctctgaacgtgacgccagggccaggccttcttttgctgttgtaattagcagagctaattgcatctgtcaggctgtgtgctgggcaagcccttggcaatttccaggatgtgggctgctgtgacactgcaggagccccaccctcctacccagaggacgcctggtttgggaagggatggttctcagacataagcgggcattagaatgacctagagggcttgttgagacacagatactgggcccagccctggcatttctgatcagcgggtttcaggttgcctgtgaaaatttgcatttgtaacaagttgccaggtggcactgttgctgctaagcacgttgagaaccactgtcccagagggaataccaggtggccaagaaatgggtcctgggcacccctgctgcttaaggctgtggtcagtcaaccctcagtgggagtagatgggcagtggggcaaaagcggtgtgatgaacaggttgtggggccggacacatgctcctactgttcctggttggttgtagtaattctgtctggaaggagaggaggaggtgaaggtggagccaaggagttgcacactgacatctccccaacaggtgagggcagggagagctccagacagggagaggccttcagagaacaggaaggaagctccctccctcctctgcattttgcagcctgtagctcacgtgccttttatgccccacatctcattctgtctggggactccatacgtagtggctgtctaccttcccgcgtggattgtaatgcttttgctaccaggggtcaggccatactcatcactgcaggccctgaagcatccatcatgttcctcgagctcagtatgtgctccgtacatgtagcacagtggaaaaacttgagctttgctggcaaagacagacagaatgagcttgaatctcagcccagctatggcttttctagtcctgtggctagaaaatgacttagcctcttggactttggttaacccatctgcaaaacagggatggcacccacctcttagaaagttacagtggtcaaaaaaaaaaaaaaaaaa

SEQ ID NO: 336624 - DNA, 548 bp, Homo sapiens
cgtggctatccagtcagttcgctgctattcccatgggtcacaggagacagatgaggagtttgatgctcgctgggtaacatacttcaacaagccagatatagatgcctgggaattgcgtaaagggataaacacacttgttacctatgatatggttccagagcccaaaatcattgatgctgctttgcgggcatgcagacggttaaatgattttgctagtacagttcgtatcctagaggttgttaaggacaaagcaggacctcataaggaaatctacccctatgtcatccaggaacttagaccaactttaaatgaactgggaatctccactccggaggaactgggccttgacaaagtgtaaaccgcatggatgggcttccccaaggatttattgacattgctacttgagtgtgaacagttacctggaaatactgatgataacatattaccttatttgaacaagttttcctttattgagtaccaagccatgtaatggtaacttggactttaataaaagggaaatgagtttgaactgaaaaaaaaaaaacaaa

SEQ ID NO: 336625 - DNA, 243 bp, Homo sapiens
aaacatttttaaaatgttgctttcttaaaaatagtctttcgttaccatcagagtaacatgcacgttaataaaaagtttctttgtggttgtaggttcttcctaacctatacatatattcttctcccccatgtgataaatggggtatgctgatgactctgtagtctgtcagtttttttccccttgtgagctattgccacacagcattcacagactcaaaccagaattgcttatacgcttactgca

SEQ ID NO: 336626 - DNA, 775 bp, Homo sapiens
taacttgtggaatttcttggcacacactttcattgagtctgcggctgaacgggcttgctgggcgctcccaggagttcagcttcgagggcagccacatgtccgcatgttaggactcagagcacgcgaccgactggaccccacggccgtgaacatcctgcagcagatcattgagctgggcgccgagacccatgacgccactgcccttgcctcggtggttgccatggcaccagggacggtgactgtggttaagcaggtcaccgaggaggagcccagctccaaccacacggtcatgatccaggagacggtccagcaagcgtccgtggagcttgccgagcagcaccacctggtggtgtcctccgacgacgtggagggcattgagacggtgactgtctacacgcagggcggggaggcctcggagttcatcgtctacgtgcaggaggccatgcagcctgtggaggagcaggctgtggagcagccggcccaggaactctagaggacatgtggcatcggatggccacagggcggggctgccaggctctgcaggcacccagggtggggaggccacccttcctgccctacccgcagaatggtgctctcctttgccctccctgcccagcagcctgataggactctcctagtccaacttggggtgggcaaggcagtcagcatcaccagcaacaccacaggaccctcaccaggatgaaaaacccctgacctaacatctgttctggagatccggtggtccctaaaaccaacttacctgttaattaaggac

SEQ ID NO: 336627 - DNA, 4699 bp, Homo sapiens
ggcacgaggggagtctgagaagaaagggtgtagatggagaggcggtggcctcacctctgcatgctccgtgggaagcggcggaggcgcccagcatccctcctactctgcccttggtggaggtttacgagaaaacacggccatctttatgtgtaaatgttgtaacctcttctcaccaaatcagtcggaactcctctcccacgtttcagagaagcacatggaagaaggggttaatgttgatgagattattattccccttaggcctctgagtacacctgaaccccccaactcaagcaaaaccagagatgagtttttggtcatgaagaggaagagaggcaggcctaaggggtccacgaagaagtccagcacagaagaggagctggcagaaaacatcgtgagtccgactgaggacagcccgctggctccggaggaagggaacagcctgcctccaagcagcttggagtgtagcaagtgctgtcggaagttctccaacacgcgccagctgcggaagcacatctgcattatcgtgctgaatttgggtgaggaggaaggagaagcaggtaacgagtctgaccttgaactagaaaagaagtgtaaggaagatgatcgggaaaaagcctcgaaaagaccacggtcacagaaaacagagaaagtccagaagatctcaggaaaggaggccagacagctttctggggcgaagaaacccatcataagtgtggttttaactgcacacgaagcaattccaggtgctaccaagattgtgccagtggaggctgggccccctgaaacaggagctacaaattctgagaccacttcagcagacctggtgcctcggagaggctaccaggaatacgccattcagcagacaccttatgagcaaccaatgaagtcaagcaggctaggtcccactcagctcaaaatcttcacttgtgaatactgcaacaaggtcttcaagttcaagcactcgctgcaggcccacctgaggatccacaccaatgaaaagccatacaagtgcccccagtgcagctatgccagtgccatcaaggccaacctcaatgtgcacctgcgcaagcacactggagagaagttcgcctgcgactattgctcgttcacctgcctgagcaagggccacctcaaggtgcacatcgagcgagtgcacaagaagatcaagcagcactgccgcttctgcaagaagaagtactctgacgtcaagaacctcatcaagcacatccgagacgcgcatgacccacaggacaagaaggtcaaagaggccttggacgagctctgcctgatgacgagggagggcaagcggcagctgctctatgactgccacatctgtgagcgcaagttcaagaacgagctggaccgtgaccgccatatgctggtccacggagacaagtggccttttgcctgtgagctctgtggccatggggccaccaagtaccaggcgctggaactgcatgtcaggaagcaccccttcgtgtacgtctgtgccgtctgccgcaagaagttcgtcagctccatcaggctgcgcacccacatcaaagaggtgcacggggctgcccaggaggccttggtcttcaccagttccatcaaccagagcttctgcctcctggaacctggtggggacatccagcaagaagctctgggggaccagctacagctggtggaagaggagtttgccctccagggcgtgaatgcactcaaggaagaggcctgtcctggggacactcagctggaggagggccggaaggagccggaggcccctggggaaatgcctgccccagctgtgcacctggcctccccgcaggccgaaagcacagccctgccaccctgtgagctggaaaccaccgtggtctcctcctcagacctgcattctcaagaggtggtttcagatgattttttgttgaaaaatgatacctcctccgcagaggctcatgctgctcctgagaagcccccagacatgcagcacagaagctcagtccagacgcaaggtgaagtgatcacactactgctgtccaaggcccagagtgctgggtcagatcaggaaagccatggcgcccagagccccctaggggaagggcagaacatggctgtgctttcagctggtgacccagatcccagcaggtgtctcaggtcaaacccagctgaggcctcagacctcctccctccagtagctggtggtggggacaccatcacacatcagcctgactcttgcaaagctgcccctgagcaccggtcaggcatcaccgctttcatgaaggtcctgaacagtttacagaagaagcaaatgaacaccagcttgtgtgagcggatccggaaggtttatggagacctggagtgtgaatactgtggcaaacttttttggtaccaagtgcattttgatatgcatgtccgcacccacacccgggaacatctgtattattgctctcagtgtcattattcttccatcaccaaaaactgccttaaacgccacgtaattcagaaacacagtaacatcttgctgaagtgtcccaccgatggctgtgactactcaactccagataaatataagctacaggcacatcttaaagttcacacagcactggacaaaaggagttattcttgtcctgtttgtgaaaagtctttttcagaggatcgattgataaagtcacatatcaagaccaaccatcctgaggtctccatgagcaccatttctgaggttctcgggaggagggttcagctgaaagggctaattggaaagagagccatgaaatgcccatattgtgacttttatttcatgaagaatggctcagaccttcagcgtcatatttgggctcatgaaggtgtgaagcccttcaagtgttctttgtgtgagtatgcaactcgtagcaagagtaacctcaaggctcatatgaatcgtcacagcactgagaaaacccacctatgtgacatgtgtggcaagaaattcaaatcaaaagggacactgaaaagtcacaaactccttcacactgcagatgggaagcagtttaagtgcacggtgtgtgactacacagcggcccagaagccacagctgctgcggcacatggaacagcatgtctccttcaagaagcgtagcattgctctgtaatttggaaaccaagtcaaagatgtgtaagaggatgcagacagaagaaaaggcacgatctttgcataaaagcactggagtgatttagaggaaggcttgcaggctttagggacacgtatttttgctttcagatcctggattgctgcagcctttccgctgtgcccattgccattactcctgcaacatatctggctctctgaagcggcactacaacaggaagcaccctaatgaggagtatgccaacgtgggcaccggggagctggcagcggaggtgctcatccagcaaggtggtttgaagtgtcctgtttgcagctttgtatatggcaccaaatgggagttcaataggcacttgaagaacaaacatggcttgaaggtggtggaaattgatggagaccccaagtgggagacagcaacagaagctcctgaggagccctccacccagtatctccacatcacagaggccgaagaagacgttcaagggacacaggcagcggtggccgcgctccaggacctgagatacacctctgagagtggcgaccgactggaccccacggccgtgaacatcctgcagcagatcattgagctgggcgccgagacccatgacgccactgcccttgcctcggtggttgccatggcaccagggacggtgactgtggttaagcaggtcaccgaggaggagcccagctccaaccacacggtcatgatccaggagacggtccagcaagcgtccgtggagcttgccgagcagcaccacctggtggtgtcctccgacgacgtggagggcattgagacggtgactgtctacacgcagggcggggaggcctcggagttcatcgtctacgtgcaggaggccatgcagcctgtggaggagcaggctgtggagcagccggcccaggaactctagaggacatgtggcatcggatggccacagggcggggctgccaggctctgcaggcacccagggtggggaggccacccttcctgccctacccgcagaatggtgctctcctttgccctccctgcccagcagcctgataggactctcctagtccaacttggggtgggcaaggcagtcagcatcaccagcaacaccacaggaccctcaccccagcatagacacacaccccctgacccttaccatctgcttcctgaaagacttcagtgtcagctcccctacacacaccccacaccttcaccccttgcttcaagattcaaacagagactcccagtccccctcagcatcttccctgaatcacagccccagctccttgacccccatctaggtgccaaatgttcatctgcaaccgctatgcagtctggtgagagggagacagccatcacatagaaagtgaccgtacgggtttttaatcactgctgggtggggtgggggtagggggattgtcctggctttgtcgacaaagtcccacttccccgagtattaagggcccttggtatcaagtgaggtaaattcacccatcacagggtctcgccctaccatcctggaattatttcacttttaagataaatgcactatttcactgttcgcctcccattctaaggaggtgaggtggttggaataaaaacagttcctgtctg

SEQ ID NO: 336628 - DNA, 4666 bp, Homo sapiens
ggcacgaggggagtctgagaagaaagggtgtagatggagaggcggtggcctcacctctgcatgctccgtgggaagcggcggaggcgcccagcatccctcctactctgcccttggtggaggtttacgagaaaacacggccatctttatgtgtaaatgttgtaacctcttctcaccaaatcagtcggaactcctctcccacgtttcagagaagcacatggaagaaggggttaatgttgatgagattattattccccttaggcctctgagtacacctgaaccccccaactcaagcaaaaccagagatgagtttttggtcatgaagaggaagagaggcaggcctaaggggtccacgaagaagtccagcacagaagaggagctggcagaaaacatcgtgagtccgactgaggacagcccgctggctccggaggaagggaacagcctgcctccaagcagcttggagtgtagcaagtgctgtcggaagttctccaacacgcgccagctgcggaagcacatctgcattatcgtgctgaatttgggtgaggaggaaggagaagcaggtaacgagtctgaccttgaactagaaaagaagtgtaaggaagatgatcgggaaaaagcctcgaaaagaccacggtcacagaaaacagagaaagtccagaagatctcaggaaaggaggccagacagctttctggggcgaagaaacccatcataagtgtggttttaactgcacacgaagcaattccaggtgctaccaagattgtgccagtggaggctgggccccctgaaacaggagctacaaattctgagaccacttcagcagacctggtgcctcggagaggctaccaggaatacgccattcagcagacaccttatgagcaaccaatgaagtcaagcaggctaggtcccactcagctcaaaatcttcacttgtgaatactgcaacaaggtcttcaagttcaagcactcgctgcaggcccacctgaggatccacaccaatgaaaagccatacaagtgcccccagtgcagctatgccagtgccatcaaggccaacctcaatgtgcacctgcgcaagcacactggagagaagttcgcctgcgactattgctcgttcacctgcctgagcaagggccacctcaaggtgcacatcgagcgagtgcacaagaagatcaagcagcactgccgcttctgcaagaagaagtactctgacgtcaagaacctcatcaagcacatccgagacgcgcatgacccacaggacaagaaggtcaaagaggccttggacgagctctgcctgatgacgagggagggcaagcggcagctgctctatgactgccacatctgtgagcgcaagttcaagaacgagctggaccgtgaccgccatatgctggtccacggagacaagtggccttttgcctgtgagctctgtggccatggggccaccaagtaccaggcgctggaactgcatgtcaggaagcaccccttcgtgtacgtctgtgccgtctgccgcaagaagttcgtcagctccatcaggctgcgcacccacatcaaagaggtgcacggggctgcccaggaggccttggtcttcaccagttccatcaaccagagcttctgcctcctggaacctggtggggacatccagcaagaagctctgggggaccagctacagctggtggaagaggagtttgccctccagggcgtgaatgcactcaaggaagaggcctgtcctggggacactcagctggaggagggccggaaggagccggaggcccctggggaaatgcctgccccagctgtgcacctggcctccccgcaggccgaaagcacagccctgccaccctgtgagctggaaaccaccgtggtctcctcctcagacctgcattctcaagaggtggtttcagatgattttttgttgaaaaatgatacctcctccgcagaggctcatgctgctcctgagaagcccccagacatgcagcacagaagctcagtccagacgcaaggtgaagtgatcacactactgctgtccaaggcccagagtgctgggtcagatcaggaaagccatggcgcccagagccccctaggggaagggcagaacatggctgtgctttcagctggtgacccagatcccagcaggtgtctcaggtcaaacccagctgaggcctcagacctcctccctccagtagctggtggtggggacaccatcacacatcagcctgactcttgcaaagctgcccctgagcaccggtcaggcatcaccgctttcatgaaggtcctgaacagtttacagaagaagcaaatgaacaccagcttgtgtgagcggatccggaaggtttatggagacctggagtgtgaatactgtggcaaacttttttggtaccaagtgcattttgatatgcatgtccgcacccacacccgggaacatctgtattattgctctcagtgtcattattcttccatcaccaaaaactgccttaaacgccacgtaattcagaaacacagtaacatcttgctgaagtgtcccaccgatggctgtgactactcaactccagataaatataagctacaggcacatcttaaagttcacacagcactggtctttggtggaggatcttgtaacacaatgaatgaatgcttatttttgcaaattctaatctaactcaagaggctgacacctgagagtgatttgagacttcttcaagttataaaggaagcacatctggccccaggacaaaaggagttattcttgtcctgtttgtgaaaagtctttttcagaggatcgattgataaagtcacatatcaagaccaaccatcctgaggtctccatgagcaccatttctgaggttctcgggaggagggttcagctgaaagggctaattggaaagagagccatgaaatgcccatattgtgacttttatttcatgaagaatggctcagaccttcagcgtcatatttgggctcatgaaggtgtgaagcccttcaagtgttctttgtgtgagtatgcaactcgtagcaagagtaacctcaaggctcatatgaatcgtcacagcactgagaaaacccacctatgtgacatgtgtggcaagaaattcaaatcaaaagggacactgaaaagtcacaaactccttcacactgcagatgggaagcagtttaagtgcacggtgtgtgactacacagcggcccagaagccacagctgctgcggcacatggaacagcatgtctccttcaagcctttccgctgtgcccattgccattactcctgcaacatatctggctctctgaagcggcactacaacaggaagcaccctaatgaggagtatgccaacgtgggcaccggggagctggcagcggaggtgctcatccagcaaggtggtttgaagtgtcctgtttgcagctttgtatatggcaccaaatgggagttcaataggcacttgaagaacaaacatggcttgaaggtggtggaaattgatggagaccccaagtgggagacagcaacagaagctcctgaggagccctccacccagtatctccacatcacagaggccgaagaagacgttcaagggacacaggcagcggtggccgcgctccaggacctgagatacacctctgagagtggcgaccgactggaccccacggccgtgaacatcctgcagcagatcattgagctgggcgccgagacccatgacgccactgcccttgcctcggtggttgccatggcaccagggacggtgactgtggttaagcaggtcaccgaggaggagcccagctccaaccacacggtcatgatccaggagacggtccagcaagcgtccgtggagcttgccgagcagcaccacctggtggtgtcctccgacgacgtggagggcattgagacggtgactgtctacacgcagggcggggaggcctcggagttcatcgtctacgtgcaggaggccatgcagcctgtggaggagcaggctgtggagcagccggcccaggaactctagaggacatgtggcatcggatggccacagggcggggctgccaggctctgcaggcacccagggtggggaggccacccttcctgccctacccgcagaatggtgctctcctttgccctccctgcccagcagcctgataggactctcctagtccaacttggggtgggcaaggcagtcagcatcaccagcaacaccacaggaccctcaccccagcatagacacacaccccctgacccttaccatctgcttcctgaaagacttcagtgtcagctcccctacacacaccccacaccttcaccccttgcttcaagattcaaacagagactcccagtccccctcagcatcttccctgaatcacagccccagctccttgacccccatctaggtgccaaatgttcatctgcaaccgctatgcagtctggtgagagggagacagccatcacatagaaagtgaccgtacgggtttttaatcactgctgggtggggtgggggtagggggattgtcctggctttgtcgacaaagtcccacttccccgagtattaagggcccttggtatcaagtgaggtaaattcacccatcacagggtctcgccctaccatcctggaattatttcacttttaagataaatgcactatttcactgttcgcctcccattctaaggaggtgaggtggttggaataaaaacagttcctgtctg

SEQ ID NO: 336629 - DNA, 1090 bp, Homo sapiens
agaacctcgcctcagtaagttgcacaggcgaccgactggaccccacggccgtgaacatcctgcagcagatcattgagctgggcgccgagacccatgacgccactgcccttgcctcggtggttgccatggcaccagggacggtgactgtggttaagcaggtcaccgaggaggagcccagctccaaccacacggtcatgatccaggagacggtccagcaagcgtccgtggagcttgccgagcagcaccacctggtggtgtcctccgacgacgtggagggcattgagacggtgactgtctacacgcagggcggggaggcctcggagttcatcgtctacgtgcaggaggccatgcagcctgtggaggagcaggctgtggagcagccggcccaggaactctagaggacatgtggcatcggatggccacagggcggggctgccaggctctgcaggcacccagggtggggaggccacccttcctgccctacccgcagaatggtgctctcctttgccctccctgcccagcagcctgataggactctcctagtccaacttggggtgggcaaggcagtcagcatcaccagcaacaccacaggaccctcaccccagcatagacacacaccccctgacccttaccatctgcttcctgaaagacttcagtgtcagctcccctacacacaccccacaccttcaccccttgcttcaagattcaaacagagactcccagtccccctcagcatcttccctgaatcacagccccagctccttgacccccatctaggtgccaaatgttcatctgcaaccgctatgcagtctggtgagagggagacagccatcacatagaaagtgaccgtacgggtttttaatcactgctgggtggggtgggggtagggggattgtcctggctttgtcgacaaagtcccacttccccgagtattaagggcccttggtatcaagtgaggtaaattcacccatcacagggtctcgccctaccatcctggaattatttcacttttaagataaatgcactatttcactgttcgcctcccattctaaggaggtgaggtggttggaataaaaacagttcctgtctg

SEQ ID NO: 336630 - DNA, 727 bp, Homo sapiens
acatgatgttaacagatactgagatctgagactcgatttggttctggttttactttttaggtgaaaatcctgtctctggacaccatgaggcacaccttgattcctcctgtgggtgctgcttagcaatgaggtttatttatgtctaacttcccctgaggtgctctgactccttttgacatcctgcttttcttctagaggtctccatgagcaccatttctgaggttctcgggaggagggttcagctgaaagggctaattggaaagagagccatgaaatgcccatattgtgacttttatttcatgaagaatggctcagaccttcagcgtcatatttgggctcatgaaggtgagtattcatctttccaaattgggcacctttctaattttgtgcttccatccttcattttgggagtacattaagaggaagccgtatcttcacatccctgctgttagaatttccttagcacactgagagatgtgtccatcaaccagctacaaacagtaatttaaaccattacttaattagttgcaattgcaatgaatagaggtgtgcactccttcataggtctcattgcaattgtagtgaaataaatcaccatgactcctctgctggaaagtaggtaccttgagaacaggaacaccggagacttattcatggcaggaactccagtgcccaccctgtgccctgtgcatagcaggttttccagaaatgttggtattatgaatga

SEQ ID NO: 336631 - DNA, 4273 bp, Homo sapiens
ggcacgaggggagtctgagaagaaagggtgtagatggagaggcggtggcctcacctctgcatgctccgtgggaagcggcggaggcgcccagcatccctcctactctgcccttggtggaggtttacgagaaaacacggccatctttatgtgtaaatgttgtaacctcttctcaccaaatcagtcggaactcctctcccacgtttcagagaagcacatggaagaaggggttaatgttgatgagattattattccccttaggcctctgagtacacctgaaccccccaactcaagcaaaaccagagatgagtttttggtcatgaagaggaagagaggcaggcctaaggggtccacgaagaagtccagcacagaagaggagctggcagaaaacatcgtgagtccgactgaggacagcccgctggctccggaggaagggaacagcctgcctccaagcagcttggagtgtagcaagtgctgtcggaagttctccaacacgcgccagctgcggaagcacatctgcattatcgtgctgaatttgggtgaggaggaaggagaagcaggtaacgagtctgaccttgaactagaaaagaagtgtaaggaagatgatcgggaaaaagcctcgaaaagaccacggtcacagaaaacagagaaagtccagaagatctcaggaaaggaggccagacagctttctggggcgaagaaacccatcataagtgtggttttaactgcacacgaagcaattccaggtgctaccaagattgtgccagtggaggctgggccccctgaaacaggagctacaaattctgagaccacttcagcagacctggtgcctcggagaggctaccaggaatacgccattcagcagacaccttatgagcaaccaatgaagtcaagcaggctaggtcccactcagctcaaaatcttcacttgtgaatactgcaacaaggtcttcaagttcaagcactcgctgcaggcccacctgaggatccacaccaatgaaaagccatacaagtgcccccagtgcagctatgccagtgccatcaaggccaacctcaatgtgcacctgcgcaagcacactggagagaagttcgcctgcgactattgctcgttcacctgcctgagcaagggccacctcaaggtgcacatcgagcgagtgcacaagaagatcaagcagcactgccgcttctgcaagaagaagtactctgacgtcaagaacctcatcaagcacatccgagacgcgcatgacccacaggacaagaaggtcaaagaggccttggacgagctctgcctgatgacgagggagggcaagcggcagctgctctatgactgccacatctgtgagcgcaagttcaagaacgagctggaccgtgaccgccatatgctggtccacggagacaagtggccttttgcctgtgagctctgtggccatggggccaccaagtaccaggcgctggaactgcatgtcaggaagcaccccttcgtgtacgtctgtgccgtctgccgcaagaagttcgtcagctccatcaggctgcgcacccacatcaaagaggtgcacggggctgcccaggaggccttggtcttcaccagttccatcaaccagagcttctgcctcctggaacctggtggggacatccagcaagaagctctgggggaccagctacagctggtggaagaggagtttgccctccagggcgtgaatgcactcaaggaagaggcctgtcctggggacactcagctggaggagggccggaaggagccggaggcccctggggaaatgcctgccccagctgtgcacctggcctccccgcaggccgaaagcacagccctgccaccctgtgagctggaaaccaccgtggtctcctcctcagacctgcattctcaagaggtggtttcagatgattttttgttgaaaaatgatacctcctccgcagaggctcatgctgctcctgagaagcccccagacatgcagcacagaagctcagtccagacgcaaggtgaagtgatcacactactgctgtccaaggcccagagtgctgggtcagatcaggaaagccatggcgcccagagccccctaggggaagggcagaacatggctgtgctttcagctggtgacccagatcccagcaggtgtctcaggtcaaacccagctgaggcctcagacctcctccctccagtagctggtggtggggacaccatcacacatcagcctgactcttgcaaagctgcccctgagcaccggtcaggcatcaccgctttcatgaaggtcctgaacagtttacagaagaagcaaatgaacaccagcttgtgtgagcggatccggaaggtttatggagacctggagtgtgaatactgtggcaaacttttttggtaccaagtgcattttgatatgcatgtccgcacccacacccgggaacatctgtattattgctctcagtgtcattattcttccatcaccaaaaactgccttaaacgccacgtaattcagaaacacagtaacatcttgctgaagtgtcccaccgatggctgtgactactcaactccagataaatataagctacaggcacatcttaaagttcacacagcactggacaaaaggagttattcttgtcctgtttgtgaaaagtctttttcagaggatcgattgataaagtcacatatcaagaccaaccatcctgaggtctccatgagcaccatttctgaggttctcgggaggagggttcagctgaaagggctaattggaaagagagccatgaaatgcccatattgtgacttttatttcatgaagaatggctcagaccttcagcgtcatatttgggctcatgaaggtgtgaagcccttcaagtgttctttgtgtgagtatgcaactcgtagcaagagtaacctcaaggctcatatgaatcgtcacagcactgagaaaacccacctatgtgacatgtgtggcaagaaattcaaatcaaaagggacactgaaaagtcacaaactccttcacactgcagatgggaagcagtttaagtgcacggtgtgtgactacacagcggcccagaagccacagctgctgcggcacatggaacagcatgtctccttcaagcctttccgctgtgcccattgccattactcctgcaacatatctggctctctgaagcggcactacaacaggaagcaccctaatgaggagtatgccaacgtgggcaccggggagctggcagcggaggtgctcatccagcaaggtggtttgaagtgtcctgtttgcagctttgtatatggcaccaaatgggagttcaataggcacttgaagaacaaacatggcttgaaggtggtggaaattgatggagaccccaagtgggagcaccgaggaggagcccagctccaaccacacggtcatgatccaggagacggtccagcaagcgtccgtggagcttgccgagcagcaccacctggtggtgtcctccgacgacgtggagggcattgagacggtgactgtctacacgcagggcggggaggcctcggagttcatcgtctacgtgcaggaggccatgcagcctgtggaggagcaggctgtggagcagccggcccaggaactctagaggacatgtggcatcggatggccacagggcggggctgccaggctctgcaggcacccagggtggggaggccacccttcctgccctacccgcagaatggtgctctcctttgccctccctgcccagcagcctgataggactctcctagtccaacttggggtgggcaaggcagtcagcatcaccagcaacaccacaggaccctcaccccagcatagacacacaccccctgacccttaccatctgcttcctgaaagacttcagtgtcagctcccctacacacaccccacaccttcaccccttgcttcaagattcaaacagagactcccagtccccctcagcatcttccctgaatcacagccccagctccttgacccccatctaggtgccaaatgttcatctgcaaccgctatgcagtctggtgagagggagacagccatcacatagaaagtgaccgtacgggtttttaatcactgctgggtggggtgggggtagggggattgtcctggctttgtcgacaaagtcccacttccccgagtattaagggcccttggtatcaagtgaggtaaattcacccatcacagggtctcgccctaccatcctggaattatttcacttttaagataaatgcactatttcactgttcgcctcccattctaaggaggtgaggtggttggaataaaaacagttcctgtctg

SEQ ID NO: 336632 - DNA, 4533 bp, Homo sapiens
ggcacgaggggagtctgagaagaaagggtgtagatggagaggcggtggcctcacctctgcatgctccgtgggaagcggcggaggcgcccagcatccctcctactctgcccttggtggaggtttacgagaaaacacggccatctttatgtgtaaatgttgtaacctcttctcaccaaatcagtcggaactcctctcccacgtttcagagaagcacatggaagaaggggttaatgttgatgagattattattccccttaggcctctgagtacacctgaaccccccaactcaagcaaaaccagagatgagtttttggtcatgaagaggaagagaggcaggcctaaggggtccacgaagaagtccagcacagaagaggagctggcagaaaacatcgtgagtccgactgaggacagcccgctggctccggaggaagggaacagcctgcctccaagcagcttggagtgtagcaagtgctgtcggaagttctccaacacgcgccagctgcggaagcacatctgcattatcgtgctgaatttgggtgaggaggaaggagaagcaggtaacgagtctgaccttgaactagaaaagaagtgtaaggaagatgatcgggaaaaagcctcgaaaagaccacggtcacagaaaacagagaaagtccagaagatctcaggaaaggaggccagacagctttctggggcgaagaaacccatcataagtgtggttttaactgcacacgaagcaattccaggtgctaccaagattgtgccagtggaggctgggccccctgaaacaggagctacaaattctgagaccacttcagcagacctggtgcctcggagaggctaccaggaatacgccattcagcagacaccttatgagcaaccaatgaagtcaagcaggctaggtcccactcagctcaaaatcttcacttgtgaatactgcaacaaggtcttcaagttcaagcactcgctgcaggcccacctgaggatccacaccaatgaaaagccatacaagtgcccccagtgcagctatgccagtgccatcaaggccaacctcaatgtgcacctgcgcaagcacactggagagaagttcgcctgcgactattgctcgttcacctgcctgagcaagggccacctcaaggtgcacatcgagcgagtgcacaagaagatcaagcagcactgccgcttctgcaagaagaagtactctgacgtcaagaacctcatcaagcacatccgagacgcgcatgacccacaggacaagaaggtcaaagaggccttggacgagctctgcctgatgacgagggagggcaagcggcagctgctctatgactgccacatctgtgagcgcaagttcaagaacgagctggaccgtgaccgccatatgctggtccacggagacaagtggccttttgcctgtgagctctgtggccatggggccaccaagtaccaggcgctggaactgcatgtcaggaagcaccccttcgtgtacgtctgtgccgtctgccgcaagaagttcgtcagctccatcaggctgcgcacccacatcaaagaggtgcacggggctgcccaggaggccttggtcttcaccagttccatcaaccagagcttctgcctcctggaacctggtggggacatccagcaagaagctctgggggaccagctacagctggtggaagaggagtttgccctccagggcgtgaatgcactcaaggaagaggcctgtcctggggacactcagctggaggagggccggaaggagccggaggcccctggggaaatgcctgccccagctgtgcacctggcctccccgcaggccgaaagcacagccctgccaccctgtgagctggaaaccaccgtggtctcctcctcagacctgcattctcaagaggtggtttcagatgattttttgttgaaaaatgatacctcctccgcagaggctcatgctgctcctgagaagcccccagacatgcagcacagaagctcagtccagacgcaaggtgaagtgatcacactactgctgtccaaggcccagagtgctgggtcagatcaggaaagccatggcgcccagagccccctaggggaagggcagaacatggctgtgctttcagctggtgacccagatcccagcaggtgtctcaggtcaaacccagctgaggcctcagacctcctccctccagtagctggtggtggggacaccatcacacatcagcctgactcttgcaaagctgcccctgagcaccggtcaggcatcaccgctttcatgaaggtcctgaacagtttacagaagaagcaaatgaacaccagcttgtgtgagcggatccggaaggtttatggagacctggagtgtgaatactgtggcaaacttttttggtaccaagtgcattttgatatgcatgtccgcacccacacccgggaacatctgtattattgctctcagtgtcattattcttccatcaccaaaaactgccttaaacgccacgtaattcagaaacacagtaacatcttgctgaagtgtcccaccgatggctgtgactactcaactccagataaatataagctacaggcacatcttaaagttcacacagcactggacaaaaggagttattcttgtcctgtttgtgaaaagtctttttcagaggatcgattgataaagtcacatatcaagaccaaccatcctgaggtctccatgagcaccatttctgaggttctcgggaggagggttcagctgaaagggctaattggaaagagagccatgaaatgcccatattgtgacttttatttcatgaagaatggctcagaccttcagcgtcatatttgggctcatgaaggtgtgaagcccttcaagtgttctttgtgtgagtatgcaactcgtagcaagagtaacctcaaggctcatatgaatcgtcacagcactgagaaaacccacctatgtgacatgtgtggcaagaaattcaaatcaaaagggacactgaaaagtcacaaactccttcacactgcagatgggaagcagtttaagtgcacggtgtgtgactacacagcggcccagaagccacagctgctgcggcacatggaacagcatgtctccttcaagcctttccgctgtgcccattgccattactcctgcaacatatctggctctctgaagcggcactacaacaggaagcaccctaatgaggagtatgccaacgtgggcaccggggagctggcagcggaggtgctcatccagcaaggtggtttgaagtgtcctgtttgcagctttgtatatggcaccaaatgggagttcaataggcacttgaagaacaaacatggcttgaaggtggtggaaattgatggagaccccaagtgggagacagcaacagaagctcctgaggagccctccacccagtatctccacatcacagaggccgaagaagacgttcaagggacacaggcagcggtggccgcgctccaggacctgagatacacctctgagagtggcgaccgactggaccccacggccgtgaacatcctgcagcagatcattgagctgggcgccgagacccatgacgccactgcccttgcctcggtggttgccatggcaccagggacggtgactgtggttaagcaggtcaccgaggaggagcccagctccaaccacacggtcatgatccaggagacggtccagcaagcgtccgtggagcttgccgagcagcaccacctggtggtgtcctccgacgacgtggagggcattgagacggtgactgtctacacgcagggcggggaggcctcggagttcatcgtctacgtgcaggaggccatgcagcctgtggaggagcaggctgtggagcagccggcccaggaactctagaggacatgtggcatcggatggccacagggcggggctgccaggctctgcaggcacccagggtggggaggccacccttcctgccctacccgcagaatggtgctctcctttgccctccctgcccagcagcctgataggactctcctagtccaacttggggtgggcaaggcagtcagcatcaccagcaacaccacaggaccctcaccccagcatagacacacaccccctgacccttaccatctgcttcctgaaagacttcagtgtcagctcccctacacacaccccacaccttcaccccttgcttcaagattcaaacagagactcccagtccccctcagcatcttccctgaatcacagccccagctccttgacccccatctaggtgccaaatgttcatctgcaaccgctatgcagtctggtgagagggagacagccatcacatagaaagtgaccgtacgggtttttaatcactgctgggtggggtgggggtagggggattgtcctggctttgtcgacaaagtcccacttccccgagtattaagggcccttggtatcaagtgaggtaaattcacccatcacagggtctcgccctaccatcctggaattatttcacttttaagataaatgcactatttcactgttcgcctcccattctaaggaggtgaggtggttggaataaaaacagttcctgtctg

SEQ ID NO: 336633 - DNA, 1652 bp, Homo sapiens
ctgatcctcacatggcaaggaacacctttgtgtacctggctccatgcctggcacttcattcacagtgggagctgttggcctggcgacgctcatcttgtcctccgcttctttccagggaagcagtttaagtgcacggtgtgtgactacacagcggcccagaagccacagctgctgcggcacatggaacagcatgtctccttcaagcctttccgctgtgcccattgccattactcctgcaacatatctggctctctgaagcggcactacaacaggaagcaccctaatgaggagtatgccaacgtgggcaccggggagctggcagcggaggtgctcatccagcaaggtggtttgaagtgtcctgtttgcagctttgtatatggcaccaaatgggagttcaataggcacttgaagaacaaacatggcttgaaggtggtggaaattgatggagaccccaagtgggagacagcaacagaagctcctgaggagccctccacccagtatctccacatcacagaggccgaagaagacgttcaagggacacaggcagcggtggccgcgctccaggacctgagatacacctctgagagtggcgaccgactggaccccacggccgtgaacatcctgcagcagatcattgagctgggcgccgagacccatgacgccactgcccttgcctcggtggttgccatggcaccagggacggtgactgtggttaagcaggtcaccgaggaggagcccagctccaaccacacggtcatgatccaggagacggtccagcaagcgtccgtggagcttgccgagcagcaccacctggtggtgtcctccgacgacgtggagggcattgagacggtgactgtctacacgcagggcggggaggcctcggagttcatcgtctacgtgcaggaggccatgcagcctgtggaggagcaggctgtggagcagccggcccaggaactctagaggacatgtggcatcggatggccacagggcggggctgccaggctctgcaggcacccagggtggggaggccacccttcctgccctacccgcagaatggtgctctcctttgccctccctgcccagcagcctgataggactctcctagtccaacttggggtgggcaaggcagtcagcatcaccagcaacaccacaggaccctcaccccagcatagacacacaccccctgacccttaccatctgcttcctgaaagacttcagtgtcagctcccctacacacaccccacaccttcaccccttgcttcaagattcaaacagagactcccagtccccctcagcatcttccctgaatcacagccccagctccttgacccccatctaggtgccaaatgttcatctgcaaccgctatgcagtctggtgagagggagacagccatcacatagaaagtgaccgtacgggtttttaatcactgctgggtggggtgggggtagggggattgtcctggctttgtcgacaaagtcccacttccccgagtattaagggcccttggtatcaagtgaggtaaattcacccatcacagggtctcgccctaccatcctggaattatttcacttttaagataaatgcactatttcactgttcgcctcccattctaaggaggtgaggtggttggaataaaaacagttcctgtctg

SEQ ID NO: 336634 - DNA, 214 bp, Homo sapiens
tgggccagacaaaggtgggtgaacccccgtgtgggttgtcacgagagcgcccgcccctccgcgtcactccatgcgcctctttccgagagcagggcttggctctcagcctgggcccgagtgcggccagccaggccagatctccggaccctgcccggacagagctggcacttccaagccctgctcactcatcctcgcctctgcctgcccagctcac

SEQ ID NO: 336635 - DNA, 907 bp, Homo sapiens
ttggagccgaggctttagagggtggcgttgggaagagggtctggcgccgccctatggactgttcgggctcacgaggctgaaggctccgaagaccgcgacctgcgaaccatgggaaggttccacgcggatgaaggctacagccccggccagagaccctacactaggcctggacttctccaccggcttatgacatgatagctcaataagctccttatttaacgcactgttgtatcaggtccctgtcgcagccactggccctatagcctaataaaggagcgggtgcatgcattggattggtgagctaccgccacagcaacgcgtcctaatcaaccatcccaaacggcagttggaagaaagttcttgcaggcctgtgcttgggcttgaacgctgggccggccgctgcgctctgtggctccctgcaggcctgcggatcggccagggggctccgatccttttggaccgaggctgaagcaacggctgcaccagagaaggccttctggctgaaggtggaagtgcacggggtccgcagaaccgcctaaggcgtcttcaggcgtgggttacgaactggcaggctctcctttgtgcttcattccatggccagagcaagacacgtgggcaagcccaaagccaggggctgggaaagtaacctccacccacaacgaaaccatggcaaggggtgggtgcatgtagggctgaggaattggggccaatagtctatctatcccgtgaggagacctgctgtgggggttgcacagcctgggtctgcaagcttcactgccctcggcctgggcgtcctgtgctcctttggcctctctgggttaggaaagtatcccttttatctctgcaaaggtcagagtcccagtgtctgctttcaaatataaaaccagctattgggggtatgaccctg

SEQ ID NO: 336636 - DNA, 444 bp, Homo sapiens
ggggccttcagggaagagctcgagtcatcatgaagacagagcctggatggtaaaattaatgcccctcatacagatgttgagtcacatgatgtattagatagtcaatgaaagatgaaattatgttggtataccatacaaggcagtaatgtacagtactccttaagaaacattttcaataggagttttatggttgcttgaattaagttgctttgagaggtaaaaagttgcagtaagtgctataatttagaaaaccagagacttacatggtaacatctctactggattaagtcttcatgagtataacagcataagtattataaaacttaactagaatcggaaaatagaagataaagaattagtgttttgtttggatcttacctttttctgtgcctgaaacccccacattttcaaaagtcctttcccaaggtctccaacgctggttgg

SEQ ID NO: 336637 - DNA, 489 bp, Homo sapiens
agaaggacatctgggaaatttacaaatatgtgaaaattaaacactacattcctaaataatcagtgagtcaaagaagaaatcacaagaaaaattagaaaatattttgagataaatgaaaacccaacaaaaattatgatatacagctaaagcagtgcttagaggaaaacttctagttgtaaatgacattagaaaatgagaggccgggtgcggcatgaggtcaggagatcaagaccatcctagctaacacagtgaaaccctgtctctactaaaaatacaaaaaaattagtagagacggggttttaccatgctggtcaggctggtcttgaactcccgacctcaggtgatccgcccgcctcggcctcccaaagtgctgggactaataggcgtgcaccaccacgcccagctaattttaatatttttaggtgagaggagcggggttttcaccataataggctcaggaaggtcttagatgtcttgagctcgtgatcc

SEQ ID NO: 336638 - DNA, 620 bp, Homo sapiens
cagtgcactccagcctgagcaacatattaagcatgcaaattaaaagaacaagaccttggccaggtgtggtggctcacgcctgtaatcccagcacttctggaggccgaggtgagcagatcacgaggtgaggagatcgagaccatcctggccaacatggtgaaaccctgtctctactgaaaattcaaaaattagctgggcatggtggtgcatgcttttaatcacagctacttgggaggctgaggcaggagaattgcttgaaccagggaggcagaggttgccgtgagcctagattgtgccactgccctctagcctggtgacagagcgagagtccatctcaaaaaaaagaacaagaccttgtctctaaaaaataaaaataaattataaatcaagaaagaaattaagacaaagaggagattaaagtttggcttataaaggaagggatgagctagagcaattccagaaagagagtcaagaggaaaaaggaacaattaactcttccccatccacatctcttctccctatccactaacagcagagtcaaactaaggaaggatttattgaataggtaggtggtggagaaaatacagaatgttgtggtgagagactgcactggcactgct

SEQ ID NO: 336639 - DNA, 249 bp, Homo sapiens
ggaaaacaggtgttaggagagcctgggcacatgggccagcagctacaactgctgagggagagagagacagaacagagctcaccagagctgagggtgaggacacagaagccttgagagagagcccagggcagcgtgcccagtgtggcagctggacatgctggtcattcagtcggtcaatgaacagccattgactcggtacctccatcatgtgccaaacaccaccaggcaccgagggcacaagacacagag

SEQ ID NO: 336640 - DNA, 559 bp, Homo sapiens
catgtgtggggaggtgataaaggccttagcccccaaacagcctttaaaagcttgtgggatgagagagctatttagaaagctgaccataacatgttccctttttcctgggcagtggctgagataatctagaataagggggctttgtgaaaataaatgaaacattgccggacagcctgcttgcttttccagcaggtaattatttgtggctcggagagggttcccaagcgacatggccgtcagggagagtcaggagagtaggttgcactggattcaccctcactgggcgtccattactttcttggaatttcctgtggcttgaactgtcctcattcctttgatccagagatataactttgctagtgttccctctcttgtgggtctcctcaacagggaaggagcctgcgcagagagatggaatgggaagggctaagagagcatacaccacagcgcttgtggggtgatgtagggaaaggaccgagggcacaagaaggacagagattgagataaacttgaaactgcttagagcagtttatctatttcagacacgatacagcacact

SEQ ID NO: 336641 - DNA, 418 bp, Homo sapiens
gtggcaggggagatggggccaatgtggaggatcatagggcttgctgaaacagtcccaaatgaatcttcttcaaattaacctctgcaaatattgcctctgcctccattaatttagagaagctttgcattcttttctcttaagtttattttgcagctcatgtcttaatgagctaaaaaaaaaactatagaggttttgatccaatttcagactaccctgtaagatatcagcatctgacagttctgctgtactctttcaggcattttacttgaaatgatagtaatgtgatatttgcatccagtgcaaattatgaattttcactaattcttagattagatggggcttaactgctaggatgcagcttgcacatttaatctacttcagagcagcttcacttactagatggtcctcatgggtctgg

SEQ ID NO: 336642 - DNA, 259 bp, Homo sapiens
ggctccatcatttctcaacctttttgtgctatactacagttgcctcacatccacattcaaggttatcgatccactcttaatagctgtgtctcatctattgttgcccatcaaatgagtttacagtcaatgatcacattatcttcattctttctcaaaacgcttctaattcatgctcttatgacatttttttcattaccctcagtcacttgcaacatactttcacagtctatcttggatagctccctaattcctagatctt

SEQ ID NO: 336643 - DNA, 275 bp, Homo sapiens
tttgcccccttcttgtcccctttgaggggcacttaagatgcagcaatcagctgtggtttcagtgaatcatggtcacctgtatttattgctagcaccctccaccctccccaccccctcggggcagagtttgcacaaagtcccccccataatacagggggagccacttgggcaggaggcagggaggggtccattccccctggtggggctggtggggagctgtagttgccccctacctctcccacctcttgctcttcaataaaatgatcttaaactgc

SEQ ID NO: 336644 - DNA, 249 bp, Homo sapiens
tcatcacctaccccttcgaccagaacaggttcgtccagtacaaagccacttccttggagaaacagcacaaacatgacctcctgactgagccagacctgggggtcaccatcgatctcatcaatcctgacacctaccgcatcgaccccaatgttcttctagatccagctgatgagaaacttttggtggggagctgtagttgccccctacctctcccacctcttgctcttcaataaaatgatcttaaactgc

SEQ ID NO: 336645 - DNA, 1385 bp, Homo sapiens
aaagggcatggactgggtgtttggctggttgctaaggttcttcgtatggtgcgctccgctggatcacgtgagccagttccaaaatggcggcaggggtggccgggtggggggttgaggcagaggagttcgaagatgctcctgatgtggagccgctggagcctacacttagcaacatcatcgagcagcgcagcctgaagtggatcttcgtcgggggcaagggtggtgtgggcaagaccacctgcagctgcagcctggcagtccagctctccaaggggcgtgagagtgttctgatcatctccacagacccagcacacaacatctcagatgcttttgaccagaagttctcaaaggtgcctaccaaggtcaaaggctatgacaacctctttgctatggagattgaccccagcctgggcgtggcggagctgcctgacgagttcttcgaggaggacaacatgctgagcatgggcaagaagatgatgcaggaggccatgagcgcatttcccggcatcgatgaggccatgagctatgccgaggtcatgaggctggtgaagggcatgaacttctcggtggtggtatttgacacggcacccacgggccacaccctgaggctgctcaacttccccaccatcgtggagcggggcctgggccggcttatgcagatcaagaaccagatcagccctttcatctcacagatgtgcaacatgctgggcctgggggacatgaacgcagaccagctggcctccaagctggaggagacgctgcccgtcatccgctcagtcagcgaacagttcaaggaccctgagcagacaactttcatctgcgtatgcattgctgagttcctgtccctgtatgagacagagaggctgatccaggagctggccaagtgcaagattgacacacacaatataattgtcaaccagctcgtcttccccgaccccgagaagccctgcaagatgtgtgaggcccgtcacaagatccaggccaagtatctggaccagatggaggacctgtatgaagacttccacatcgtgaagctgccgctgttaccccatgaggtgcggggggcagacaaggtcaacaccttctcggccctcctcctggagccctacaagccccccagtgcccagtagcacagctgccagccccaaccgctgccatttcacactcaccctccaccctccccaccccctcggggcagagtttgcacaaagtcccccccataatacagggggagccacttgggcaggaggcagggaggggtccattccccctggtggggctggtggggagctgtagttgccccctacctctcccacctcttgctcttcaataaaatgatcttaaactgcaaaaaaaaaaaaaagggaggacgctccaacgaaccc

SEQ ID NO: 336646 - DNA, 1105 bp, Homo sapiens
aaagggcatggactgggtgtttggctggttgctaaggttcttcgtatggtgcgctccgctggatcacgtgagccagttccaaaatggcggcaggggtggccgggtggggggttgaggcagaggagttcgaagatgctcctgatgtggagccgctggagcctacacttagcaacatcatcgagcagcgcagcctgaagtggatcttcgtcgggggcaagggtggtgtgggcaagaccacctgcagctgcagcctggcagtccagctctccaaggggcgtgagagtgttctgatcatctccacagacccagcacacaacatctcagatgcttttgaccagaagttctcaaaggtgcctaccaaggtcaaaggctatgacaacctctttgctatggagattgaccccagcctgggcgtggcggagctgcctgacgagttcttcgaggaggacaacatgctgagcatgggcaagaagatgatgcaggaggccatgagcgcatttcccggcatcgatgaggccatgagctatgccgaggtcatgaggctggtgaagggcatgaacttctcggtggtggtatttgacacggcacccacgggccacaccctgaggctgctcaacttccccaccatcgtggagcggggcctgggccggcttatgcagatcaagaaccagatcagccctttcatctcacagatgtgcaacatgctgggcctgggggacatgaacgcagaccagctggcctccaagctggaggagacgctgcccgtcatccgctcagtcagcgaacagttcaaggaccctgagcagacaactttcatctgcgtatgcattgctgagttcctgtccctgtatgagacagagaggctgatccaggagctggccaagtgcaagattgacacacacaatataattgtcaaccagctcgtcctccaccctccccaccccctcggggcagagtttgcacaaagtcccccccataatacagggggagccacttgggcaggaggcagggaggggtccattccccctggtggggctggtggggagctgtagttgccccctacctctcccacctcttgctcttcaataaaatgatcttaaactgc

SEQ ID NO: 336647 - DNA, 1371 bp, Homo sapiens
aaagggcatggactgggtgtttggctggttgctaaggttcttcgtatggtgcgctccgctggatcacgtgagccagttccaaaatggcggcaggggtggccgggtggggggttgaggcagaggagttcgaagatgctcctgatgtggagccgctggagcctacacttagcaacatcatcgagcagcgcagcctgaagtggatcttcgtcgggggcaagggtggtgtgggcaagaccacctgcagctgcagcctggcagtccagctctccaaggggcgtgagagtgttctgatcatctccacagacccagcacacaacatctcagatgcttttgaccagaagttctcaaaggtgcctaccaaggtcaaaggctatgacaacctctttgctatggagattgaccccagcctgggcgtggcggagctgcctgacgagttcttcgaggaggacaacatgctgagcatgggcaagaagatgatgcaggaggccatgagcgcatttcccggcatcgatgaggccatgagctatgccgaggtcatgaggctggtgaagggcatgaacttctcggtggtggtatttgacacggcacccacgggccacaccctgaggctgctcaacttccccaccatcgtggagcggggcctgggccggcttatgcagatcaagaaccagatcagccctttcatctcacaggcaggcggcgggggcccccacctgcaccatccaggcagccgggagtgggagtaggcccgggcccccagaccctcaaatgcgcactaacaattccctttccttcccaccccttctcactctggacttctccctggaggggatgggacggagctgtctttcctcccccacaggcaggactcagtgtccctgcccctgcccgctaaataccctagacagagccagaaagcacattccagaaccaggcaacctgccttcaaaccctctacactcaccatgtgacccaactgctgtgtgacctcaagcaaatcacttcacctctctgggcctcaccttccttgtcttgcaaatggagatcatgagagtgccccatgggttattattattattattcgagacggagtctcgctctgtcacccaggctggagtgcagtggtgcgatcttggctcattgcaacctccacctcgtggttcaagaccagcctggccaaaatggtgaaaccccaccagtactaaaaatacaaaaattagccgggcatggtggtgcgcgcctgtaatcccagctactcaagaggctgaggcaggagaatcgcttgaacccaggaggcggcggttgcagtgagccaaaatcacgccattgtactccagcctgggcaacagagtgagactccatttcaaaaaa

SEQ ID NO: 336648 - DNA, 560 bp, Homo sapiens
aaagggcatggactgggtgtttggctggttgctaaggttcttcgtatggtgcgctccgctggatcacgtgagccagttccaaaatggcggcaggggtggccgggtggggggttgaggcagaggagttcgaagatgctcctgatgtggagccgctggagcctacacttagcaacatcatcgagcagcgcagcctgaagtggatcttcgtcgggggcaagggtggtgtgggcaagaccacctgcagcaggtaaggaggctgcggcggggtcctcctggagccctacaagccccccagtgcccagtagcacagctgccagccccaaccgctgccatttcacactcaccctccaccctccccaccccctcggggcagagtttgcacaaagtcccccccataatacagggggagccacttgggcaggaggcagggaggggtccattccccctggtggggctggtggggagctgtagttgccccctacctctcccacctcttgctcttcaataaaatgatcttaaactgcaaaaaaaaaaaaaagggaggacgctccaacgaaccc

SEQ ID NO: 336649 - DNA, 696 bp, Homo sapiens
aaagggcatggactgggtgtttggctggttgctaaggttcttcgtatggtgcgctccgctggatcacgtgagccagttccaaaatggcggcaggggtggccgggtggggggttgaggcagaggagttcgaagatgctcctgatgtggagccgctggagcctacacttagcaacatcatcgagcagcgcagcctgaagtggatcttcgtcgggggcaagggtggtgtgggcaagaccacctgcagctgcagcctggcagtccagctctccaaggggcgtgagagtgttctgatcatctccacagacccagcacacaacatctcagatgcttttgaccagaagttctcaaaggtgcctaccaaggtcaaaggctatgacaacctctttgctatggagattgaccccagcctgggcgtggcggagctgcctgacgagttcttcgaggaggacaacatgctgaccccccagtgcccagtagcacagctgccagccccaaccgctgccatttcacactcaccctccaccctccccaccccctcggggcagagtttgcacaaagtcccccccataatacagggggagccacttgggcaggaggcagggaggggtccattccccctggtggggctggtggggagctgtagttgccccctacctctcccacctcttgctcttcaataaaatgatcttaaactgc

SEQ ID NO: 336650 - DNA, 554 bp, Homo sapiens
aaagggcatggactgggtgtttggctggttgctaaggttcttcgtatggtgcgctccgctggatcacgtgagccagttccaaaatggcggcaggggtggccgggtggggggttgaggcagaggagttcgaagatgctcctgatgtggagccgctggagcctacacttagttttaaaaggggcccaagagacgcccaacatcatcgagcagcgcagcctgaagtggatcttcgtcgggggcaagggtggtgtgggcaagaccacctgcaggcagacaaggtcaacaccttctcggccctcctcctggagccctacaagccccccagtgcccagtagcacagctgccagccccaaccgctgccatttcacactcaccctccaccctccccaccccctcggggcagagtttgcacaaagtcccccccataatacagggggagccacttgggcaggaggcagggaggggtccattccccctggtggggctggtggggagctgtagttgccccctacctctcccacctcttgctcttcaataaaatgatcttaaactgc

SEQ ID NO: 336651 - DNA, 1349 bp, Homo sapiens
aaagggcatggactgggtgtttggctggttgctaaggttcttcgtatggtgcgctccgctggatcacgtgagccagttccaaaatggcggcaggggtggccgggtggggggttgaggcagaggagttcgaagatgctcctgatgtggagccgctggagcctacacttagcaacatcatcgagcagcgcagcctgaagtggatcttcgtcgggggcaagggtggtgtgggcaagaccacctgcagctgcagcctggcagtccagctctccaaggggcgtgagagtgttctgatcatctccacagacccagcacacaacatctcagatgcttttgaccagaagttctcaaaggtgcctaccaaggtcaaaggctatgacaacctctttgctatggagattgaccccagcctgggcgtggcggagctgcctgacgagttcttcgaggaggacaacatgctgagcatgggcaagaagatgatgcaggaggccatgagcgcatttcccggcatcgatgaggccatgagctatgccgaggtcatgaggctggtgaagggcatgaacttctcggtggtggtatttgacacggcacccacgggccacaccctgaggctgctcaacttccccaccatcgtggagcggggcctgggccggcttatgcagatcaagaaccagatcagccctttcatctcacagatgtgcaacatgctgggcctgggggacatgaacgcagaccagctggcctccaagctggaggagacgctgcccgtcatccgctcagtcagcgaacagttcaaggaccctgagcagacaactttcatctgcgtatgcattgctgagttcctgtccctgtatgagacagagaggctgatccaggagctggccaagtgcaagattgacacacacaatataattgtcaaccagctcgtcttccccgaccccgagaagccctgcaagatgtgtgaggcccgtcacaagatccaggccaagtatctggaccagatggaggacctgtatgaagacttccacatcgtgaagctgccgctgttaccccatgaggtgcggggggcagacaaggtcaacaccttctcggccctcctcctggagccctacaagccccccagtgcccagtagcacagctgccagccccaaccgctgccatttcacactcaccctccaccctccccaccccctcggggcagagtttgcacaaagtcccccccataatacagggggagccacttgggcaggaggcagggaggggtccattccccctggtggggctggtggggagctgtagttgccccctacctctcccacctcttgctcttcaataaaatgatcttaaactgc

SEQ ID NO: 336652 - DNA, 956 bp, Homo sapiens
aaagggcatggactgggtgtttggctggttgctaaggttcttcgtatggtgcgctccgctggatcacgtgagccagttccaaaatggcggcaggggtggccgggtggggggttgaggcagaggagttcgaagatgctcctgatgtggagccgctggagcctacacttagcaacatcatcgagcagcgcagcctgaagtggatcttcgtcgggggcaagggtggtgtgggcaagaccacctgcagctgcagcctggcagtccagctctccaaggggcgtgagagtgttctgatcatctccacagacccagcacacaacatctcagatgcttttgaccagaagttctcaaaggtgcctaccaaggtcaaaggctatgacaacctctttgctatggagattgaccccagcctgggcgtggcggagctgcctgacgagttcttcgaggaggacaacatgctgagcatgggcaagaagatgatgcaggaggccaagtgcaagattgacacacacaatataattgtcaaccagctcgtcttccccgaccccgagaagccctgcaagatgtgtgaggcccgtcacaagatccaggccaagtatctggaccagatggaggacctgtatgaagacttccacatcgtgaagctgccgctgttaccccatgaggtgcggggggcagacaaggtcaacaccttctcggccctcctcctggagccctacaagccccccagtgcccagtagcacagctgccagccccaaccgctgccatttcacactcaccctccaccctccccaccccctcggggcagagtttgcacaaagtcccccccataatacagggggagccacttgggcaggaggcagggaggggtccattccccctggtggggctggtggggagctgtagttgccccctacctctcccacctcttgctcttcaataaaatgatcttaaactgc

SEQ ID NO: 336653 - DNA, 764 bp, Homo sapiens
  misc_feature (608)..(609): n is a, c, g, or t
  misc_feature (611)..(612): n is a, c, g, or t
  misc_feature (614)..(614): n is a, c, g, or t
  misc_feature (620)..(620): n is a, c, g, or t
  misc_feature (633)..(633): n is a, c, g, or t
  misc_feature (637)..(637): n is a, c, g, or t
  misc_feature (650)..(650): n is a, c, g, or t
  misc_feature (653)..(653): n is a, c, g, or t
  misc_feature (656)..(656): n is a, c, g, or t
  misc_feature (659)..(660): n is a, c, g, or t
  misc_feature (666)..(666): n is a, c, g, or t
  misc_feature (670)..(671): n is a, c, g, or t
  misc_feature (675)..(675): n is a, c, g, or t
  misc_feature (677)..(677): n is a, c, g, or t
  misc_feature (689)..(689): n is a, c, g, or t
  misc_feature (745)..(745): n is a, c, g, or t
aaagggcatggactgggtgtttggctggttgctaaggttcttcgtatggtgcgctccgctggatcacgtgagccagttccaaaatggcggcaggggtggccgggtggggggttgaggcagaggagttcgaagatgctcctgatgtggagccgctggagcctacacttagcaacatcatcgagcagcgcagcctgaagtggatcttcgtcgggggcaagggtggtgtgggcaagaccacctgcagctgcagcctggcagtccagctctccaaggggcgtgagagtgttctgatcatctccacagacccagcacacaacatctcagatgcttttgaccagaagttctcaaaggtgcctaccaaggtcaaaggctatgacaacctctttgctatggagattgaccccagcctgggcgtggcggagctgcctgacgagttcttcgaggaggacaacatgctgagcatgggcaagaagatgatgcaggaggccatgagcgcatttcccggcatcgatgaggccatgagctatgccgaggtcatgaggctggtgaagggcatgaacttgctgcggtgtggtgtatttgacagctgtgcacgcgcacgtgtgccnncnncncttgantgcttgctgcaancttncccccacccatgngtnggntgnngtgtgncctnntgcngngcttcattgcangatccaaagaaacccagcatccatgcccttttccattctccaccagcattgttgcncacattgcctgtgtgccct

SEQ ID NO: 336654 - DNA, 219 bp, Homo sapiens
agagaggctgatccaggagctggccaagtgcaagattgacacacacaatataattgtcaaccagctcgtcttccccgaccccgagaagccctgcaagatgtgtgaggcccgtcacaagatccaggccaagtatctggaccaggtgtgcccacccacccagcactggctcagcagaggcacctctgcccctttattctctgatcttttgctccaccatct

SEQ ID NO: 336655 - DNA, 219 bp, Homo sapiens
ttatacctgagtgagactatcacaagtttttaacttttttattgtaaaacatggcaaacatacagaaaagtgcataaaacttaaatgcacagcttaaggaatcataacaggcatgtaacccctgtccaggtcaagaaacgaaaacattaccaacctccagaagactttgtcccttcccaaccataaccctttcaaaaccattcacaacttgctccccac

SEQ ID NO: 336656 - DNA, 161 bp, Homo sapiens
agcattggtgttcctctcaagccctgggtccagctatctgccacacccctctgcaagaaaaaaaaaaagaagtcagagactcagccctgctggaactcttgcttccaaaaaatatgcaatcggccaggcacggtggctcacgcctgtaatcccagcacttt

SEQ ID NO: 336657 - DNA, 341 bp, Homo sapiens
gaacaatctgattcacacttggaggaggacacaggagctgaatcagatggggctgtggtgcctggggaggaaattttttattttgggatcctagaacgaagagacaatgaagatgacatggaattcatcaacatgctttccttgatctacacaaccgcctgccccatgctgctggcagagcagtctgttctcttggcctatgcagatgccatagtatacaagtgttaaaattgtggtggatcccagaagcgtgcagacatgttcagatgtgtccagagttcctttcttctggtgggttcgtggtctccctgacttcaggagtgaagctgcagatcttcatg

SEQ ID NO: 336658 - DNA, 141 bp, Homo sapiens
attcagaaaaataagacactttacatgtagggttaccatgataaggatgatggctgtcttttcctctgcaataatgaatgccagaagataatggaaaaacatcttttaagtgctgaacgaaaaattacttaccgttaacca

SEQ ID NO: 336659 - DNA, 418 bp, Homo sapiens
gctggagtgcagtggcacgatgtcggcttactgcaaactcggcctccaaggttcaagtgattctcccgccccagcctcctgagtagctgggattacaggtgcatgccaccacaccctgctagttttgtgtgatttttagatatctgcacgaaaatactacagagctgtcaccttactttcagggagcagccaacttctatataattcaatgtttcaacaaagatcattgagtagttaatacatgcagagaactatggctggttataaaaggtgtgggtgcaggtctctgtttatgaatggattaagtttcaagaatccctttgtgaaagtcaattatgtagaaacttcaaatgcattttcctacagaaatcatggttataaatggtgatttgatttccccatatttaactcataagtt

SEQ ID NO: 336660 - DNA, 379 bp, Homo sapiens
atggcttcagcctgacaaagtcgatgataaagaaaagagtttcccagggcccctgagaaccacaagcgtttcaccaacaccttccctcaccccctccagggaggaccgcagccagctgcccacatttcccagcttagaagaggctccttaacgtcagcgatagcttcagtgtactgggaaaccagtgtggtgtctgtgggctcctcccggaggaggaccgggaacgagtgggcgcctcctgcagagcactgtcaccagcccaggtcagggtgcagctgcagtactgacggacccagggtcatttcagataacaaacttggaagagaacttaatttcacctcagcagactgatgggctaaaactaagaaacccgtttgag

SEQ ID NO: 336661 - DNA, 232 bp, Homo sapiens
ggaaggtccctgccctcatgcagggaaaggtggggcagtgatggcatgaaacctatcattaccccattaataatctaatcaacatcgtggtaaatgccccaaaggaagctccagggagctccaaggtgtctgacacaggagcctgacctggggagctgctgctggggctgagcgctcaaaggtggaggaagaaaccaagggaaggagccgggaactgcaagcacaaaggccg

SEQ ID NO: 336662 - DNA, 340 bp, Homo sapiens
cactgactgatgatagttaatgttagagattttaggagagaagctgggaagacaaacctcaaacctctttagccagttaacgaaaaattctctattttattctttctttttcttaattatcctaatgtcattcatttaagaccttaatttttaacgagtctccttttgggtctctatttcagtcaaagctcgttgaagaccatcccttttcatttttaatgtgtaatttccatttaccaagagtagcttttggtacttttaccatttaccaagatcaaaccatttacctctacacatagcacctctctcctccatcccattatgcctctcactaaagcag

SEQ ID NO: 336663 - DNA, 376 bp, Homo sapiens
tgagaaaaagggaaaaatattaaaatcaactacataacagctgttatgaaccaattattatgttaagacatagttcttgttttcaaacagctctgagtctaggagctatttctgtacactatgtacacaaatagctattacaatggagaaaaatgataatgccattaaggaggcataaataaaattctgtgagttcagagtttaccttactaaaaaaaatagtatcattggaccaatattttaaagtagaatagaatagatcaaattaagacctgaagatatggcaaagaaaggctttctatacagaggggcagcttgagccaatagcatgggagtgctcaagagcagaatgtgttcaggaaacagttcatatttg

SEQ ID NO: 336664 - DNA, 331 bp, Homo sapiens
ttatataatggggaaataacacacagtatactgcctcaatacaatctcctttaaaaattactttcatattttactatacctacttattgtaataagtataatatgattagtttaacaatgttttaaaatttcatcttatcattattcttctattttgggatccatattttgaaggaaatcaaagttcatgctcttaaactatgcttgagttccagcacccagaccccctgcaaattaaggcagaactctcctgcctctcccagttcttctcagaccatggccagccccactccattcccagactaaacacctcccccactcccagactaaa

SEQ ID NO: 336665 - DNA, 468 bp, Homo sapiens
atcaggtacaggccgactcacagaaacaggaagttggatggtggttgccaggtactggggggagaaataaggggagctaccgtgtaatggtcatagagtttcaggtttgcaagatgaaaaagttctggggacaggttgcacaaaaatgtgcgtatacttaacactacagactgtacacttagaattggttaaaatggtaaattttatgtcatatgcattttatcacaattttaaaaagtcacttatgatccacatgatctcaacatcagaactgaccaatgttaacattttggtatataactctgtctagtttgtagatttttctttcctaggtgtatgtgtttgcaaatgtgtgtgtgcatacacacataccaacacaaaatttgctctgttcgtctgacagttctgtaggcatgtagagaactacaaattagacaagatagttcctgctcacatgagcagagagat

SEQ ID NO: 336666 - DNA, 328 bp, Homo sapiens
ctattttttatcaaatcatcttaaagcaaaacaatccgtctctgcaacacaaaagcaaataagtattgaaaacttatttaagtaagatcgattttgctaatgtcaagcttaaggcaactcagcaagaaatgacaacaactgtactaaattatctacattcgtgacatcttagctgtgtctacaaggcaccaaaacactgtgatgaaaagtaaaagtcagtaattgcccagatgttatgtctagtcaccaacagctggaacttcctcagtatttgctctctctccctttctctctaagcatctttgggagtttgctaacagaccttttc

SEQ ID NO: 336667 - DNA, 326 bp, Homo sapiens
gagaacacaaggatttgtgagaaagatgagaagttgaaatcaggtttatgatgaatttgaaatgcctataaaacaaggtggccgccctgcaaggggacctggccagcctccgggcagagctgcagggccaccacgcggagaagctgccagcaggagcaggagcccccaaggccggcctggaggaagctccagctgtcaccgcgggactgaaaatctttgaaccaccagctccaggagaaggcaactccagtcagaacagcagaaataagcgtgccgttcagggtccagaagaaacaggtatgttttgggcacagacacttttagga

SEQ ID NO: 336668 - DNA, 2762 bp, Homo sapiens
gaaattcttacaaaaactgaaagtgaaatgaggaagacagattgagcaatccaatcggagggtaaatgccagcaaacctactgtacagtaggggtagagatgcagaaaggcagaaaggagaaaattcaggataactctcctgaggggtgagccaagccctgccatgtagtgcacgcaggacatcaacaaacacagataacaggaaatgatccattccctgtggtcacttattctaaaggccccaaccttcaaagttcaagtagtgatatggatgactccacagaaagggagcagtcacgccttacttcttgccttaagaaaagagaagaaatgaaactgaaggagtgtgtttccatcctcccacggaaggaaagcccctctgtccgatcctccaaagacggaaagctgctggctgcaaccttgctgctggcactgctgtcttgctgcctcacggtggtgtctttctaccaggtggccgccctgcaaggggacctggccagcctccgggcagagctgcagggccaccacgcggagaagctgccagcaggagcaggagcccccaaggccggcctggaggaagctccagctgtcaccgcgggactgaaagtgagtttgcagcagctgcaagacgcaggcaagatcctgcctacactgctgcctctccctcgcctcagctgtctttctaataacttgaagtttttctgttcatagatctttgaaccaccagctccaggagaaggcaactccagtcagaacagcagaaataagcgtgccgttcagggtccagaagaaacagtcactcaagactgcttgcaactgattgcagacagtgaaacaccaactatacaaaaaggatcttacacatttgttccatggcttctcagctttaaaaggggaagtgccctagaagaaaaagagaataaaatattggtcaaagaaactggttacttttttatatatggtcaggttttatatactgataagacctacgccatgggacatctaattcagaggaagaaggtccatgtctttggggatgaattgagtctggtgactttgtttcgatgtattcaaaatatgcctgaaacactacccaataattcctgctattcagctggcattgcaaaactggaagaaggagatgaactccaacttgcaataccaagagaaaatgcacaaatatcactggatggagatgtcacattttttggtgcattgaaactgctgtgacctacttacaccatgtctgtagctattttcctccctttctctgtacctctaagaagaaagaatctaactgaaaataccaaaaaaaaaaaaaaaaaaaaagtagttaccattgccttttctgtgagctatttgttttggtttgctgaaactagtccaaaacaggaaatttaacagacagccacagccaaagagtgtcatgtgaattacaagaaatagagcccatttagggaaagatagaactagaaaggcttttcattataattccatgttgaacaattgagtcatagcttcttatcttggaggaaggacacaattcaaaggggcagtaaggattttgtaaaacgtggcatccataatttactatggagcaagtgcccacatctctaggacattaagacatttatgagaaatctcaggattcatcttctgtttttatgttaaatgcactccctccttttcagttaacattataaaaagtaaaaaatgaaaattttagaaatcttgcattagacacatgaaaaaataactaaaagtttaaatttaaatatgaaacaattttgctgaaaatagtatccatatactatttaagtcttttatggttatttcaagtatacaatttctatctgtaatgtaatatattacccacacatttttttcacaggagagagagaatatcctcatttgtttatgctcatgtgtattttctatagtgaatttcagaaacttttaatatcaggtaatttcaatttatgcctataaagcattgattgaaaaataactagaattgtgcatatataacacataatctccaacagaagttactgaatacattcatactaatgtaatgtaatttccctttatttcttgctcttctgtttcaaactgctgctattgtagtttacatatcccaacctttaaaaatattcctcttattagctttatattcactttatagaagttgagttttaattaaaattcttggcatcctgaagtatgtcacatagcatgtgctccttataaatatgttgatatctcagaagacagcatcccggttttcattttataaagtaccatacttaagaatgctgtaatacttatcttttataacatgtttccttcgctttgcttgtcttttatgtcatcagttttaactgtttacttcatttaacagtttacatcattcaacagtttacttcattaaacagtaggtggaaaaatagatgccagtctatgaaaatcttcccatctatatcaaaatacttttcaaggatatacttttcaaaacaaacgatttaaattttatgtttaaaatataaactttagatttaaactttatttaaatatctggttcctatgattttgacttcagtaagttcaaataaaatatattttgcaattcatttttacattataatttaaaaagaagaagcgataagtggagtcagtttcaatgctaggtggggtggttaatgatttttctggtgttgctgctaatgtggattaacaaataaaaacattcattgccttttaaa

SEQ ID NO: 336669 - DNA, 2880 bp, Homo sapiens
gaaattcttacaaaaactgaaagtgaaatgaggaagacagattgagcaatccaatcggagggtaaatgccagcaaacctactgtacagtaggggtagagatgcagaaaggcagaaaggagaaaattcaggataactctcctgaggggtgagccaagccctgccatgtagtgcacgcaggacatcaacaaacacagataacaggaaatgatccattccctgtggtcacttattctaaaggccccaaccttcaaagttcaagtagtgatatggatgactccacagaaagggagcagtcacgccttacttcttgccttaagaaaagagaagaaatgaaactgaaggagtgtgtttccatcctcccacggaaggaaagcccctctgtccgatcctccaaagacggaaagctgctggctgcaaccttgctgctggcactgctgtcttgctgcctcacggtggtgtctttctaccaggtggccgccctgcaaggggacctggccagcctccgggcagagctgcagggccaccacgcggagaagctgccagcaggagcaggagcccccaaggccggcctggaggaagctccagctgtcaccgcgggactgaaagtgagtttgcagcagctgcaagacgcaggcaagatcctgcctacactgctgcctctccctcgcctcagctgtctttctaataacttgaagtttttctgttcatagatctttgaaccaccagctccaggagaaggcaactccagtcagaacagcagaaataagcgtgccgttcagggtccagaagaaacagtcactcaagactgcttgcaactgattgcagacagtgaaacaccaactatacaaaaaggctcccttctgttgccacatttgggccaaggaatggagagatttcttcgtttggaaacattttgccaaactcttcagatactctttcctctctgggaatcaaaggaaaatctctactagatcttacacatttgttccatggcttctcagctttaaaaggggaagtgccctagaagaaaaagagaataaaatattggtcaaagaaactggttacttttttatatatggtcaggttttatatactgataagacctacgccatgggacatctaattcagaggaagaaggtccatgtctttggggatgaattgagtctggtgactttgtttcgatgtattcaaaatatgcctgaaacactacccaataattcctgctattcagctggcattgcaaaactggaagaaggagatgaactccaacttgcaataccaagagaaaatgcacaaatatcactggatggagatgtcacattttttggtgcattgaaactgctgtgacctacttacaccatgtctgtagctattttcctccctttctctgtacctctaagaagaaagaatctaactgaaaataccaaaaaaaaaaaaaaaaaaaaagtagttaccattgccttttctgtgagctatttgttttggtttgctgaaactagtccaaaacaggaaatttaacagacagccacagccaaagagtgtcatgtgaattacaagaaatagagcccatttagggaaagatagaactagaaaggcttttcattataattccatgttgaacaattgagtcatagcttcttatcttggaggaaggacacaattcaaaggggcagtaaggattttgtaaaacgtggcatccataatttactatggagcaagtgcccacatctctaggacattaagacatttatgagaaatctcaggattcatcttctgtttttatgttaaatgcactccctccttttcagttaacattataaaaagtaaaaaatgaaaattttagaaatcttgcattagacacatgaaaaaataactaaaagtttaaatttaaatatgaaacaattttgctgaaaatagtatccatatactatttaagtcttttatggttatttcaagtatacaatttctatctgtaatgtaatatattacccacacatttttttcacaggagagagagaatatcctcatttgtttatgctcatgtgtattttctatagtgaatttcagaaacttttaatatcaggtaatttcaatttatgcctataaagcattgattgaaaaataactagaattgtgcatatataacacataatctccaacagaagttactgaatacattcatactaatgtaatgtaatttccctttatttcttgctcttctgtttcaaactgctgctattgtagtttacatatcccaacctttaaaaatattcctcttattagctttatattcactttatagaagttgagttttaattaaaattcttggcatcctgaagtatgtcacatagcatgtgctccttataaatatgttgatatctcagaagacagcatcccggttttcattttataaagtaccatacttaagaatgctgtaatacttatcttttataacatgtttccttcgctttgcttgtcttttatgtcatcagttttaactgtttacttcatttaacagtttacatcattcaacagtttacttcattaaacagtaggtggaaaaatagatgccagtctatgaaaatcttcccatctatatcaaaatacttttcaaggatatacttttcaaaacaaacgatttaaattttatgtttaaaatataaactttagatttaaactttatttaaatatctggttcctatgattttgacttcagtaagttcaaataaaatatattttgcaattcatttttacattataatttaaaaagaagaagcgataagtggagtcagtttcaatgctaggtggggtggttaatgatttttctggtgttgctgctaatgtggattaacaaataaaaacattcattgccttttaaa

SEQ ID NO: 336670 - DNA, 2657 bp, Homo sapiens
gaaattcttacaaaaactgaaagtgaaatgaggaagacagattgagcaatccaatcggagggtaaatgccagcaaacctactgtacagtaggggtagagatgcagaaaggcagaaaggagaaaattcaggataactctcctgaggggtgagccaagccctgccatgtagtgcacgcaggacatcaacaaacacagataacaggaaatgatccattccctgtggtcacttattctaaaggccccaaccttcaaagttcaagtagtgatatggatgactccacagaaagggagcagtcacgccttacttcttgccttaagaaaagagaagaaatgaaactgaaggagtgtgtttccatcctcccacggaaggaaagcccctctgtccgatcctccaaagacggaaagctgctggctgcaaccttgctgctggcactgctgtcttgctgcctcacggtggtgtctttctaccaggtggccgccctgcaaggggacctggccagcctccgggcagagctgcagggccaccacgcggagaagctgccagcaggagcaggagcccccaaggccggcctggaggaagctccagctgtcaccgcgggactgaaaatctttgaaccaccagctccaggagaaggcaactccagtcagaacagcagaaataagcgtgccgttcagggtccagaagaaacagtcactcaagactgcttgcaactgattgcagacagtgaaacaccaactatacaaaaaggatcttacacatttgttccatggcttctcagctttaaaaggggaagtgccctagaagaaaaagagaataaaatattggtcaaagaaactggttacttttttatatatggtcaggttttatatactgataagacctacgccatgggacatctaattcagaggaagaaggtccatgtctttggggatgaattgagtctggtgactttgtttcgatgtattcaaaatatgcctgaaacactacccaataattcctgctattcagctggcattgcaaaactggaagaaggagatgaactccaacttgcaataccaagagaaaatgcacaaatatcactggatggagatgtcacattttttggtgcattgaaactgctgtgacctacttacaccatgtctgtagctattttcctccctttctctgtacctctaagaagaaagaatctaactgaaaataccaaaaaaaaaaaaaaaaaaaaagtagttaccattgccttttctgtgagctatttgttttggtttgctgaaactagtccaaaacaggaaatttaacagacagccacagccaaagagtgtcatgtgaattacaagaaatagagcccatttagggaaagatagaactagaaaggcttttcattataattccatgttgaacaattgagtcatagcttcttatcttggaggaaggacacaattcaaaggggcagtaaggattttgtaaaacgtggcatccataatttactatggagcaagtgcccacatctctaggacattaagacatttatgagaaatctcaggattcatcttctgtttttatgttaaatgcactccctccttttcagttaacattataaaaagtaaaaaatgaaaattttagaaatcttgcattagacacatgaaaaaataactaaaagtttaaatttaaatatgaaacaattttgctgaaaatagtatccatatactatttaagtcttttatggttatttcaagtatacaatttctatctgtaatgtaatatattacccacacatttttttcacaggagagagagaatatcctcatttgtttatgctcatgtgtattttctatagtgaatttcagaaacttttaatatcaggtaatttcaatttatgcctataaagcattgattgaaaaataactagaattgtgcatatataacacataatctccaacagaagttactgaatacattcatactaatgtaatgtaatttccctttatttcttgctcttctgtttcaaactgctgctattgtagtttacatatcccaacctttaaaaatattcctcttattagctttatattcactttatagaagttgagttttaattaaaattcttggcatcctgaagtatgtcacatagcatgtgctccttataaatatgttgatatctcagaagacagcatcccggttttcattttataaagtaccatacttaagaatgctgtaatacttatcttttataacatgtttccttcgctttgcttgtcttttatgtcatcagttttaactgtttacttcatttaacagtttacatcattcaacagtttacttcattaaacagtaggtggaaaaatagatgccagtctatgaaaatcttcccatctatatcaaaatacttttcaaggatatacttttcaaaacaaacgatttaaattttatgtttaaaatataaactttagatttaaactttatttaaatatctggttcctatgattttgacttcagtaagttcaaataaaatatattttgcaattcatttttacattataatttaaaaagaagaagcgataagtggagtcagtttcaatgctaggtggggtggttaatgatttttctggtgttgctgctaatgtggattaacaaataaaaacattcattgccttttaaa

SEQ ID NO: 336671 - DNA, 2745 bp, Homo sapiens
gaaattcttacaaaaactgaaagtgaaatgaggaagacagattgagcaatccaatcggagggtaaatgccagcaaacctactgtacagtaggggtagagatgcagaaaggcagaaaggagaaaattcaggataactctcctgaggggtgagccaagccctgccatgtagtgcacgcaggacatcaacaaacacagataacaggaaatgatccattccctgtggtcacttattctaaaggccccaaccttcaaagttcaagtagtgatatggatgactccacagaaagggagcagtcacgccttacttcttgccttaagaaaagagaagaaatgaaactgaaggagtgtgtttccatcctcccacggaaggaaagcccctctgtccgatcctccaaagacggaaagctgctggctgcaaccttgctgctggcactgctgtcttgctgcctcacggtggtgtctttctaccaggtggccgccctgcaaggggacctggccagcctccgggcagagctgcagggccaccacgcggagaagctgccagcaggagcaggagcccccaaggccggcctggaggaagctccagctgtcaccgcgggactgaaaatctttgaaccaccagctccaggagaaggcaactccagtcagaacagcagaaataagcgtgccgttcagggtccagaagaaacagtcactcaagactgcttgcaactgattgcagacagtgaaacaccaactatacaaaaaggatcttacacatttgttccatggcttctcagctttaaaaggggaagtgccctagaagaaaaagagaataaaatattggtcaaagaaactggttacttttttatatatggtcaggtaggttgaaaccctaattctggttttactgttcaaagcctcccattttgtgttcatttctgacacagttttttggtttgtttcttaggttttatatactgataagacctacgccatgggacatctaattcagaggaagaaggtccatgtctttggggatgaattgagtctggtgactttgtttcgatgtattcaaaatatgcctgaaacactacccaataattcctgctattcagctggcattgcaaaactggaagaaggagatgaactccaacttgcaataccaagagaaaatgcacaaatatcactggatggagatgtcacattttttggtgcattgaaactgctgtgacctacttacaccatgtctgtagctattttcctccctttctctgtacctctaagaagaaagaatctaactgaaaataccaaaaaaaaaaaaaaaaaaaaagtagttaccattgccttttctgtgagctatttgttttggtttgctgaaactagtccaaaacaggaaatttaacagacagccacagccaaagagtgtcatgtgaattacaagaaatagagcccatttagggaaagatagaactagaaaggcttttcattataattccatgttgaacaattgagtcatagcttcttatcttggaggaaggacacaattcaaaggggcagtaaggattttgtaaaacgtggcatccataatttactatggagcaagtgcccacatctctaggacattaagacatttatgagaaatctcaggattcatcttctgtttttatgttaaatgcactccctccttttcagttaacattataaaaagtaaaaaatgaaaattttagaaatcttgcattagacacatgaaaaaataactaaaagtttaaatttaaatatgaaacaattttgctgaaaatagtatccatatactatttaagtcttttatggttatttcaagtatacaatttctatctgtaatgtaatatattacccacacatttttttcacaggagagagagaatatcctcatttgtttatgctcatgtgtattttctatagtgaatttcagaaacttttaatatcaggtaatttcaatttatgcctataaagcattgattgaaaaataactagaattgtgcatatataacacataatctccaacagaagttactgaatacattcatactaatgtaatgtaatttccctttatttcttgctcttctgtttcaaactgctgctattgtagtttacatatcccaacctttaaaaatattcctcttattagctttatattcactttatagaagttgagttttaattaaaattcttggcatcctgaagtatgtcacatagcatgtgctccttataaatatgttgatatctcagaagacagcatcccggttttcattttataaagtaccatacttaagaatgctgtaatacttatcttttataacatgtttccttcgctttgcttgtcttttatgtcatcagttttaactgtttacttcatttaacagtttacatcattcaacagtttacttcattaaacagtaggtggaaaaatagatgccagtctatgaaaatcttcccatctatatcaaaatacttttcaaggatatacttttcaaaacaaacgatttaaattttatgtttaaaatataaactttagatttaaactttatttaaatatctggttcctatgattttgacttcagtaagttcaaataaaatatattttgcaattcatttttacattataatttaaaaagaagaagcgataagtggagtcagtttcaatgctaggtggggtggttaatgatttttctggtgttgctgctaatgtggattaacaaataaaaacattcattgccttttaaa

SEQ ID NO: 336672 - DNA, 609 bp, Homo sapiens
gaacccagtcatatacttcttagcaccatagctaaatcgatatactctactcacacatcctctccattctctgaattcccacaaagactgttattgctggggctcataaaattatactccaaagtatgacgctttggcatccagagtgctttgaactaaaggagactgaaggccccagaagccaagtttccctctgaccttctcctgccttcctgtcttccaccccctacttttcccctgaagtgagtcctggaaaccagaattcttcttgcccaaagcaagccgtgacaccctggaaatatcactctaaccttccttgcctttccgtgtggcagctggccatgaagaaattctctgacctaccttgtttgatagcagatcacaagaccctggttccagagcggtcctgctttacaccgagggaaaggaatgtcatacagaaaggccaagaagaatctgaagagatgtccaatcacctttgcacgtggctgcccattcttcattgaacctaagcattaaaatagacagtttcccctgggtctttgggtcttcatttctgaagactccatgtcatgtaaaactttgattaaataaatgtatcatgcatta

SEQ ID NO: 336673 - DNA, 791 bp, Homo sapiens
gaaaaatcaagtctttactagaggattacttggatcagaaaccggagcctgatggcaacctcccagggcatgcgtgcggagtgctggacagttcacgattcgtcaactgctggactcgttttgctgagtggggtgtccaggctgaggacaaatctgagctacattcctcaagacaaaggagggcactcattgagaaaaaggcaaagaaaagaaggagatacaaagagagggtcatgctaagtaaggaatttgggaaagaaatggacatgtgtacagggatgatcatggataagcctgggcatgtgggttgaaatcattctatccagctctcacaggatcctcagtaaaacaagctcttgcagcgatgggatttgttcactttggacatgagacagcctggagagtctattttcttctattccccctcactttcttaaagtcttacttaaatgtttataatgtttacttttgttttagctaaaaaactaaacttttctcagtttaaaactactaattctgttatttcaaatatcccaatccttatttgaataactgtgatgtgtttgttatcctccttacagtagcccggtctgattctggtgaggaattgggtcatgttttctgtccccttagaccagtatggaaggaggctgtggtgtgtgacacccaaactcctgagacgggatagagaagataccttattttcacggacacagtctgattaccgcactccgattacgatctgatctgtgtgaaaacccttcctgtccatgctgatcctcgacagcttg

SEQ ID NO: 336674 - DNA, 189 bp, Homo sapiens
tgtgtgcatgtgtttgtgtgtgtgtgtgtgtgtgtgtgtgtgtgtgttggtcaggactcttaagctgtaattgccaataagccagcaagaccagaatggttcatgaactgaaaactccagacacccctgtatcttggaactacatcaatatgcattctctctgtattgggctattctgctttcctctgt

SEQ ID NO: 336675 - DNA, 109 bp, Homo sapiens
tgtttaccaactgtgtgttaagaacatactgccttggctggagggatgtccccccaggtttcctccctaagtggattcaatgttgagaataatggagaaaactaccccc

SEQ ID NO: 336676 - DNA, 504 bp, Homo sapiens
gtgtcaattttttctttgatgtatagtgtttctgaggttttaagaaatttaagaaatctttgtctaccctgatggccttgcattctgaaaggaaagaggctaattcagggcagcctcattcattaaagtttcaacaaacatcagagcatgagtgccttttccagcctttgacattaagcccctgggctttattttcctataatggtatgagcaaccctcaaatgcaatgtggcagagattgtctggcttgttcagaaggcagagtttcatttaatctggtctctatagaagtaggattggcccaggccccaaaaaacagacagttaactgagaggtccccaaacccagagagaacctaagagcaatttcccgatagtaggaacttgctctcattgcccattttcagatgtgtcatttacacaagtgaaagcaccgtcttataagataagtctttatagggattctcggcttgccccagttttattattgagtggggaaaaaacc

SEQ ID NO: 336677 - DNA, 292 bp, Homo sapiens
gcctctgtgacttttccacgccgtgcaccccctcctccctgtgtctcattccccgattctgaaggaagacccccagggtagtaatttaaggcttaggatcccaggtacgcggacctgcgcaaggagcaaattttcggacttattctgacgcctgcgtgttatttgtccgtggcgttctctgtaaattcctgtaaggaattactttttttttctcatccctggacttgtctttgggggagagagggaaaaagtgtagcgctgcttttctttttatccttaataatcctatttt

SEQ ID NO: 336678 - DNA, 1151 bp, Homo sapiens
ctgccgtgggacatggtttctaaagaacaaatgccagctgtggcgctgaaagggcctcctcatgtcagggtgcccctggctgcaggacacaggccacttctggtcccagattgacgggcctccagcccaagtggcacctgggtccctctgacctgggctggcatcccccaggccatggggtcacaggggaggtcactgccactcttgctggctgggagaggcgtgtccccacgtgcgtctggccgcagtcagtggccaggacctgcctgcgtgtggacagttaggcctcctgcctaggaagcagtgatgcttgccggctgctggtgggggcaggggaggggctggctgccggatcccacgcagcctggacgtggctgataagctgtgaactcattatcggagggggcagctggtgcccctctccctgcagccggcaccccagccttgccctggggccagacccctgcactgtgcccagccttgcgggtgagactgggggagcgagcaggcctctgttgggacttgggagtctccagggtcccccagagcccagagatcctccctccaggactctggagacagccgccgttctgccctccctgctgacccctctgccctccctcaggtctgcctggccgcctttctgagaacaaggagccgattgttgtcaccactgctgtctgcctcctgctgtggatgccttgcttggcgctggcagtgcccacaccggcagggacctggggacttggagccggacctaggtcgccggccgtgtgcctggtgtcggggcagggctggtggtcaccccccctggggttggccccgtgggctcagggccctgcctccctgtgccctgtccgtagggaccctctcatgccctctggccagcctggagagctcttggcagaaaggccaggactgaggtggctggcatggcgcctcccgcgctgttcctccctccctgcctggccttcaggggcgcgtcgtcctccccagaccctcctctgtctgcgtgtgagcccgtgagcctgtgtgggcttatgtgtgtggctgggattccagccagggtttgtgcgcgtgagcctctgtctgcgtgtgagcccgtgagcctgtgtgtgagagtgtgtgggtgccatgcctgtgtgagtgtg

SEQ ID NO: 336679 - DNA, 278 bp, Homo sapiens
agcacttggcctgaggctatgttaataaagatactgccttcaaaatagggaggtgctctacagtgatcattcattcaactgacctttgtcattggccagacataggacagaatggttctgcatctggggaacaccactgaagtaaaagaaaaatctctggccttttgtagcatatgttccagtgggaagaggcagacgatagatacactataaccagagtaaggaaggaaagtgctagaaggtggtaagtgctgtgaggcaggtgatccaggatgtgg

SEQ ID NO: 336680 - DNA, 286 bp, Homo sapiens
ggcacagaaattaaaatgacactgtaaggctgcaaatatcagataaactcacaactttagagccagaaaggatcacaggaaacatcaacatccagttctccctcttttgcttcattgctgagaagaggaaagccctgaggaacaaaggcacttgtccagggtctcccagccagtggggacagagacagggccagaatctggtcttcctgatgtcccagtacaatgtccttccttcttgactgcacaacccttgcattgtcgaatttaatttctgtgcccatttcaa

SEQ ID NO: 336681 - DNA, 103 bp, Homo sapiens
tctgtaccaatctcctggacaggtggagggaaggccccttccccgacagatcttgcaatattgacaaggcatcccaaactaatgctatgaaagaaaacattcg

SEQ ID NO: 336682 - DNA, 338 bp, Homo sapiens
tgaacaactcaaatgcacctcaaactcaacatgtataaaagtgaaccaattatcttctcccaaaactttatcttcttccaatattatctatcccagtatatagtggcccattcctcaaatccaatcaatcatcaagtatgcaattttacttactaagtatctctcaaatctattgcagctaccatcacccaggtccaaactaaaataatttctcttaggctactgcaatagcttcctatctgatctacccaaatccaactattctctagatggttgccagaacaatcttcctgaagcttaaattaaaccacctcttgcttctctctggataaaatgtt

SEQ ID NO: 336683 - DNA, 1625 bp, Homo sapiens
ctggaagggagggggcggggttgtgagcaaatcttggtggtggtggtggtggggcggcctgagaagatattatggctgctgccacggagcataatcgcccgagcagcggtgacaggaacctggagcgaagatgcagccccaacctctcccgagaggtgctctacgaaatctttcgctccctacacaccctggttggacagcttgacctcagagatgatgtggtgaaaattacaatcgattggaacaagctccagagcctctcggcattccagcctgcattgctctttagtgcacttgaacaacacattttatatttacagccttttttagcaaaacttcagtctccgattaaagaggagaatacaactgctgttgaagagataggaagaacagaaatggggaacaaaaatgaagtaaatgacaaattttccattggcgacctacaagaggaagaaaagcacaaagaaagtgatttaagagatgtgaaaaagacacagatccattttgatccagaagtagttcagataaaggctggaaaagcagaaattgacagacgaatatctgcatttattgaaagaaagcaagctgaaatcaatgaaaacaacgtcagggaattttgcaatgttattgattgtaatcaagaaaatagttgtgcaagaactgatgcgatttttaccccttaccccggatttaaaagtcacgtaaaagtttctagagttgtgaatacatacggaccacagactagacctgaaggaattccagggtcaggtcataaacctaacagcatgcttcgagactgtggtaatcaggctgtagaagaacgactacaaaatattgaggcccacttgcggttacagacaggtggtccagtgccaagagacatttatcagagaattaaaaaacttgaggataaaatccttgaattggaaggcatctctcctgaatattttcagtctgtaagcttttctggaaaaagaagaaaagttcaaccacctcaacagaactattcactggctgaacttgatgagaaaattagtgccctcaaacaagccctcctcagaaaatcaagagaagcagaatccatggcaacccaccaccttccatgaaaaactcctctcgtccttgtcattttacttttttgtatacatatgtgtaacttacactgttattaattcaacggatatatatttatcaatgtagacttctctgtgaagtcaaggtttattttcacatgagtccagcttgcagcaagtaatcttcaaatattccagtaagttttgaaataatgaatgcattgaaaatagcattgttggaatttattcccttctgttttaaaggaggtattttggaaattgaaaaacttaatttacaagtgctggtacatcttttttcttttgtggaccacaggaaggaagatttattttgatattgatactttaaaaggactttatatttgtaacattgatgttaaccagtttattagtttaaatcagtactttgcatataataagcattcaacaaaaatttattgactgaaatgaattttaaatgcatgtgtatgaacttgtttttcttaatctttaagatgtcagtattcatgtaaataaacaatagatccagcttta

SEQ ID NO: 336684 - DNA, 1985 bp, Homo sapiens
ctggaagggagggggcggggttgtgagcaaatcttggtggtggtggtggtggggcggcctgagaagatattatggctgctgccacggagcataatcgcccgagcagcggtgacaggaacctggagcgaagatgcagccccaacctctcccgagaggtgctctacgaaatctttcgctccctacacaccctggttggacagcttgacctcagagatgatgtggtgaaaattacaatcgattggaacaagctccagagcctctcggcattccagcctgcattgctctttagtgcacttgaacaacacattttatatttacagccttttttagcaaaacttcagtctccgattaaagaggagaatacaactgctgttgaagagataggaagaacagaaatggggaacaaaaatgaagtaaatgacaaattttccattggcgacctacaagaggaagaaaagcacaaagaaagtgatttaagagatgtgaaaaagacacagatccattttgatccagaagtagttcagataaaggctggaaaagcagaaattgacagacgaatatctgcatttattgaaagaaagcaagctgaaatcaatgaaaacaacgtcagggaattttgcaatgttattgattgtaatcaagaaaatagttgtgcaagaactgatgcgatttttaccccttaccccggatttaaaagtcacgtaaaagtttctagagttgtgaatacatacggaccacagactagacctgaaggaattccagggtcaggtcataaacctaacagcatgcttcgagactgtggtaatcaggctgtagaagaacgactacaaaatattgaggcccacttgcggttacagacaggtggtccagtgccaagagacatttatcagagaattaaaaaacttgaggataaaatccttgaattggaaggcatctctcctgaatattttcagtctgtagcctgtgaacatacatgacacaagccctatgggaaagaagatttcatactcatcacccttctataataggatgaatgagccatctttaggaacctcacttggaatacagtcagctctaagagtgtccttgcaaacaggagaagttgagcacataccttacagaggacatagtacattattcatcaccctcaccatcatgctgggagtacatgcatgagcttttctggaaaaagaagaaaagttcaaccacctcaacagaactattcactggctgaacttgatgagaaaattagtgccctcaaacaagccctcctcagaaaatcaagagaagcagaatccatggcaacccaccaccttccatgaaaaactcctctcgtccttgtcattttacttttttgtatacatatgtgtaacttacactgttattaattcaacggatatatatttatcaatgtagacttctctgtgaagtcaaggtttattttcacatgagtccagcttgcagcaagtaatcttcaaatattccagtaagttttgaaataatgaatgcattgaaaatagcattgttggaatttattcccttctgttttaaaggaggtattttggaaattgaaaaacttaatttacaagtgctggtacatcttttttcttttgtggaccacaggaaggaagatttattttgatattgatactttaaaaggactttatatttgtaacattgatgttaaccagtttattagtttaaatcagtactttgcatataataagcattcaacaaaaatttattgactgaaatgaattttaaatgcatgtgtatgaacttgtttttcttaatctttaagatgtcagtattcatgtaaataaacaatagatccagctttaaaacaacaaaacaaaaatgtcctcgctggcctcagcagtggactctgcagccgcttcccttcatgagggtaagcaatgagctcgccactgactcctgccatcgatctcatgcatgccccacccgctcactcccaaaagccgact

SEQ ID NO: 336685 - DNA, 582 bp, Homo sapiens
gagagagcaagcacatgtgtcactaatgttattcctctgttctccctgctaactctattattataaaccaccaggggatagaaattgacgagaattgaaatgctcagcaggattccttggcccattcaattctttgctggctcaaaacagtgctagcaagaattgctgtggagagtgactagcagtcatacactcacaccatgctgaatttctcactgatggtcagttaatctatatgtttggaatatagttctggaatggatgatagcttctttttttaacccttagccccatgaaatggtaggaagagaatggagaaaggatggccctttaagcatattttgaggtgcctccaaaaaaaaaaaaaaggaggaaagatgtctatttagtctctagatataaaagctaagtggatttggaattttatgcatactatttgatttatcaacagaactactaaggaaagttcaactgaaaaaaatacaaatgtattttaatatgttagtgtgttccttttaatacctacaaatttaacctaactataagcagtggaatttttaaaaatcaaatttcatagggggg

SEQ ID NO: 336686 - DNA, 1855 bp, Homo sapiens
atttaactattaactagtttaactggctgataaatcgcttttgcagaaatgtcatagtaaaattggttttaaattgaaatgggcttcttcgatcaagtcactgtttcgtttcatggtgtaaaattcaagttttaaatgagaaacaatttaaaagtatgcttgtttacctgccttttaaaaggaaatattttctatcttacatagaccattttctagccgtaaaagtttgttttggggctggtactagcgcaagtggacaaagcaggcatttgtgtcaaagataatgcttgacctcagagatgatgtggtgaaaattacaatcgattggaacaagctccagagcctctcggcattccagcctgcattgctctttagtgcacttgaacaacacattttatatttacagccttttttagcaaaacttcagtctccgattaaagaggagaatacaactgctgttgaagagataggaagaacagaaatggggaacaaaaatgaagtaaatgacaaattttccattggcgacctacaagaggaagaaaagcacaaagaaagtgatttaagagatgtgaaaaagacacagatccattttgatccagaagtagttcagataaaggctggaaaagcagaaattgacagacgaatatctgcatttattgaaagaaagcaagctgaaatcaatgaaaacaacgtcagggaattttgcaatgttattgattgtaatcaagaaaatagttgtgcaagaactgatgcgatttttaccccttaccccggatttaaaagtcacgtaaaagtttctagagttgtgaatacatacggaccacagactagacctgaaggaattccagggtcaggtcataaacctaacagcatgcttcgagactgtggtaatcaggctgtagaagaacgactacaaaatattgaggcccacttgcggttacagacaggtggtccagtgccaagagacatttatcagagaattaaaaaacttgaggataaaatccttgaattggaaggcatctctcctgaatattttcagtctgtaagcttttctggaaaaagaagaaaagttcaaccacctcaacagaactattcactggctgaacttgatgagaaaattagtgccctcaaacaagccctcctcagaaaatcaagagaagcagaatccatggcaacccaccaccttccatgaaaaactcctctcgtccttgtcattttacttttttgtatacatatgtgtaacttacactgttattaattcaacggatatatatttatcaatgtagacttctctgtgaagtcaaggtttattttcacatgagtccagcttgcagcaagtaatcttcaaatattccagtaagttttgaaataatgaatgcattgaaaatagcattgttggaatttattcccttctgttttaaaggaggtattttggaaattgaaaaacttaatttacaagtgctggtacatcttttttcttttgtggaccacaggaaggaagatttattttgatattgatactttaaaaggactttatatttgtaacattgatgttaaccagtttattagtttaaatcagtactttgcatataataagcattcaacaaaaatttattgactgaaatgaattttaaatgcatgtgtatgaacttgtttttcttaatctttaagatgtcagtattcatgtaaataaacaatagatccagctttaaaacaacaaaacaaaaatgtcctcgctggcctcagcagtggactctgcagccgcttcccttcatgagggtaagcaatgagctcgccactgactcctgccatcgatctcatgcatgccccacccgctcactcccaaaagccgact

SEQ ID NO: 336687 - DNA, 1250 bp, Homo sapiens
gagagagcaagcacatgtgtcactaatgttattcctctgttctccctgctaactctattattataaaccaccaggggatagaaattgacgagaattgaaatgctcagcaggattccttggcccattcaattctttgctggctcaaaacagtgctagcaagaattgctgtggagagtgactagcagtcatacactcacaccatgctgaatttctcactgatgaaaatagttgtgcaagaactgatgcgatttttaccccttaccccggatttaaaagtcacgtaaaagtttctagagttgtgaatacatacggaccacagactagacctgaaggaattccagggtcaggtcataaacctaacagcatgcttcgagactgtggtaatcaggctgtagaagaacgactacaaaatattgaggcccacttgcggttacagacagagcttttctggaaaaagaagaaaagttcaaccacctcaacagaactattcactggctgaacttgatgagaaaattagtgccctcaaacaagccctcctcagaaaatcaagagaagcagaatccatggcaacccaccaccttccatgaaaaactcctctcgtccttgtcattttacttttttgtatacatatgtgtaacttacactgttattaattcaacggatatatatttatcaatgtagacttctctgtgaagtcaaggtttattttcacatgagtccagcttgcagcaagtaatcttcaaatattccagtaagttttgaaataatgaatgcattgaaaatagcattgttggaatttattcccttctgttttaaaggaggtattttggaaattgaaaaacttaatttacaagtgctggtacatcttttttcttttgtggaccacaggaaggaagatttattttgatattgatactttaaaaggactttatatttgtaacattgatgttaaccagtttattagtttaaatcagtactttgcatataataagcattcaacaaaaatttattgactgaaatgaattttaaatgcatgtgtatgaacttgtttttcttaatctttaagatgtcagtattcatgtaaataaacaatagatccagctttaaaacaacaaaacaaaaatgtcctcgctggcctcagcagtggactctgcagccgcttcccttcatgagggtaagcaatgagctcgccactgactcctgccatcgatctcatgcatgccccacccgctcactcccaaaagccgact

SEQ ID NO: 336688 - DNA, 1008 bp, Homo sapiens
ttaacgtcatcctctttagagggtaacttgcagaatataaggtagatgttggttacagacagtaattggtattggtaaattggttggttttttttctgtcagggttcccaaggctgtacataatttgtacagtattttataaagaaaaaaaaatgatgcttagatttttctaaacattacctttttttttttaatctaagcttttctggaaaaagaagaaaagttcaaccacctcaacagaactattcactggctgaacttgatgagaaaattagtgccctcaaacaagccctcctcagaaaatcaagagaagcagaatccatggcaacccaccaccttccatgaaaaactcctctcgtccttgtcattttacttttttgtatacatatgtgtaacttacactgttattaattcaacggatatatatttatcaatgtagacttctctgtgaagtcaaggtttattttcacatgagtccagcttgcagcaagtaatcttcaaatattccagtaagttttgaaataatgaatgcattgaaaatagcattgttggaatttattcccttctgttttaaaggaggtattttggaaattgaaaaacttaatttacaagtgctggtacatcttttttcttttgtggaccacaggaaggaagatttattttgatattgatactttaaaaggactttatatttgtaacattgatgttaaccagtttattagtttaaatcagtactttgcatataataagcattcaacaaaaatttattgactgaaatgaattttaaatgcatgtgtatgaacttgtttttcttaatctttaagatgtcagtattcatgtaaataaacaatagatccagctttaaaacaacaaaacaaaaatgtcctcgctggcctcagcagtggactctgcagccgcttcccttcatgagggtaagcaatgagctcgccactgactcctgccatcgatctcatgcatgccccacccgctcactcccaaaagccgact

SEQ ID NO: 336689 - DNA, 301 bp, Homo sapiens
aatattgaggcccacttgcggttacagacaggtaagcaaagtgctaagtggcacctcataatgaacctttgcaaatggttaaaaaattgcagttcatttagtcaccaaattttcatttagctcctaacatttcttgaacagtaagtgccagtcactcaggaagtgttatgtgtatgtcaattcacttaaaaggtcatagtacccttttgagatggtggtggtgttatcactgtacagataaataaattgaagtttaaagagcccaagcaaacatgcctaagatactaagtgacaactctaa

SEQ ID NO: 336690 - DNA, 1790 bp, Homo sapiens
ctggaagggagggggcggggttgtgagcaaatcttggtggtggtggtggtggggcggcctgagaagatattatggctgctgccacggagcataatcgcccgagcagcggtgacaggaacctggagcgaagatgcagccccaacctctcccgagaggtgctctacgaaatctttcgctccctacacaccctggttggacagcttgacctcagagatgatgtggtgaaaattacaatcgattggaacaagctccagagcctctcggcattccagcctgcattgctctttagtgcacttgaacaacacattttatatttacagatggaattgtgttgttctcagccttttttagcaaaacttcagtctccgattaaagaggagaatacaactgctgttgaagagataggaagaacagaaatggggaacaaaaatgaagtaaatgacaaattttccattggcgacctacaagaggaagaaaagcacaaagaaagtgatttaagagatgtgaaaaagacacagatccattttgatccagaagtagttcagataaaggctggaaaagcagaaattgacagacgaatatctgcatttattgaaagaaagcaagctgaaatcaatgaaaacaacgtcagggaattttgcaatgttattgattgtaatcaagaaaatagttgtgcaagaactgatgcgatttttaccccttaccccggatttaaaagtcacgtaaaagtttctagagttgtgaatacatacggaccacagactagacctgaaggaattccagggtcaggtcataaacctaacagcatgcttcgagactgtggtaatcaggctgtagaagaacgactacaaaatattgaggcccacttgcggttacagacaggtggtccagtgccaagagacatttatcagagaattaaaaaacttgaggataaaatccttgaattggaaggcatctctcctgaatattttcagtctgtaagcttttctggaaaaagaagaaaagttcaaccacctcaacagaactattcactggctgaacttgatgagaaaattagtgccctcaaacaagccctcctcagaaaatcaagagaagcagaatccatggcaacccaccaccttccatgaaaaactcctctcgtccttgtcattttacttttttgtatacatatgtgtaacttacactgttattaattcaacggatatatatttatcaatgtagacttctctgtgaagtcaaggtttattttcacatgagtccagcttgcagcaagtaatcttcaaatattccagtaagttttgaaataatgaatgcattgaaaatagcattgttggaatttattcccttctgttttaaaggaggtattttggaaattgaaaaacttaatttacaagtgctggtacatcttttttcttttgtggaccacaggaaggaagatttattttgatattgatactttaaaaggactttatatttgtaacattgatgttaaccagtttattagtttaaatcagtactttgcatataataagcattcaacaaaaatttattgactgaaatgaattttaaatgcatgtgtatgaacttgtttttcttaatctttaagatgtcagtattcatgtaaataaacaatagatccagctttaaaacaacaaaacaaaaatgtcctcgctggcctcagcagtggactctgcagccgcttcccttcatgagggtaagcaatgagctcgccactgactcctgccatcgatctcatgcatgccccacccgctcactcccaaaagccgact

SEQ ID NO: 336691 - DNA, 311 bp, Homo sapiens
tctgctgtctctgaaactcaataacatcatcataattttttataccatttgacagatgaggtgaccgaggtgggaccagagcctggttctgggatctttccccaataccacgttgttccctgacatatgctggaagggaaagagacatatgggaggatgtggagggtataaggcttattgctagaggtggtgaaactgaggcagcagctgatttgtgctttagcgagggcttcttgctttgacttccctcagggaaatgaaagcataaggcttccactcttagtagaagaagaaagtcctcagccagccag

SEQ ID NO: 336692 - DNA, 130 bp, Homo sapiens
gttaaaaaaatgcaattaagatgattttatgtgagagctgtggaacgaacataatatttggggaagagttggtttgacttaattctcaaaccaagagctttcatggaacttcatttttcactccaacctc

SEQ ID NO: 336693 - DNA, 210 bp, Homo sapiens
ttctcagtggtgtgctttgcgtgtcgtgtcttttattcttcctttcctcctgctcacccttaggaatgtttcctttttgtgccttaacaccagaacggtatggtggctgagaccatgggacaaatgcgtcacttagtgggcagatagaaatcagtatttaaagtatgattgaggtttttgtgtttattttgaaattcatttagtacacag

SEQ ID NO: 336694 - DNA, 317 bp, Homo sapiens
cgaaataaggactgaggaaagaagaggtaattaagatactttctcgttggctaaagaaagggatgcatagcaagtttaaatatcttgcagaaggacacacagtttgcaagtgaaggagctctaattcgaagactggtggtctgcatccagagttgatcatcctaaataccatgctgaactggttgctcccaaagactgaacagtattttttacaataagatattcatttgtacgtcaacaaatagttgccaattctttgtaaaataaaatacaatgaactgaataaaatttaatacatcagagtaaattttacatag

SEQ ID NO: 336695 - DNA, 100 bp, Homo sapiens
aaagaataataaactgtgaaaatgtgactaaattatgtgggaggcttaaaagataagtcattttaataaggtttgcaaagtattctctggtctcaacttc

SEQ ID NO: 336696 - DNA, 241 bp, Homo sapiens
aaattgcagctgatctatgggaattattccgctttagcccaatagttattttagatagtaaaattattttaaatagttattttaaataactatttaaattaaatattttaaatagttaaatagtaaatttacttggcttcaaccctctcctaccccatctctcaaaccttgtgaactccaaatttgagaattgctttatggcattaaaaaaattgtgaaaatttctgtgtctcagcttata

SEQ ID NO: 336697 - DNA, 1604 bp, Homo sapiens
  misc_feature (1565)..(1565): n is a, c, g, or t
  misc_feature (1570)..(1570): n is a, c, g, or t
aacctacgccgacttgaagccctggggttggtcagcgccagaaatggctaccaggggctagtggacgagctggccaaggacatccgcaaccagcacagacacaggcacaggcggaaggcagagctggtgaagctgcaggccacattacagggcctgagcactaagaccaccttctatgaggagcagggtgactactacagccagtacatccgggcctgcctggaccacctggcccccgactccaagagttctgggaaggggaagaagcagccttctcttcattacactgctgctcagctcctggaaaagggtgtcttggtggaaattgaagatcttcccgcctctcacttcagaaacgtcatctttgacatcacgccgggagatgaggcaggaaagtttgaagtaaatgccaagttcctgggtgtggacatggagcgatttcagcttcactatcaggatctcctgcagctccagtatgagggtgtggctgtcatgaaactcttcaacaaggccaaagtcaatgtcaaccttctcatcttcctcctcaacaagaagtttttgcggaagtgacagaggcaaagggtgctacccaagcccctcttacctctctggatgctttctttaacactaactcaccactgtgcttccctgcagacacccagagctcaggactgggcaaggcccagggattctcaccccttccccagctgggaggagcttgcctgcctggccacagacagtgtatcttctaattggctaaagtgggccttgcccagagtccagctgtgtggcttttatcatgcatgacaaacccctggctttcctgccagatggtaggacatggaccttgacctgggaaagccattactcttgtgtctgctactgccctcccacagtcaccccaatattacaagcactgccccagcggcttgatttcccctctgccttccttctctctgcactcccacaaagccagggccaggctccccatccctacctcccactgcatcagcagtgggtgttcctgcccttcctgagtctaggcagctctgctgctgtgatctgcacaccctccaacctgggcagggactggggggatgcagtgtgtgttagtgcccatgtggcattgtggcactgttgccccccatggcggcatgggcaagatgaccttccattagcttcaagtcttgttctcttgtctgtggtctgtttaatatgtgggtcactagggtatttattctttctcccatccttacactctggatcattgtgcagacttaatcagggttttaacgctttcatttttttttttttttttttttttttgagctcaaagagagttctcattttccctattcaaactaatacccatgccgtgttttttaccttggatttaaagtcaccttaggttggggcaacagattctcactcatgtttaagatcttgttatttcagcttcataagatcaaagaggagtctttcccttttctcttttaccctcaggattctcatcccttacagctgacttctttcacgaaggggggggcccaaaaaaattttttttnttttnccccccccaaaattttgaaaaggaggaaaaattt

SEQ ID NO: 336698 - DNA, 1661 bp, Homo sapiens
aacctacgccgacttgaagccctggggttggtcagcgccagaaatggctaccaggggctagtggacgagctggccaaggacatccgcaaccagcacagacacaggcacaggcggaaggcagagctggtgaagctgcaggccacattacagggcctgagcactaagaccaccttctatgaggagcagggtgactactacagccagtacatccgggcctgcctggaccacctggcccccgactccaagagttctgggaaggggaagaagcagccttctcttcattacactgctgctcagctcctggaaaagggtgtcttggtggaaattgaagatcttcccgcctctcacttcagaaacgtcatctttgacatcacgccgggagatgaggcaggaaagtttgaagtaaatgccaagttcctgggtgtggacatggagcgatttcagcttcactatcaggatctcctgcagctccagtatgagggtgtggctgtcatgaaactcttcaacaaggccaaagtcaatgtcaaccttctcatcttcctcctcaacaagaagtttttgcggaagtgacagaggcaaagggtgctacccaagcccctcttacctctctggatgctttctttaacactaactcaccactgtgcttccctgcagacacccagagctcaggactgggcaaggcccagggattctcaccccttccccagctgggaggagcttgcctgcctggccacagacagtgtatcttctaattggctaaagtgggccttgcccagagtccagctgtgtggcttttatcatgcatgacaaacccctggctttcctgccagatggtaggacatggaccttgacctgggaaagccattactcttgtgtctgctactgccctcccacagtcaccccaatattacaagcactgccccagcggcttgatttcccctctgccttccttctctctgcactcccacaaagccagggccaggctccccatccctacctcccactgcatcagcagtgggtgttcctgcccttcctgagtctaggcagctctgctgctgtgatctgcacaccctccaacctgggcagggactggggggatgcagtgtgtgttagtgcccatgtggcattgtggcactgttgccccccatggcggcatgggcaagatgaccttccattagcttcaagtcttgttctcttgtctgtggtctgtttaatatgtgggtcactagggtatttattctttctcccatccttacactctggatcattgtgcagacttaatcagggttttaacgctttcatttttttttttttttttttttttttgagctcaaagagagttctcattttccctattcaaactaatacccatgccgtgttttttaccttggatttaaagtcaccttaggttggggcaacagattctcactcatgtttaagatcttgttatttcagcttcataagatcaaagaggagtctttcccttttctcttttaccctcaggattctcatcccttacagctgactcttccaggcaatttccatagatctgcagtcctgcctctgccacagtctctctgttgtccccacatctacccaacttcctgtactgttgcccttctgtcgtcttctaaaagcagctgttactcccacatctgttg

SEQ ID NO: 336699 - DNA, 991 bp, Homo sapiens
aacctacgccgacttgaagccctggggttggtcagcgccagaaatggctaccaggggctagtggacgagctggccaaggacatccgcaaccagcacagacacaggcacaggcggaaggcagagctggtgaagctgcaggccacattacagggcctgagcactaagaccaccttctatgaggagcagggtgactactacagccagtacatccgggcctgcctggaccacctggcccccgactccaagagttctgggaaggggaagaagcagccttctcttcattacactgctgctcagctcctggaaaagggtgtcttggtggaaattgaagatcttcccgcctctcacttcagaaacgtcatctttgacatcacgccgggagatgaggcaggaaagtttgaagtaaatgccaagttcctgggtgtggacatggagcgatttcagcttcactatcaggatctcctgcagctccagtatgagggtgtggctgtcatgaaactcttcaacaaggccaaagtcaatgtcaaccttctcatcttcctcctcaacaagaagtttttgcggaagtgacagaggcaaagggtgctacccaagcccctcttacctctctggatgctttctttaacactaactcaccactgtgcttccctgcagacacccagagctcaggactgggcaaggcccagggattctcaccccttccccagctgggaggagcttgcctgcctggccacagacagtgtatcttctaattggctaaagtgggccttgcccagagtccagctgtgtggcttttatcatgcatgacaaacccctggctttcctgccagatggattctcatcccttacagctgactcttccaggcaatttccatagatctgcagtcctgcctctgccacagtctctctgttgtccccacatctacccaacttcctgtactgttgcccttctgtcgtcttctaaaagcagctgttactcccacatctgttg

SEQ ID NO: 336700 - DNA, 282 bp, Homo sapiens
agaatggggactcgatggggggccagcgcctggcaaaacaagcttattcccagcttaggcccaggcccagctccacacactgctgcttggccagactcggcccccacccagggtctggttggcttcagggcagggagagagggcccaggcctgtgggtgctaagagcagttgtggagggtgtgcatctgagttgttaagcctggtagctgtacaggtagccctgggctatgacttgtggtcctctcagaaaagggtctgactggaacgcagagccagaccag

SEQ ID NO: 336701 - DNA, 258 bp, Homo sapiens
attgcaccactgcactccagcctgggcgacagagcgagacttcgtctcaaaaaaaaattaatagaataaaaataaaggtaatacctacctgttaaaagaagtcaaaaggccaggtgcagtggctcacgcctgtaatcccaacactttgggaggctgaggtgggcagatcactggaggtcaggagtttgagaccagcctggccaacatggtgaaaccccatgtctaaagaaaaacaaaaaaaattagccaggcattatg

SEQ ID NO: 336702 - DNA, 560 bp, Homo sapiens
gtgacatggaaaggaaaagggaggagccaaaagaacaaaatccaagcaatatgcacttcatcttgtaatacagtcaccagctgggccatcttatttccacatgcccagaccaggaaggcacaggtgccgtggggaatccagagggattcctactacaagtatttaacaggctgagacagctgatacaacaagggaaacagagaagccagagaggagcctgctgggtgtgacctactgactccaatgagccactctcagtttgccttctctgtgtatttgggtcttccaaccagctgccctcacagagggcttaggaaacactgcagctgctgcccggaactgcttatgacgcctgcaagcctggtgggtgtcaagggatggcagaccagagtggcaaagaactgtcatcgtaagggcccttgcatgttccctatgttttgaatctggggtaggctcttggaaagccttcattctttttatttttattttcttgagatggagttctctcttgttgcccaggctggagtgcaatggcccgatctcactcattgcacttccac

SEQ ID NO: 336703 - DNA, 162 bp, Homo sapiens
attcccagaagggagctctgggtcaaagggcaggtacattttaaagcctgtttgctccacattgcaaaatgccctccagaaagcatgcaccaaatgatgctgtcgtctgcatggtgtgagagtgcgcctttccctgaactctagccggttaggtagacttct

SEQ ID NO: 336704 - DNA, 115 bp, Homo sapiens
tgacacacaggtaatccttcaggaaaaatatgatactgcttcagtgctagaaaatgatgaagcacatctcaaaaagtacagaattacaagctatgtgcgtgaatatgaggaaaag

SEQ ID NO: 336705 - DNA, 297 bp, Homo sapiens
cccatccttctttcccagtggttcacattcccagtttcacctacagctcagtgcctaatctagctagtagccctccaacttgtctaattttactatcaaagctaccatttccatcttggaaacctcactgttttaatatttttcctttctaacccatgtgccctatgaacctactagttctgattccttcacctctcctccatctcagacagccaccctccactcctccagggccaccactctgggtcagaccacagcagtgatgcccctaccagtttccctacctcttgtctcatc

SEQ ID NO: 336706 - DNA, 305 bp, Homo sapiens
atttttaaaaacaacaaaaaagaaacgtaaataatcaaaaagagaacactatcttctgccccacattgtcctctttgtaagctaccaaaggacagaaagcagagaactttattctccaaaattacagatttttagaactaggagccacctgagagccagttgtggtagacacctgccatggcgtcccagcatcagcatcctttctctcttccttgtctcacagcaccctgattcatctttgggagaccaatgctcttgtactctcagatctttggatggggctaacctgctcctggctccaaagg

SEQ ID NO: 336707 - DNA, 282 bp, Homo sapiens
aggaagtaaacggttctttattagagtagacttaaaatgtggaatattctcaagtatgtcaacctttctgaacaggatgaaaaagaaacctggagcattatatgagccagtaggtcccatttattgtctgtttttttatttatcttgttctgctacccctactccttaacttttgcctggcatggacatacatctctttcctctgtccatttttcacatgtttgttcttgttagacttgggacttcagggtgaaagtgaacattattctctggtttcttcta

SEQ ID NO: 336708 - DNA, 349 bp, Homo sapiens
tgcttattcctgcctctcagtagcagatgaaccccttagtccctgaagaaatagaccaacctcagtgttcactcatggactaaacacaacatcaaactaagtaggaacaatcccatagctcaggctctgcaagattcaatacacaagtcacttcagacaacttcagttgcaccaaatgctcctctgcttcagagcattcactcagcagtgtatccctcttcagcaaggcaggaattgcccacgtctgccaccttccagacaagtctgaggcagctgatggagctgcttgctgagacccattgctgtgattcgggtgtctgtcctctccaaatctcatgttgaaatgtga

SEQ ID NO: 336709 - DNA, 495 bp, Homo sapiens
caatcatggtacatggtaggtatacaatttgggattgtcattattcttactgtgtaattgtttgtggtattgctattaggcccctatattgggaaaggtgatacacatcaatggacttgtgaatgggcgtgccctcaccacttcttttgtcaaaggataacaatgttccagaagaaggaaatttgagaaaatcaagacccctcaactctcccgaatcttcaccttgcccacaaggctttagctatttattggaacttttccacagggacccaaaaccaaactccaacacccaagcttggcactacaagccaaatctaaaactaggtcccgcaggctactactctgagctggaatgagaatctatggagaaaaacctagggatccccatcacatcacgcagggccctgaaaactgatgccaggccttctttcttcccacgtgagattatatttcttgtgtgagggcattcttgcattgctataaagaaaaacctga

SEQ ID NO: 336710 - DNA, 131 bp, Homo sapiens
tccacacgcttccacccagccccaccttttcctgattgtccaccttgtggctctcagcctttctggaatcttctcccttgtcctccagactgccaccccccactgtcgggctagtcgggggggtaccgagc

SEQ ID NO: 336711 - DNA, 328 bp, Homo sapiens
ttgtataaacaaaccaatcgccacatttagcttccccagcatgccaggttctctcccacccctgagtcctccccagcctgatagttctgcccagacacacttccctctgggcatggctaggtggagaacatgcatcgcccacatcaccttctccagaaagccttcctgatgaatctcacccacactggggttaagtttgtccatgctggaccctcacacagcaccctctgctcagctccgcagtacttcagttgttcatttggactacaagttccttaagggccaggggcccgtcttgctgcatccccaactactagcgctgtctctg

SEQ ID NO: 336712 - DNA, 256 bp, Homo sapiens
cctttaggatttttcacagattatctatataactctgggtgacagatcttttctttcacctcttggaaatgttgtgccacagctcctattggcttccatggtgtccaataagaagtccactgtcactgtaatcatttttcttctatcgatattatgtcatttctttctacctgctttcaagattgttttgtctttagttttctggggtttgattctggtgtgtgttgtttttttttttttttaattttttttttat

SEQ ID NO: 336713 - DNA, 333 bp, Homo sapiens
caatggtttgaactagaaagaatagaacctaatcagaatatgtttaccttaactatctgtatactatttgaagatggcagaaattctcacttaatattcaaaaacatactttgcatcttggcttaacacatctgtcatattgacagccttctctatgacttctctaacctactgagtaaagccaaatctgctaggaagaaaagccagaaagtgtttaatctggtaaaaagatattttacctataattcgttgaaggatacaaggaattctatacttagttttatgctttcttaagttgaacttgttatttaattctgtttgcctgtttctatg

SEQ ID NO: 336714 - DNA, 419 bp, Homo sapiens
ctcatttgcggactcttatctatgatgcaactagtttcccagacattatgctttgtcttggacagatgttggtgagtgccatgcaagtgccctgggtcaaaaacggtttctcttctcctctgcgccttgggtggatgcagggggctactcatttctcctgagccttttcctttgactatagatgacttacctgtatattcagactctgaattcaataaggttcccttgcctcgaatttgccatttactttggacatggatggaagcttgcaagcgcagagcaccatacaatgaatattttagagcacattaatggtactgttagtatagacagagggcctgccacatagtaggctcgtgaaggctgttgtctgaaaagagcttgctttggggacacaaatcaaactgtatatttggttg

SEQ ID NO: 336715 - DNA, 801 bp, Homo sapiens
cttgacctgggatttcccagttcagaactgtgagaaataaattttttatgatttacccagtctaagatattttgtgacagcagcaggaatggactaacatactgggtctagcaaagagtcctcaagtgcactgcttctctcccaccactgcctgttctcactttctttcgaagacgtgattaagtttccacatttgtttggtccctcaaaaggcaaagatgaagtacaggagaaatacatggatcacaggcaagatccaaagctggctgcagtctctgaggcctgagcctcccgtgaaggctcttgcccctccttgttccatacatctttcttcttcatagcaagacactcccattaagcccaaaagcccggaagcacactgcaacaggtaatatattacctgttgcatcactttctttgatatagtttgactctgtgtccccaaccaaatctcatctcaaattgtaatccccataatccccatgtgtcgaaggaaggacttggtgggaggtgattggatcatgagggtggttcctcccatgctgtcttgtaatagtgagagagttcacaccaagatctgacagttttataagcattcgacagttcctttttcacatgctctctcttgcctgctgccatgtaagacatgcctccttagccttccgccacaactgtaagtttcctgaggcctccccagccatgtggaactgtgagtcaattaaacctctttgctttataaattaccccgtctcagggaagttctttgttgcatgtttcccttgccttccgggatcctcgaga

SEQ ID NO: 336716 - DNA, 351 bp, Homo sapiens
tggataatgcacaccttccctgagtcagagcctgcaaaaagcaaaggaacgaatggagaaagtgcaacaagcagaaagggggctgcaaagctgcctgcctagggctacgtttcctggcaaaacttccgaaagccatttctccaaaagaaggtctagaagaggaggaggaggaggagaaggaggaggaggaggaggagcagcacagcagcagcagcagcagcagcatgaaagagccccacttggaaggcggtttggattttatttgtgtgttttgtggattctttttattttgctttacaaatgcatcttacaccaaactcatctggcattaaaaatgaattcattctcctg

SEQ ID NO: 336717 - DNA, 307 bp, Homo sapiens
tgacagagcaaatgggacaaaatattaacagtgggtgagtctgagttaggagtggcccctggtttacctctttactgggcagttagaagtctgcacagatgtctgcttcttaatctgtgcagccacctggttatcggctctgaccactaaaggacaaatgcattgtctggcacgtctcacgtcacaggtgtcaacaataataatcttcgtggtgctttctagttgaaaaatgcatttgttgtagaggcagatattttgattgtcctcattttacagatcaggcatttgaggctgatgggggcaggga

SEQ ID NO: 336718 - DNA, 296 bp, Homo sapiens
tcagcggaacaagcaaaggctagagattaccacggcctcttgcaggctgatcagcttccccctcactcccttacataaaactgttgctaacagttacccaaactgctgagccaaataatattctggctgcggtcatgttatcaaactgaaactcagcctgcctggggccttccaagtaactttcatggccagtttgtatttaaaggagaggaaagtgtaaatgtatcagacgactcaagcagctctgtttggcaactaacggagaggctagtcgcaaaggagcagggtatgcttgt

SEQ ID NO: 336719 - DNA, 166 bp, Homo sapiens
atttgtagaagattctttcacatggaaagctaaaatcttccatggacttgaggacttacttataattagcttttagtccccctgccagaacagagggaatttattaattttattatgtaagagtttatttgtttacttgtatatttgagatggggtctcattctgt

SEQ ID NO: 336720 - DNA, 224 bp, Homo sapiens
gaggacagggccaaggtctgtttgaaaacaccatctctggggaccgtttcctggattaggcacaggtggagacaggaagccagggggagaccatgggacacccccacaaagccacccaggaaacagaaaggccatgagagagatgtgggggcaccagggcaggcagaagccacagaccacaggtaccagccccaggggggtggctcatgcctgtcatcccagcg

SEQ ID NO: 336721 - DNA, 337 bp, Homo sapiens
tatctaaaatgattccaagcatatattcgacagtctgaattaaataccattttaactatctgatgattcttcactatttccattggtcaataagagttgagtatggaatatcccaaagccttataggtgagctgaacctcaggaatacagcaaaaagttcaaaggggccataaagatgctgcagcaactaaaggagctctactttatgctttataaattggagatatgaattatattgcataagggagagggggttacaggttacaataagtgttgaaaaccactgtcatgagtactcaaaataatatgtagccatgaagacaaatcaatatgaatc

SEQ ID NO: 336722 - DNA, 244 bp, Homo sapiens
tgggcaaagtgcagaactggacagaggtgtaaatgctgacgacccgggccctcagatacatagccatgtcagctactgtaaatgttaaaatgccagtatgatcactctaccactcccctccaaccagacaaggattgtaaggtaacatctgtgagcttggatattctgggaattaaacaaatcactaatactctgttctaaaaagggaccttgatgccccaaagagtaagattcagctctctgc

SEQ ID NO: 336723 - DNA, 445 bp, Homo sapiens
tatggggtagagtagtcctctcctaagagaacagacacagtgtaggaatcaggggagagggtttcctttgggtaaaaaacaagcctctctggccaagaaaggaaagaggcagtgtgattgtatgaagttttcctttgaatatcttggagagacgctcttctgccaccagctgttccatcgccgccttccaggtaaaatgcctgccaggccttcctggagtgcactatcctttttccatagattttctcaaacacatccatgggttcaactctcatctctttacagaaatgactccaggccatctcagacttacttatttctccttttttttctttttctttttttttttgagacagtctcgctctgtcgtccaggcgagagggcagtgacgcgctctcagctcactgcagcctccactccccaggttcaagcgattctcgtgcct

SEQ ID NO: 336724 - DNA, 709 bp, Homo sapiens
ttttttttgttgttgttttaggttttgtattgcctttttctatctttaaaaaaatccttattctaaatgagacaaagcaatgtttctagttggttggctaccaaatctcagaatgtatatacaggatttatagaacatttataccatgcaaggttttccagtatctaatggccttcattttaccactggtagataagcggggattaggacacagtgaagagttttaagtacacagttaatggctgtgctatcttagctcgactatctgaatataaaatactaatggaataaacacagaatcataaaacagttattggccattaacactgacactgttaaaatcaacacgaagctgacagttaccagccattttccccttttaacactcttcattttgcatctgcaatcccaagcaatgggggttttttgttgttggttggttggctgagctttttttggaggggggcaggggggtatagtattctatttctttggctccagttttgattcttatgcttgtcctcttttgaattccaagtccattcgtttagaaaagaatagatctttgtgaatgttgaagatcttttattttttcccagtagttggagaaagaaaagttaaaggaggcttctagaatgatacatttacatagataaaaccttggccaatatttaagcaggggggaatgcagtacaagtgtccttctgtg

SEQ ID NO: 336725 - DNA, 342 bp, Homo sapiens
aattgctgcaacttctgttgggacagagatagtataaagagctactgagaacaagaacgtactattactatgaaaggaataaaagatcctagctaaatcatgaagatatgaattccaatatatatcattctatgtatttctgtctataagtgtgttctcacaggagaaacagatgtgaagcttttatgatttgtgattctcaaagtcatggttttcaatatttacaatgtacaccaacaagttaaaaagccagctttctcagatcacatgtttctgcaattcccctaagttgagagcagcatgatccaacatcgaattgggaggcctcagtttccttctctg

SEQ ID NO: 336726 - DNA, 286 bp, Homo sapiens
ttggttattaaagtctggaacgtggggagaagcccaggctagaaatggaaatgtgagagctacttacctgtcagtggttttaaagttgtaataatctaggtagtttgtgtaaatgtggggtgggccatggactgagccctggggaagccacccctctgaatcaattcactgcagccagagggctgaaacaaacctgaaaaccctcagtggcccctgctgccctcaggtgtaagcaggagctccccatctcggcactcaaggcctcttacaccacctggcccctcat

SEQ ID NO: 336727 - DNA, 553 bp, Homo sapiens
  misc_feature (146)..(146): n is a, c, g, or t
  misc_feature (149)..(149): n is a, c, g, or t
  misc_feature (160)..(161): n is a, c, g, or t
  misc_feature (168)..(168): n is a, c, g, or t
  misc_feature (170)..(170): n is a, c, g, or t
  misc_feature (179)..(179): n is a, c, g, or t
  misc_feature (183)..(183): n is a, c, g, or t
tccgctatgcttactcaaactttagtcaggcttctgagccttcctctaggtccatcttagagagacatcgtaaaatccagttttagcaaagagccctgctgaggcagcctatcaagaacttctgagacttaacttgctcgctctcntcntccactgaccnntgagtanantgcagcaanatantcaggaggtgatgagccttcagcgttcattgcatttactttaaatacaatccgttcaattgtaatcttatgtgcattaaataaattgtatccaaaataaatgcaacaaacaccaaaaactcttcacctcctaatcattttgccacattccacgctggggtcagtggaggaggagagccaggaaagaaacaaataataatgtaaggaaataattttagaacatttacaccacaaaaatcttcaaatgccacaaatcagggctatcccccgacaaagattctttgcttagtcaaactttagtcaggcttctgagccttcccctaggtccatcttagagagacatcgtaaaatccagttttagcaaagagccc

SEQ ID NO: 336728 - DNA, 529 bp, Homo sapiens
gcggccgctcgcggtcttgggagagctggggcgcgtgcctgaacttcccggctgcccctgtccttggagacctacctgatggggacgccaggtgtgcaggggcgtggcgcgtaggagtgatttggagaacaatgcatgtaagtctgacatcatgatgtccatccggcaaagaagagaaataagagccacagaagtttctgaagactttccagcccaagaagaaaatgtgaagttggaaaataaattgccatctggttgtaccagtagaagattatggaagattttgtcattgacaattggtggaaccattgccctttgcattggacttcttacatctgtctaccttgccacgttacatgaaaatgatttatggttttctaatattaaggaagtggagcgagaaatctcattcagaacagagtgtggcctgtattactcctactacaagcagatgctgcaggctccaaccctcgtgcaaggttttcatggcctaatatatgataataaaactgaatctatgaagacaatt

SEQ ID NO: 336729 - DNA, 998 bp, Homo sapiens
cggccgcgctcagagtctccggaacagaccggactcaatgcggaccaggcaagcggaagtgtgccgcttccttccggccagcgcagcacgagacgaggcggggaaccgcgggaggaggcggggcctagtgttgacgaacagctcccggggcctatgggcgcgggggcagccgcccggcctctccggcgcgccccctccccggggctgttgacgccccccagcccctcatttccacaaagctccgcggcggttctgccctccttgtacccgcggcgcgctgcggcccgtggcgcggccccgttcccgcctagccccgtcggcctccttcccctcccggagccgcgcgtgaggacggctgaggccgcaggagtgatttggagaacaatgcatgtaagtctgacatcatgatgtccatccggcaaagaagagaaataagagccacagaagtttctgaagactttccagcccaagaagaaaatgtgaagttggaaaataaattgccatctggttgtaccagtagaagattatggaagattttgtcattgacaattggtggaaccattgccctttgcattggacttcttacatctgtctaccttgccacgttacatgaaaatgatttatggttttctaatattaaggtatggagtttctttgaccattgtatcattcactcagtgggatctccagtagtaagccatgtggatgaatgaccaaggcaacacagttttgccataaagaatccaatctctagaaaggttggactatagagtgaaataacttttgtgtttattattttaaaataacatattagaatctttttttaaatttttctttattatttatttatttttgagatggagtctcactctgtcacccaggctggagtgcggtggcgcaatcttggctcactacaacctctgcctcgcaggttcaggtgattcttctggcttagcctcccaagtagctgggactataggtgcgtgccaccacaccca

SEQ ID NO: 336730 - DNA, 271 bp, Homo sapiens
aactcatgcccagatacatatctctacatatatgctacagaatcccacatggcatgaaaaacactgggcagagtgttgctgaacagcttcagaaagcagatgcatatacagtggagctggagaacgccgagagccgagtggccaaactaagagatgaaggggagaggcttcatttaccttatgctttactccaggaggtttacaaattagaggatgtacttgacagtatgtggggaatgctaagagccaggaccacagatatcggcagccc

SEQ ID NO: 336731 - DNA, 491 bp, Homo sapiens
acgctggctcttgagttgaagaaactttatttagcgctaagtgacaagaagggtgatcttttgaaagccatgacttggcctggcgagaacaccaacttgctccttgaatgttttgacaaccttcaagtctgcctggagcacactcaggctgcagctgtctgtagaagcaagtccctgaaagctggcctcgattacaaccgcagttaccagaatgaaataaagagattatatcatcagctcattaagagtaagacatctttacaacagtctttgaatgaaatcagtgggcagagtgttgctgaacagcttcagaaagcagatgcatatacagtggagctggagaacgccgagagccgagtggccaaactaagagatgaaggggagaggcttcatttaccttatgctttactccaggaggtttacaaattagaggatgtacttgacagtatgtggggaatgctaagagccaggaccacagatatcggcagccc

SEQ ID NO: 336732 - DNA, 398 bp, Homo sapiens
catttttgggaatagaaggcagctgtttctttggcatagttcatcaaagactggtttttgcatcccctgccaatgttttcagcttcagatcgtttccatgtagagcttgtagacatgctccagaaagagtacataatgtgtactccaaacaaagaaattcagtagtatgtcatcagactcttccgtcctcagcattcaatttaccagccttccgggcattgtgcctcacctctgtgccttcaatgtagagttcccagctgcctatcacctttgtggcccagcggcatctctggccacagtgccagtcctgcccctgcttgctccctgccctgtcctggcttacttcttttcttttctgagacaggatctcaactgtgtcaaccaggctggagtgcagt

SEQ ID NO: 336733 - DNA, 379 bp, Homo sapiens
atcatctctttcacactcttgtcctccatctcatcaaatgacaccaccatcttctaaaaattagaagcaagaaactcaggtggcatacttggcatccctgttcctccccaacccatctgattaattatctagccatgtttatttctccatccattaacagatggacaaaatggtatgtatgtacagaatattattcagccatgaagaggaatggaatgttgttatatgttacaacaggtgggtcttaaaaacattatgcttagtgaaataaaccaggcatggatggcaaatactgtatgattcaactggtatgaggtacctgaaataggcaaattcatagagacagaaagtagaattgaggttagcaggtgctgagggg

SEQ ID NO: 336734 - DNA, 178 bp, Homo sapiens
tagcttcgtataacccacaacacttagtgacaattctgaatttcataagtaccagatagatgttaccaatgttgaaatgtgaatgttctcttttattcctagcccagcccagcaagtaaagactatttagtccttaaagctttgtgaaaacaaaagtctaattctgtcttaaccaacc

SEQ ID NO: 336735 - DNA, 272 bp, Homo sapiens
aacttggtagcgctcgggttaagacatacactgagaaccagaacccttatctcctgatccatagtctaatccccttcctgctacagcacatcatctcaattactgcaaatgtacctgtttatacactttgaaaaatatactacttactgttcacagtcatgtgcactggcagccatgggaccgtcaccataaactaagaacaatcatttctgcactggttaattcctataagttcagtatacaaagatagcaatgcctattaacaatctgaa

SEQ ID NO: 336736 - DNA, 573 bp, Homo sapiens
gattgcattaaatttgtagattgctctgggtagtatggtcatcttaacaacattaattcttttgctccttaagcgtggcatgtctttctgtttgtgtcctcatcaatttttttcatcagtattttttggttttcattgcctaggccttttatctctttgttaaattttttcctaggtatttaatttttttgtagctactatagttgggattgcttttttgatttttcaactagttcattattagtgtatagaaatgctactgattttagtatgttgatttttgtctcctgcaactttactgaatttgtttgttctaagttttttggtgaagtctttaggattttctatatttaagatcatcttgtctgtaaagagggataatttgcctttctgttttccaatttggatgcctatttctttatcttgcctgattctaagacttccactactatgttaataagagaggtggaagtaggcatttgattcatgtttcagttcttggaggaaaggctttcagctttcccctattcattatgatgttagctgtgggtttgtaatatgtggcttatatta

SEQ ID NO: 336737 - DNA, 669 bp, Homo sapiens
tctcggtttatttatttattaagttgatcttcaatctctgatatcctttcttccacttgattgattcagctattgatatttgtgtatgcttcacgaagttctcgtgctgtgtttttcagctccatccgatcatttatgttcttctctaaactggttatcctagttagcaatttgtctaaccttttttcaagattattagcttccttgcattggtttagaacatgctcttttagctcggaggaatttgttattacccaccttctgaagcctacttctgtcaatttgtcaaactcaccctctgtccagttttgtttccttgctggtgaggagttgtgatcctttgaaggagaagacgcattctggtttttggaattttcagcatttttgcgctggcttctccccatctctgtggatttatctacctttggtttttgatgtttgtgaccatcagatggggtctctgagtggacatgctattcctgtttgttagttttccttctaacactcaggcccctctgctgcaggtctgctggagtttgctggaggtccactccagaccctgtttgcctgcgtatcaccagcaaaagctgccggacagcaaagattgatgcctgatcttccctttggaagctgcatcccagaggggcaccagccagatgccagccagag

SEQ ID NO: 336738 - DNA, 397 bp, Homo sapiens
gatgaggccaacatctctaccttcagctccaagaatccattcttagggaccataatgaaaccaccctgcgctttccacaaccctgcctatgctgcatagctcaggaatgtgcatatcaacctaagccaaccaatcagagtcaatgacactccattcaggaacttaagccgggaatctactctgttctttggacataaacccaaagaatataagggctggaacccagctatgttgctgtcaacaaactgcatcctatagagaaacaatgtagtcgagagagatagaagacaagaaattaggttctagaaaaatcttttgaacacctagatctcactgtacctgaagcttgaattcctgaactttttttttttttgagatggagtctagctccatctcc

SEQ ID NO: 336739 - DNA, 701 bp, Homo sapiens
gtaaaagacctggatacaaaattatgatcatgaattacttttttcaaattgtatacccccaaaatcaccttgaatgaaaatataccagcatgtcaacagcaagttgacttctgattagaaaaaatttggaaaatttagaaggtatagataagctatgtaagttatatagctatataatgatgtttatatatatatatatgctatggagtcaactgctttgtttggactgaattatcaattatctttttaagtatttaaaaacattttaaagttaaatgatagaacctactttttataagactggtaattgtaaatgtgtctcaaggaacatgttaatactgctaatgaaatagtggtacagtaaccttttcacacagatatttttcccttcacagataatacaggaagaaggtttgagtgggcattttaaatatattttatatagaaaagaaaatttaggaccaaagagattgaatgatttaacctaaggtcttccaatgctaatggtataaagactaaaatccaggtctcttaattcttactgttacattttgaaatctgtcattccactacagttgaaaaatattaccaaatattagcaaaagaaaattactaatggccaatatgaaaaaagttcaacatagcatttacattgtattaactattataagtaatctagagatgatttaaagtatatcaga

SEQ ID NO: 336740 - DNA, 291 bp, Homo sapiens
cttcaagaaaaacatagcagttgaacggataggtcacctgaatgaagcctgcccacttgggtagcccctgacaatacctctactgtcataagttatataagatagtaagtattgatcctaaagatggtcctgaattgccaaggaagatagactccactctgctaagccagtgaccgtgatgtgcatttgaaacgcatttccttccagctgggcttggtggctcagttctgtgatcccagcaactcaggaggcggagaggggaggatggcttaaggccaggagttcaagagc

SEQ ID NO: 336741 - DNA, 503 bp, Homo sapiens
gaggcaggaactactgttaccccatctcacaaatgaggacacaaggctcagggaggttaaggaacttgtccgagatcacataggaggtggtggaacccagctgaaacccaggccacccaggacctgtgcccttaaccactctgctgctgcctctgatcaccttaatgactcactcagagcagaaaggaccagctgcttatctgggggagggctgtggggatgagatgggtggtgtccagggtgttgaggggtcaggagtgagagaatgcccttggtaccctgggcggccccttggcagctccactgaaccatggcaagagcaccctgagaggtctccttgcttccaccttgcctcaaccctgcaactccattgaagtgtaagtgagatcttgttgcacagaactctccacagttccctatcggagttctgactgcccccgcaaggcactccgtgatctggccttgctgccgccctcctaccgctgcccgctctgctccagcct

SEQ ID NO: 336742 - DNA, 194 bp, Homo sapiens
ggaggcaataaataaataaatttatttatttaaaaactgtattcaaagagtgataagtgataagaagaaagatgttagggaagtgggaggagatataaatgtactacaagactggtcaggaaagaccacacaaaaattgagtaaacacacaaaaggtttgaagaagtaatcaaaagagaatacagaggaagtgc

SEQ ID NO: 336743 - DNA, 2151 bp, Homo sapiens
ctcgagcttcgattgcgcggccgccaagtttcagtgatgaacgccctctttgggcgtccccggataccgcctgacgtagtgccaatcacacctctcgcgtctcggcgcctcggaggctaatgaggacgcctggcgaaacgcagtaacggatttccgggtggaccttcgctttacggctcgtgagttcttccgcccaacccagaggaagcgggagagcagtttacgacagcgccggtcgtgtttacggcggcgcccgctgcgcgcgcatgtttcctcttttcctggtttctcaagagtgctgctgctaacgcggtccccggcacgcaccatctgttgccatcccggccggccgaggccattgcagattttggaagatggcaaagttcatgacacccgtgatccaggacaacccctcaggctggggtccctgtgcggttcccgagcagtttcgggatatgccctaccagccgttcagcaaaggagatcggctaggaaaggttgcagactggacaggagccacataccaagataagaggtacacaaataagtactcctctcagtttggtggtggaagtcaatatgcttatttccatgaggaggatgaaagtagcttccagctggtggatacagcgcgcacacagaagacggcctaccagcggaatcgaatgagatttgcccagaggaacctccgcagagacaaagatcgtcggaacatgttgcagttcaacctgcagatcctgcctaagagtgccaaacagaaagagagagaacgcattcgactgcagaaaaagttccagaaacaatttggggttaggcagaaatgggatcagaaatcacagaaaccccgagactcttcagttgaagttcgtagtgattgggaagtgaaagaggaaatggattttcctcagttgatgaagatgcgctacttggaagtatcagagccacaggacattgagtgttgtggggccctagaatactacgacaaagcctttgaccgcatcaccacgaggagtgagaagccactgcggagcatcaagcgcatcttccacactgtcaccaccacagacgaccctgtcatccgcaagctggcaaaaactcaggggaatgtgtttgccactgatgccatcctggccacgctgatgagctgtacccgctcagtgtattcctgggatattgtcgtccagagagttgggtccaaactcttctttgacaagagagacaactctgactttgacctcctgacagtgagtgagactgccaatgagccccctcaagatgaaggtaattccttcaattcaccccgcaacctggccatggaggcaacctacatcaaccacaatttctcccagcagtgcttgagaatggggaaggaaagatacaacttccccaacccaaacccgtttgtggaggacgacatggataagaatgaaatcgcctctgttgcgtaccgttaccgcaggtggaagcttggagatgatattgaccttattgtccgttgtgagcacgatggcgtcatgactggagccaacggggaagtgtccttcatcaacatcaagacactcaatgagtgggattccaggcactgtaatggcgttgactggcgtcagaagctggactctcagcgaggggctgtcattgccacggagctgaagaacaacagctacaagttggcccggtggacctgctgtgctttgctggctggatctgagtacctcaagcttggttatgtgtctcggtaccacgtgaaagactcctcacgccacgtcatcctaggcacccagcagttcaagcctaatgagtttgccagccagatcaacctgagcgtggagaatgcctggggcattttacgctgcgtcattgacatctgcatgaagctggaggagggcaaatacctcatcctcaaggaccccaacaagcaggtcatccgtgtctacagcctccctgatggcaccttcagctctgatgaagatgaggaggaagaggaggaggaagaagaggaagaagaagaggaagaaacttaaaccagtgatgtggagctggagtttgtccttccaccgagactacgagggcctttgatgcttagtggaatgtgtgtctaacttgctctctgacatttagcagatgaaataaaatatatatctgtttagtctt

SEQ ID NO: 336744 - DNA, 901 bp, Homo sapiens
ggacgcgtgggtccggacgcgtgggcaagctgctgctaacgcggtccccggcacgcaccatctgttgccatcccggccggccgaggccattgcagattttggaagatggcaaagttcatgacacccgtgatccaggacaacccctcaggctggggtccctgtgcggttcccgagcagtttcgggatatgccctaccagccgttcagcaaaggagatcggctaggaaaggttgcagactggacaggagccacataccaagataagaggtacacaaataagtactcctctcagtttggtggtggaagtcaatatgcttatttccatgaggaggatgaaagtagcttccagctggtggatacagcgcgcacacagaagacggcctaccagcggaatcgaatgagatttgcccagaggaacctccgcagagacaaagatcgtcggaacatgttgcagttcaacctgcagatcctgcctaagagtgccaaacagaaagagagagaacgcattcgactgcagaaaaagttccagaaacaatttggggttaggcagaaatgggatcagaaatcacagaaaccccgagactcttcagttgaagttcgtagtgattgggaagtgaaagaggaaatggattttcctcagttgatgaagatgcgctacttggaagtatcagagccacaggacattgagtgttgtggggccctagaatactacgacaaagcctttgaccgcatcaccacgaggagtgagaagccactgcggagcatcaagcgcatcttccacactgtcaccaccacagacgaccctgtcatccgcaagagaactgttatcggaggggaaaatcacggatgtgttggctgtgcatctggcaggtgatagagtccggcaggttcgggattgtgca

SEQ ID NO: 336745 - DNA, 750 bp, Homo sapiens
  misc_feature (689)..(689): n is a, c, g, or t
  misc_feature (697)..(697): n is a, c, g, or t
ctcgagcttcgattgcgcggccgccaagtttcagtgatgaacgccctctttgggcgtccccggataccgcctgacgtagtgccaatcacacctctcgcgtctcggcgcctcggaggctaatgaggacgcctggcgaaacgcagtaacggatttccgggtggaccttcgctttacggctcgtgagttcttccgcccaacccagaggaagcgggagagcagtttacgacagcgccggtcgtgtttacggcggcgcccgctgcgcgcgcatgtttcctcttttcctggtttctcaagagtgctgctgctaacgcggtccccggcacgcaccatctgttgccatcccggccggccgaggccattgcagattttggaagatggcaaagttcatgacacccgtgatccaggacaacccctcaggctggggtccctgtgcggttcccgagcagtttcgggatatgccctaccagccgttcagcaaaggagatcggctaggaaaggttgcagactggacaggagccacataccaagataagaggtacacaaataagtactcctctcagtttggtggtggaagtcaatatgcttatttccatgaggaggatgaaagtagcttccagctggtggatacagcgcgcacacagaagacggcctaccagcggaatcgaatgagatttgcccagaggaacctncgcagagncaaagtcgacgcggccgcgaatttagtagtagtagtcgacccgggaattccgg

SEQ ID NO: 336746 - DNA, 507 bp, Homo sapiens
ccaaacgcatctggctggaggcactacatacacattctccacaggcgagatgggaaggaaagatacaacttccccaacccaaacccgtttgtggaggacgacatggataagaatgaaatcgcctctgttgcgtaccgttaccgcaggtggaagcttggagatgatattgaccttattgtccgttgtgagcacgatggcgtcatgactggagccaacggggaagtgtccttcatcaacatcaagacactcaatgagtgggattccaggcactgtaatggcgttgactggcgtcagaagctggactctcagcgaggggctgtcattgccacggagctgaagaacaacagctacaagttggcccggtggacctgctgtgctttgctggctggatctgagtacctcaagcttggttatgtgtctcggtaccacgtgaaagactcctcaccacgtactagcacccacattcacctataagtgccccaatcgaagggatcctctagatacgca

SEQ ID NO: 336747 - DNA, 200 bp, Homo sapiens
ttccactgttagccaaaaatctcacatcggctccacccaccgctcgctggtctaagaggaagaaacttaaaccagtgatgtggagctggagtttgtccttccaccgagactacgagggcctttgatgcttagtggaatgtgtgtctaacttgctctctgacatttagcagatgaaataaaatatatatctgtttagtctt

SEQ ID NO: 336748 - DNA, 1882 bp, Homo sapiens
ggacgcgtgggtccggacgcgtgggcaagctgctgctaacgcggtccccggcacgcaccatctgttgccatcccggccggccgaggccattgcagattttggaagatggcaaagttcatgacacccgtgatccaggacaacccctcaggctggggtccctgtgcggttcccgagcagtttcgggatatgccctaccagccgttcagcaaaggagatcggctaggaaaggttgcagactggacaggagccacataccaagataagaggtacacaaataagtactcctctcagtttggtggtggaagtcaatatgcttatttccatgaggaggatgaaagtagcttccagctggtggatacagcgcgcacacagaagacggcctaccagcggaatcgaatgagatttgcccagaggaacctccgcagagacaaagatcgtcggaacatgttgcagttcaacctgcagatcctgcctaagagtgccaaacagaaagagagagaacgcattcgactgcagaaaaagttccagaaacaatttggggttaggcagaaatgggatcagaaatcacagaaaccccgagactcttcagttgaagttcgtagtgattgggaagtgaaagaggaaatggattttcctcagttgatgaagatgcgctacttggaagtatcagagccacaggacattgagtgttgtggggccctagaatactacgacaaagcctttgaccgcatcaccacgaggagtgagaagccactgcggagcatcaagcgcatcttccacactgtcaccaccacagacgaccctgtcatccgcaagctggcaaaaactcaggggaatgtgtttgccactgatgccatcctggccacgctgatgagctgtacccgctcagtgtattcctgggatattgtcgtccagagagttgggtccaaactcttctttgacaagagagacaactctgactttgacctcctgacagtgagtgagactgccaatgagccccctcaagatgaaggtaattccttcaattcaccccgcaacctggccatggaggcaacctacatcaaccacaatttctcccagcagtgcttgagaatggggaaggaaagatacaacttccccaacccaaacccgtttgtggaggacgacatggataagaatgaaatcgcctctgttgcgtaccgttaccgcaggtggaagcttggagatgatattgaccttattgtccgttgtgagcacgatggcgtcatgactggagccaacggggaagtgtccttcatcaacatcaagacactcaatgagtgggattccaggcactgtaatggcgttgactggcgtcagaagctggactctcagcgaggggctgtcattgccacggagctgaagaacaacagctacaagttggcccggtggacctgctgtgctttgctggctggatctgagtacctcaagcttggttatgtgtctcggtaccacgtgaaagactcctcacgccacgtcatcctaggcacccagcagttcaagcctaatgagtttgccagccagatcaacctgagcgtggagaatgcctggggcattttacgctgcgtcattgacatctgcatgaagctggaggagggcaaatacctcatcctcaaggaccccaacaagcaggtcatccgtgtctacagcctccctgatggcaccttcagctctgatgaagatgaggaggaagaggaggaggaagaagaggaagaagaagaggaagaaacttaaaccagtgatgtggagctggagtttgtccttccaccgagactacgagggcctttgatgcttagtggaatgtgtgtctaacttgctctctgacatttagcagatgaaataaaatatatatctgtttagtctt

SEQ ID NO: 336749 - DNA, 1875 bp, Homo sapiens
taacggtctaggtacgaggctgctgctgctaacgcggtccccggcacgcaccatctgttgccatcccggccggccgaggccattgcagattttggaagatggcaaagttcatgacacccgtgatccaggacaacccctcaggctggggtccctgtgcggttcccgagcagtttcgggatatgccctaccagccgttcagcaaaggagatcggctaggaaaggttgcagactggacaggagccacataccaagataagaggtacacaaataagtactcctctcagtttggtggtggaagtcaatatgcttatttccatgaggaggatgaaagtagcttccagctggtggatacagcgcgcacacagaagacggcctaccagcggaatcgaatgagatttgcccagaggaacctccgcagagacaaagatcgtcggaacatgttgcagttcaacctgcagatcctgcctaagagtgccaaacagaaagagagagaacgcattcgactgcagaaaaagttccagaaacaatttggggttaggcagaaatgggatcagaaatcacagaaaccccgagactcttcagttgaagttcgtagtgattgggaagtgaaagaggaaatggattttcctcagttgatgaagatgcgctacttggaagtatcagagccacaggacattgagtgttgtggggccctagaatactacgacaaagcctttgaccgcatcaccacgaggagtgagaagccactgcggagcatcaagcgcatcttccacactgtcaccaccacagacgaccctgtcatccgcaagctggcaaaaactcaggggaatgtgtttgccactgatgccatcctggccacgctgatgagctgtacccgctcagtgtattcctgggatattgtcgtccagagagttgggtccaaactcttctttgacaagagagacaactctgactttgacctcctgacagtgagtgagactgccaatgagccccctcaagatgaaggtaattccttcaattcaccccgcaacctggccatggaggcaacctacatcaaccacaatttctcccagcagtgcttgagaatggggaaggaaagatacaacttccccaacccaaacccgtttgtggaggacgacatggataagaatgaaatcgcctctgttgcgtaccgttaccgcaggtggaagcttggagatgatattgaccttattgtccgttgtgagcacgatggcgtcatgactggagccaacggggaagtgtccttcatcaacatcaagacactcaatgagtgggattccaggcactgtaatggcgttgactggcgtcagaagctggactctcagcgaggggctgtcattgccacggagctgaagaacaacagctacaagttggcccggtggacctgctgtgctttgctggctggatctgagtacctcaagcttggttatgtgtctcggtaccacgtgaaagactcctcacgccacgtcatcctaggcacccagcagttcaagcctaatgagtttgccagccagatcaacctgagcgtggagaatgcctggggcattttacgctgcgtcattgacatctgcatgaagctggaggagggcaaatacctcatcctcaaggaccccaacaagcaggtcatccgtgtctacagcctccctgatggcaccttcagctctgatgaagatgaggaggaagaggaggaggaagaagaggaagaagaagaggaagaaacttaaaccagtgatgtggagctggagtttgtccttccaccgagactacgagggcctttgatgcttagtggaatgtgtgtctaacttgctctctgacatttagcagatgaaataaaatatatatctgtttagtctt

SEQ ID NO: 336750 - DNA, 2276 bp, Homo sapiens
gatgagagccaagtggaggaagaagcgaatgcgcaggctgaagcgcaaaagaagaaagatgaggcagaggtccaagtaaaccgctagcttgttgcaccgtggaggccacaggagcagaaacatggaatgccagacgctggggatgctggtacaagttgtgggactgcatgctactgtctagagcttgtctcaatggatctagaacttcatcgccctctgatcgccgatcacctctgagacccaccttgctcataaacaaaatgcccatgttggtcctctgccctggacctgtgacattctggactatttctgtgtttatttgtggccgagtgtaacaaccatataataaatcacctcttccgctgttttagctgaagaattaaaaaaaaaaaaaaaaaaaaatcgagactagttctctccaagctgctgctaacgcggtccccggcacgcaccatctgttgccatcccggccggccgaggccattgcagattttggaagatggcaaagttcatgacacccgtgatccaggacaacccctcaggctggggtccctgtgcggttcccgagcagtttcgggatatgccctaccagccgttcagcaaaggagatcggctaggaaaggttgcagactggacaggagccacataccaagataagaggtacacaaataagtactcctctcagtttggtggtggaagtcaatatgcttatttccatgaggaggatgaaagtagcttccagctggtggatacagcgcgcacacagaagacggcctaccagcggaatcgaatgagatttgcccagaggaacctccgcagagacaaagatcgtcggaacatgttgcagttcaacctgcagatcctgcctaagagtgccaaacagaaagagagagaacgcattcgactgcagaaaaagttccagaaacaatttggggttaggcagaaatgggatcagaaatcacagaaaccccgagactcttcagttgaagttcgtagtgattgggaagtgaaagaggaaatggattttcctcagttgatgaagatgcgctacttggaagtatcagagccacaggacattgagtgttgtggggccctagaatactacgacaaagcctttgaccgcatcaccacgaggagtgagaagccactgcggagcatcaagcgcatcttccacactgtcaccaccacagacgaccctgtcatccgcaagctggcaaaaactcaggggaatgtgtttgccactgatgccatcctggccacgctgatgagctgtacccgctcagtgtattcctgggatattgtcgtccagagagttgggtccaaactcttctttgacaagagagacaactctgactttgacctcctgacagtgagtgagactgccaatgagccccctcaagatgaaggtaattccttcaattcaccccgcaacctggccatggaggcaacctacatcaaccacaatttctcccagcagtgcttgagaatggggaaggaaagatacaacttccccaacccaaacccgtttgtggaggacgacatggataagaatgaaatcgcctctgttgcgtaccgttaccgcaggtggaagcttggagatgatattgaccttattgtccgttgtgagcacgatggcgtcatgactggagccaacggggaagtgtccttcatcaacatcaagacactcaatgagtgggattccaggcactgtaatggcgttgactggcgtcagaagctggactctcagcgaggggctgtcattgccacggagctgaagaacaacagctacaagttggcccggtggacctgctgtgctttgctggctggatctgagtacctcaagcttggttatgtgtctcggtaccacgtgaaagactcctcacgccacgtcatcctaggcacccagcagttcaagcctaatgagtttgccagccagatcaacctgagcgtggagaatgcctggggcattttacgctgcgtcattgacatctgcatgaagctggaggagggcaaatacctcatcctcaaggaccccaacaagcaggtcatccgtgtctacagcctccctgatggcaccttcagctctgatgaagatgaggaggaagaggaggaggaagaagaggaagaagaagaggaagaaacttaaaccagtgatgtggagctggagtttgtccttccaccgagactacgagggcctttgatgcttagtggaatgtgtgtctaacttgctctctgacatttagcagatgaaataaaatatatatctgtttagtctt

SEQ ID NO: 336751 - DNA, 1883 bp, Homo sapiens
gtgaggcctggttggaatcggccgaggcagctgctgctaacgcggtccccggcacgcaccatctgttgccatcccggccggccgaggccattgcagattttggaagatggcaaagttcatgacacccgtgatccaggacaacccctcaggctggggtccctgtgcggttcccgagcagtttcgggatatgccctaccagccgttcagcaaaggagatcggctaggaaaggttgcagactggacaggagccacataccaagataagaggtacacaaataagtactcctctcagtttggtggtggaagtcaatatgcttatttccatgaggaggatgaaagtagcttccagctggtggatacagcgcgcacacagaagacggcctaccagcggaatcgaatgagatttgcccagaggaacctccgcagagacaaagatcgtcggaacatgttgcagttcaacctgcagatcctgcctaagagtgccaaacagaaagagagagaacgcattcgactgcagaaaaagttccagaaacaatttggggttaggcagaaatgggatcagaaatcacagaaaccccgagactcttcagttgaagttcgtagtgattgggaagtgaaagaggaaatggattttcctcagttgatgaagatgcgctacttggaagtatcagagccacaggacattgagtgttgtggggccctagaatactacgacaaagcctttgaccgcatcaccacgaggagtgagaagccactgcggagcatcaagcgcatcttccacactgtcaccaccacagacgaccctgtcatccgcaagctggcaaaaactcaggggaatgtgtttgccactgatgccatcctggccacgctgatgagctgtacccgctcagtgtattcctgggatattgtcgtccagagagttgggtccaaactcttctttgacaagagagacaactctgactttgacctcctgacagtgagtgagactgccaatgagccccctcaagatgaaggtaattccttcaattcaccccgcaacctggccatggaggcaacctacatcaaccacaatttctcccagcagtgcttgagaatggggaaggaaagatacaacttccccaacccaaacccgtttgtggaggacgacatggataagaatgaaatcgcctctgttgcgtaccgttaccgcaggtggaagcttggagatgatattgaccttattgtccgttgtgagcacgatggcgtcatgactggagccaacggggaagtgtccttcatcaacatcaagacactcaatgagtgggattccaggcactgtaatggcgttgactggcgtcagaagctggactctcagcgaggggctgtcattgccacggagctgaagaacaacagctacaagttggcccggtggacctgctgtgctttgctggctggatctgagtacctcaagcttggttatgtgtctcggtaccacgtgaaagactcctcacgccacgtcatcctaggcacccagcagttcaagcctaatgagtttgccagccagatcaacctgagcgtggagaatgcctggggcattttacgctgcgtcattgacatctgcatgaagctggaggagggcaaatacctcatcctcaaggaccccaacaagcaggtcatccgtgtctacagcctccctgatggcaccttcagctctgatgaagatgaggaggaagaggaggaggaagaagaggaagaagaagaggaagaaacttaaaccagtgatgtggagctggagtttgtccttccaccgagactacgagggcctttgatgcttagtggaatgtgtgtctaacttgctctctgacatttagcagatgaaataaaatatatatctgtttagtctt

SEQ ID NO: 336752 - DNA, 2344 bp, Homo sapiens
ctcgagcttcgattgcgcggccgccaagtttcagtgatgaacgccctctttgggcgtccccggataccgcctgacgtagtgccaatcacacctctcgcgtctcggcgcctcggaggctaatgaggacgcctggcgaaacgcagtaacggatttccgggtggaccttcgctttacggctcgtgagttcttccgcccaacccagaggaagcgggagagcagtttacgacagcgccggtcgtgtttacggcggcgcccgctgcgcgcgcatgtttcctcttttcctggtttctcaagagtgctgctgctaacgcggtccccggcacgcaccatctgttgccatcccggccggccgaggccattgcagattttggaagatggcaaagttcatgacacccgtgatccaggacaacccctcaggctggggtccctgtgcggttcccgagcagtttcgggatatgccctaccagccgttcagcaaaggagatcggctaggaaaggttgcagactggacaggagccacataccaagataagaggtacacaaataagtactcctctcagtttggtggtggaagtcaatatgcttatttccatgaggaggatgaaagtagcttccagctggtggatacagcgcgcacacagaagacggcctaccagcggaatcgaatgagatttgcccagaggaacctccgcagagacaaagatcgtcggaacatgttgcagttcaacctgcagatcctgcctaagagtgccaaacagaaagagagagaacgcattcgactgcagaaaaagttccagaaacaatttggggttaggcagaaatgggatcagaaatcacagaaaccccgagactcttcagttgaagttcgtagtgattgggaagtgaaagaggaaatggattttcctcagttgatgaagatgcgctacttggaagtatcagagccacaggacattgagtgttgtggggccctagaatactacgacaaagcctttgaccgcatcaccacgaggagtgagaagccactgcggagcatcaagcgcatcttccacactgtcaccaccacagacgaccctgtcatccgcaagctggcaaaaactcaggggaatgtgtttgccactgatgccatcctggccacgctgatgagctgtacccgctcagtgtattcctgggatattgtcgtccagagagttgggtccaaactcttctttgacaagagagacaactctgactttgacctcctgacagtgagtgagactgccaatgagccccctcaagatgaaggtaattccttcaattcaccccgcaacctggccatggaggcaacctacatcaaccacaatttctcccagcagtgcttgagaatggggaaggaaagatacaacttccccaacccaaacccgtttgtggaggacgacatggataagaatgaaatcgcctctgttgcgtaccgttaccgcaggtggaagcttggagatgatattgaccttattgtccgttgtgagcacgatggcgtcatgactggagccaacggggaagtgtccttcatcaacatcaagacactcaatgagtgggattccaggcactgtaatggcgttgactggcgtcagaagctggactctcagcgaggggctgtcattgccacggagctgaagaacaacagctacaagttggcccggtggacctgctgtgctttgctggctggatctgagtacctcaagcttggttatgtgtctcggtaccacgtgaaagactcctcacgccacgtcatcctaggcacccagcagttcaagcctaatgagtttgccagccagatcaacctgagcgtggagaatgcctggggcattttacgctgcgtcattgacatctgcatgaagctggaggagggcaaatacctcatcctcaaggaccccaacaagcaggtcatccgtgtctacagcctccctgatggcaccttcagctctgatgaagatgaggaggaagaggaggaggaagaagaggaagaagaagaggaagaaacttaaaccagtgatgtggagctggagtttgtccttccaccgagactacgagggcctttgatgcttagtggaatgtgtgtctaacttgctctctgacatttagcagatgaaataaaatatatatctgtttagtcttaaaaaaaaaagatagaagagtaaacacagaaaaaaacttttggggccggatggggccctgagaaaggttttgtaaaacccttcgtgtgggggcggggggccccaagaggggtaggggaaatgggtcaaagggggtcccagggaaaacccggggccaggaaaaggggggggttttccccaataaaaaaacgccg

SEQ ID NO: 336753 - DNA, 2092 bp, Homo sapiens
ctcgagcttcgattgcgcggccgccaagtttcagtgatgaacgccctctttgggcgtccccggataccgcctgacgtagtgccaatcacacctctcgcgtctcggcgcctcggaggctaatgaggacgcctggcgaaacgcagtaacggatttccgggtggaccttcgctttacggctcgtgagttcttccgcccaacccagaggaagcgggagagcagtttacgacagcgccggtcgtgtttacggcggcgcccgctgcgcgcgcatgtttcctcttttcctggtttctcaagagtgctgctgctaacgcggtccccggcacgcaccatctgttgccatcccggccggccgaggccattgcagattttggaagatggcaaagttcatgacacccgtgatccaggacaacccctcaggctggggtccctgtgcggttcccgagcagtttcgggatatgccctaccagccgttcagcaaaggagatcggctaggaaaggttgcagactggacaggagccacataccaagataagaggtacacaaataagtactcctctcagtttggtggtggaagtcaatatgcttatttccatgaggaggatgaaagtagcttccagctggtggatacagcgcgcacacagaagacggcctaccagcggaatcgaatgagatttgcccagaggaacctccgcagagacaaagatcgtcggaacatgttgcagttcaacctgcagatcctgcctaagagtgccaaacagaaagagagagaacgcattcgactgcagaaaaagttccagaaacaatttggggttaggcagaaatgggatcagaaatcacagaaaccccgagactcttcagttgaagttcgtagtgattgggaagtgaaagaggaaatggattttcctcagttgatgaagatgcgctacttggaagtatcagagccacaggacattgagtgttgtggggccctagaatactacgacaaagcctttgaccgcatcaccacgaggagtgagaagccactgcggagcatcaagcgcatcttccacactgtcaccaccacagacgaccctgtcatccgcaagctgtacccgctcagtgtattcctgggatattgtcgtccagagagttgggtccaaactcttctttgacaagagagacaactctgactttgacctcctgacagtgagtgagactgccaatgagccccctcaagatgaaggtaattccttcaattcaccccgcaacctggccatggaggcaacctacatcaaccacaatttctcccagcagtgcttgagaatggggaaggaaagatacaacttccccaacccaaacccgtttgtggaggacgacatggataagaatgaaatcgcctctgttgcgtaccgttaccgcaggtggaagcttggagatgatattgaccttattgtccgttgtgagcacgatggcgtcatgactggagccaacggggaagtgtccttcatcaacatcaagacactcaatgagtgggattccaggcactgtaatggcgttgactggcgtcagaagctggactctcagcgaggggctgtcattgccacggagctgaagaacaacagctacaagttggcccggtggacctgctgtgctttgctggctggatctgagtacctcaagcttggttatgtgtctcggtaccacgtgaaagactcctcacgccacgtcatcctaggcacccagcagttcaagcctaatgagtttgccagccagatcaacctgagcgtggagaatgcctggggcattttacgctgcgtcattgacatctgcatgaagctggaggagggcaaatacctcatcctcaaggaccccaacaagcaggtcatccgtgtctacagcctccctgatggcaccttcagctctgatgaagatgaggaggaagaggaggaggaagaagaggaagaagaagaggaagaaacttaaaccagtgatgtggagctggagtttgtccttccaccgagactacgagggcctttgatgcttagtggaatgtgtgtctaacttgctctctgacatttagcagatgaaataaaatatatatctgtttagtctt

SEQ ID NO: 336754 - DNA, 2208 bp, Homo sapiens
ctcgagcttcgattgcgcggccgccaagtttcagtgatgaacgccctctttgggcgtccccggataccgcctgacgtagtgccaatcacacctctcgcgtctcggcgcctcggaggctaatgaggacgcctggcgaaacgcagtaacggatttccgggtggaccttcgctttacggctcgtgagttcttccgcccaacccagaggaagcgggagagcagtttacgacagcgccggtcgtgtttacggcggcgcccgctgcgcgcgcatgtttcctcttttcctggtttctcaagagtgctgctgctaacgcggtccccggcacgcaccatctgttgccatcccggccggccgaggccattgcagattttggaagatggcaaagttcatgacacccgtgatccaggacaacccctcaggctggggtccctgtgcggttcccgagcagtttcgggatatgccctaccagccgttcagcaaaggagatcggctaggaaaggttgcagactggacaggagccacataccaagataagaggtacacaaataagtactcctctcagtttggtggtggaagtcaatatgcttatttccatgaggaggatgaaagtagcttccagctggtggatacagcgcgcacacagaagacggcctaccagcggaatcgaatgagatttgcccagaggaacctccgcagagacaaagatcgtcggaacatgttgcagttcaacctgcagatcctgcctaagagtgccaaacagaaagagagagaacgcattcgactgcagaaaaagttccagaaacaatttggggttaggcagaaatgggatcagaaatcacagaaaccccgagactcttcagttgaagttcgtagtgattgggaagtgaaagaggaaatggattttcctcagttgatgaagatgcgctacttggaagtatcagagccacaggacattgagtgttgtggggccctagaatactacgacaaagcctttgaccgcatcaccacgaggagtgagaagccactgcggagcatcaagcgcatcttccacactgtcaccaccacagacgaccctgtcatccgcaagctggcaaaaactcaggggaatgtgtttgccactgatgccatcctggccacgctgatgagctgtacccgctcagtgtattcctgggatattgtcgtccagagagttgggtccaaactcttctttgacaagagagacaactctgactttgacctcctgacagtgagtgagactgccaatgagccccctcaagatgaaggtaattccttcaattcaccccgcaacctggccatggaggcaacctacatcaaccacaatttctcccagcagtgcttgagaatggggaaggaaagatacaacttccccaacccaaacccgtttgtggaggacgacatggataagaatgaaatcgcctctgttgcgtaccgttaccgcaggtggaagcttggagatgatattgaccttattgtccgttgtgagcacgatggcgtcatgactggagccaacggggaagtgtccttcatcaacatcaagacactcaatgagtgggattccaggcactgtaatggcgttgactggcgtcagaagctggactctcagcgaggggctgtcattgccacggagctgaagaacaacagctacaagttggcccggtggacctgctgtgctttgctggctggatctgagtacctcaagcttggttatgtgtctcggtaccacgtgaaagactcctcacgccacgtcatcctaggcacccagcagttcaagcctaatgagtttgccagccagatcaacctgagcgtggagaatgcctggggcattttacgctgcgtcattgacatctgcatgaagctggaggagggcaaatacctcatcctcaaggaccccaacaagcaggtcatccgtgtctacagcctccctgatggcaccttcagctctgatgaagatgaggaggaagaggaggaggaagaagaggaagaagaagtttggatctggctcagagtccaagtgagtttggtgcagggaggaggtgcatctaatttacaattcattcaggccctcttggactcagaggaagagaatgacagagcttgggatggtcgtcttggggagcgatactacccacctgtggatgctgacgcctgacactcgggagctggaatgctatgagatcaaacacatgagg

SEQ ID NO: 336755 - DNA, 2056 bp, Homo sapiens
ctcgagcttcgattgcgcggccgccaagtttcagtgatgaacgccctctttgggcgtccccggataccgcctgacgtagtgccaatcacacctctcgcgtctcggcgcctcggaggctaatgaggacgcctggcgaaacgcagtaacggatttccgggtggaccttcgctttacggctcgtgagttcttccgcccaacccagaggaagcgggagagcagtttacgacagcgccggtcgtgtttacggcggcgcccgctgcgcgcgcatgtttcctcttttcctggtttctcaagagtgctgctgctaacgcggtccccggcacgcaccatctgttgccatcccggccggccgaggccattgcagattttggaagatggcaaagttcatgacacccgtgatccaggacaacccctcaggctggggtccctgtgcggttcccgagcagtttcgggatatgccctaccagccgttcagcaaaggagatcggctaggaaaggttgcagactggacaggagccacataccaagataagaggtacacaaataagtactcctctcagtttggtggtggaagtcaatatgcttatttccatgaggaggatgaaagtagcttccagctggtggatacagcgcgcacacagaagacggcctaccagcggaatcgaatgagatttgcccagaggaacctccgcagagacaaagatcgtcggaacatgttgcagttcaacctgcagatcctgcctaagagtgccaaacagaaagagagagaacgcattcgactgcagaaaaagttccagaaacaatttggggttaggcagaaatgggatcagaaatcacagaaaccccgagactcttcagttgaagttcgtagtgattgggaagtgaaagaggaaatggattttcctcagttgatgaagatgcgctacttggaagtatcagagccacaggacattgagtgttgtggggccctagaatactacgacaaagcctttgaccgcatcaccacgaggagtgagaagccactgcggagcatcaagcgcatcttccacactgtcaccaccacagacgaccctgtcatccgcaagctggcaaaaactcaggggaatgtgtttgccactgatgccatcctggccacgctgatgagctgtacccgctcagtgtattcctgggatattgtcgtccagagagttgggtccaaactcttctttgacaagagagacaactctgactttgacctcctgacagtgagtgagactgccaatgagccccctcaagatgaaggtaattccttcaattcaccccgcaacctggccatggaggcaacctacatcaaccacaatttctcccagcagtgcttgagaatggggaaggaaagatacaacttccccaacccaaacccgtttgtggaggacgacatggataagaatgaaatcgcctctgttgcgtaccgttaccgcaggtggaagcttggagatgatattgaccttattgtccgttgtgagcacgatggcgtcatgactggagccaacggggaagtgtccttcatcaacatcaagacactcaatgagtgggattccaggcactgtaatggcgttgactggcgtcagaagctggactctcagcgaggggctgtcattgccacggagctgaagaacaacagctacaagttggcccggtggacctgctgtgctttgctggctggatctgagtacctcaagcttggttatgtgtctcggtaccacgtgaaagactcctcacgccacgtcatcctaggcacccagcagttcaagcctaatgagtttgccagccagatcaacctgagcgtggagaatgcctggggcattttacgctgcgtcattgacatctgcatgaagctggaggagggaggaggaggaagaagaggaagaagaagaggaagaaacttaaaccagtgatgtggagctggagtttgtccttccaccgagactacgagggcctttgatgcttagtggaatgtgtgtctaacttgctctctgacatttagcagatgaaataaaatatatatctgtttagtctt

SEQ ID NO: 336756 - DNA, 1881 bp, Homo sapiens
  misc_feature (31)..(31): n is a, c, g, or t
aacaaaacaaacatcaaaataacacaaaaanacaaaactaaggctaggtacgaggctgggtgttggttgcatcccggccggcgaggcattgcagattttggaagatggcaaagttcatgacacccgtgatccaggacaacccctcaggctggggtccctgtgcggttcccgagcagtttcgggatatgccctaccagccgttcagcaaaggagatcggctaggaaaggttgcagactggacaggagccacataccaagataagaggtacacaaataagtactcctctcagtttggtggtggaagtcaatatgcttatttccatgaggaggatgaaagtagcttccagctggtggatacagcgcgcacacagaagacggcctaccagcggaatcgaatgagatttgcccagaggaacctccgcagagacaaagatcgtcggaacatgttgcagttcaacctgcagatcctgcctaagagtgccaaacagaaagagagagaacgcattcgactgcagaaaaagttccagaaacaatttggggttaggcagaaatgggatcagaaatcacagaaaccccgagactcttcagttgaagttcgtagtgattgggaagtgaaagaggaaatggattttcctcagttgatgaagatgcgctacttggaagtatcagagccacaggacattgagtgttgtggggccctagaatactacgacaaagcctttgaccgcatcaccacgaggagtgagaagccactgcggagcatcaagcgcatcttccacactgtcaccaccacagacgaccctgtcatccgcaagctggcaaaaactcaggggaatgtgtttgccactgatgccatcctggccacgctgatgagctgtacccgctcagtgtattcctgggatattgtcgtccagagagttgggtccaaactcttctttgacaagagagacaactctgactttgacctcctgacagtgagtgagactgccaatgagccccctcaagatgaaggtaattccttcaattcaccccgcaacctggccatggaggcaacctacatcaaccacaatttctcccagcagtgcttgagaatggggaaggaaagatacaacttccccaacccaaacccgtttgtggaggacgacatggataagaatgaaatcgcctctgttgcgtaccgttaccgcaggtggaagcttggagatgatattgaccttattgtccgttgtgagcacgatggcgtcatgactggagccaacggggaagtgtccttcatcaacatcaagacactcaatgagtgggattccaggcactgtaatggcgttgactggcgtcagaagctggactctcagcgaggggctgtcattgccacggagctgaagaacaacagctacaagttggcccggtggacctgctgtgctttgctggctggatctgagtacctcaagcttggttatgtgtctcggtaccacgtgaaagactcctcacgccacgtcatcctaggcacccagcagttcaagcctaatgagtttgccagccagatcaacctgagcgtggagaatgcctggggcattttacgctgcgtcattgacatctgcatgaagctggaggagggcaaatacctcatcctcaaggaccccaacaagcaggtcatccgtgtctacagcctccctgatggcaccttcagctctgatgaagatgaggaggaagaggaggaggaagaagaggaagaagaagaggaagaaacttaaaccagtgatgtggagctggagtttgtccttccaccgagactacgagggcctttgatgcttagtggaatgtgtgtctaacttgctctctgacatttagcagatgaaataaaatatatatctgtttagtctt

SEQ ID NO: 336757 - DNA, 2237 bp, Homo sapiens
ctcgagcttcgattgcgcggccgccaagtttcagtgatgaacgccctctttgggcgtccccggataccgcctgacgtagtgccaatcacacctctcgcgtctcggcgcctcggaggctaatgaggacgcctggcgaaacgcagtaacggatttccgggtggaccttcgctttacggctcgtgagttcttccgcccaacccagaggaagcgggagagcagtttacgacagcgccggtcgtgtttacggcggcgcccgctgcgcgcgcatgtttcctcttttcctggtttctcaagagtgctgctgctaacgcggtccccggcacgcaccatctgttgccatcccggccggccgaggccattgcagatggaaaagactaaggtggctggacgtggtggctcacgcctgtaatcccagcactttgggaggtcgaggcgggaggatcatttgagattttggaagatggcaaagttcatgacacccgtgatccaggacaacccctcaggctggggtccctgtgcggttcccgagcagtttcgggatatgccctaccagccgttcagcaaaggagatcggctaggaaaggttgcagactggacaggagccacataccaagataagaggtacacaaataagtactcctctcagtttggtggtggaagtcaatatgcttatttccatgaggaggatgaaagtagcttccagctggtggatacagcgcgcacacagaagacggcctaccagcggaatcgaatgagatttgcccagaggaacctccgcagagacaaagatcgtcggaacatgttgcagttcaacctgcagatcctgcctaagagtgccaaacagaaagagagagaacgcattcgactgcagaaaaagttccagaaacaatttggggttaggcagaaatgggatcagaaatcacagaaaccccgagactcttcagttgaagttcgtagtgattgggaagtgaaagaggaaatggattttcctcagttgatgaagatgcgctacttggaagtatcagagccacaggacattgagtgttgtggggccctagaatactacgacaaagcctttgaccgcatcaccacgaggagtgagaagccactgcggagcatcaagcgcatcttccacactgtcaccaccacagacgaccctgtcatccgcaagctggcaaaaactcaggggaatgtgtttgccactgatgccatcctggccacgctgatgagctgtacccgctcagtgtattcctgggatattgtcgtccagagagttgggtccaaactcttctttgacaagagagacaactctgactttgacctcctgacagtgagtgagactgccaatgagccccctcaagatgaaggtaattccttcaattcaccccgcaacctggccatggaggcaacctacatcaaccacaatttctcccagcagtgcttgagaatggggaaggaaagatacaacttccccaacccaaacccgtttgtggaggacgacatggataagaatgaaatcgcctctgttgcgtaccgttaccgcaggtggaagcttggagatgatattgaccttattgtccgttgtgagcacgatggcgtcatgactggagccaacggggaagtgtccttcatcaacatcaagacactcaatgagtgggattccaggcactgtaatggcgttgactggcgtcagaagctggactctcagcgaggggctgtcattgccacggagctgaagaacaacagctacaagttggcccggtggacctgctgtgctttgctggctggatctgagtacctcaagcttggttatgtgtctcggtaccacgtgaaagactcctcacgccacgtcatcctaggcacccagcagttcaagcctaatgagtttgccagccagatcaacctgagcgtggagaatgcctggggcattttacgctgcgtcattgacatctgcatgaagctggaggagggcaaatacctcatcctcaaggaccccaacaagcaggtcatccgtgtctacagcctccctgatggcaccttcagctctgatgaagatgaggaggaagaggaggaggaagaagaggaagaagaagaggaagaaacttaaaccagtgatgtggagctggagtttgtccttccaccgagactacgagggcctttgatgcttagtggaatgtgtgtctaacttgctctctgacatttagcagatgaaataaaatatatatctgtttagtctt

SEQ ID NO: 336758 - DNA, 1839 bp, Homo sapiens
taggtctagtagaggccggtgttatatgcatcacgggcggcgcgccattgacattttggaagatggcaaagttcatgacacccgtgatccaggacaacccctcaggctggggtccctgtgcggttcccgagcagtttcgggatatgccctaccagccgttcagcaaaggagatcggctaggaaaggttgcagactggacaggagccacataccaagataagaggtacacaaataagtactcctctcagtttggtggtggaagtcaatatgcttatttccatgaggaggatgaaagtagcttccagctggtggatacagcgcgcacacagaagacggcctaccagcggaatcgaatgagatttgcccagaggaacctccgcagagacaaagatcgtcggaacatgttgcagttcaacctgcagatcctgcctaagagtgccaaacagaaagagagagaacgcattcgactgcagaaaaagttccagaaacaatttggggttaggcagaaatgggatcagaaatcacagaaaccccgagactcttcagttgaagttcgtagtgattgggaagtgaaagaggaaatggattttcctcagttgatgaagatgcgctacttggaagtatcagagccacaggacattgagtgttgtggggccctagaatactacgacaaagcctttgaccgcatcaccacgaggagtgagaagccactgcggagcatcaagcgcatcttccacactgtcaccaccacagacgaccctgtcatccgcaagctggcaaaaactcaggggaatgtgtttgccactgatgccatcctggccacgctgatgagctgtacccgctcagtgtattcctgggatattgtcgtccagagagttgggtccaaactcttctttgacaagagagacaactctgactttgacctcctgacagtgagtgagactgccaatgagccccctcaagatgaaggtaattccttcaattcaccccgcaacctggccatggaggcaacctacatcaaccacaatttctcccagcagtgcttgagaatggggaaggaaagatacaacttccccaacccaaacccgtttgtggaggacgacatggataagaatgaaatcgcctctgttgcgtaccgttaccgcaggtggaagcttggagatgatattgaccttattgtccgttgtgagcacgatggcgtcatgactggagccaacggggaagtgtccttcatcaacatcaagacactcaatgagtgggattccaggcactgtaatggcgttgactggcgtcagaagctggactctcagcgaggggctgtcattgccacggagctgaagaacaacagctacaagttggcccggtggacctgctgtgctttgctggctggatctgagtacctcaagcttggttatgtgtctcggtaccacgtgaaagactcctcacgccacgtcatcctaggcacccagcagttcaagcctaatgagtttgccagccagatcaacctgagcgtggagaatgcctggggcattttacgctgcgtcattgacatctgcatgaagctggaggagggcaaatacctcatcctcaaggaccccaacaagcaggtcatccgtgtctacagcctccctgatggcaccttcagctctgatgaagatgaggaggaagaggaggaggaagaagaggaagaagaagaggaagaaacttaaaccagtgatgtggagctggagtttgtccttccaccgagactacgagggcctttgatgcttagtggaatgtgtgtctaacttgctctctgacatttagcagatgaaataaaatatatatctgtttagtctt

SEQ ID NO: 336759 - DNA, 1830 bp, Homo sapiens
taccttgaaggtaaaccacaggagaaaccgagatatgaaacttaagctcacacatagtgagaatagtagctaatatatggctctcaacaccctcaggctggggtccctgtgcggttcccgagcagtttcgggatatgccctaccagccgttcagcaaaggagatcggctaggaaaggttgcagactggacaggagccacataccaagataagaggtacacaaataagtactcctctcagtttggtggtggaagtcaatatgcttatttccatgaggaggatgaaagtagcttccagctggtggatacagcgcgcacacagaagacggcctaccagcggaatcgaatgagatttgcccagaggaacctccgcagagacaaagatcgtcggaacatgttgcagttcaacctgcagatcctgcctaagagtgccaaacagaaagagagagaacgcattcgactgcagaaaaagttccagaaacaatttggggttaggcagaaatgggatcagaaatcacagaaaccccgagactcttcagttgaagttcgtagtgattgggaagtgaaagaggaaatggattttcctcagttgatgaagatgcgctacttggaagtatcagagccacaggacattgagtgttgtggggccctagaatactacgacaaagcctttgaccgcatcaccacgaggagtgagaagccactgcggagcatcaagcgcatcttccacactgtcaccaccacagacgaccctgtcatccgcaagctggcaaaaactcaggggaatgtgtttgccactgatgccatcctggccacgctgatgagctgtacccgctcagtgtattcctgggatattgtcgtccagagagttgggtccaaactcttctttgacaagagagacaactctgactttgacctcctgacagtgagtgagactgccaatgagccccctcaagatgaaggtaattccttcaattcaccccgcaacctggccatggaggcaacctacatcaaccacaatttctcccagcagtgcttgagaatggggaaggaaagatacaacttccccaacccaaacccgtttgtggaggacgacatggataagaatgaaatcgcctctgttgcgtaccgttaccgcaggtggaagcttggagatgatattgaccttattgtccgttgtgagcacgatggcgtcatgactggagccaacggggaagtgtccttcatcaacatcaagacactcaatgagtgggattccaggcactgtaatggcgttgactggcgtcagaagctggactctcagcgaggggctgtcattgccacggagctgaagaacaacagctacaagttggcccggtggacctgctgtgctttgctggctggatctgagtacctcaagcttggttatgtgtctcggtaccacgtgaaagactcctcacgccacgtcatcctaggcacccagcagttcaagcctaatgagtttgccagccagatcaacctgagcgtggagaatgcctggggcattttacgctgcgtcattgacatctgcatgaagctggaggagggcaaatacctcatcctcaaggaccccaacaagcaggtcatccgtgtctacagcctccctgatggcaccttcagctctgatgaagatgaggaggaagaggaggaggaagaagaggaagaagaagaggaagaaacttaaaccagtgatgtggagctggagtttgtccttccaccgagactacgagggcctttgatgcttagtggaatgtgtgtctaacttgctctctgacatttagcagatgaaataaaatatatatctgtttagtctt

SEQ ID NO: 336760 - DNA, 1666 bp, Homo sapiens
ctcgagcttcgattgcgcggccgccaagtttcagtgatgaacgccctctttgggcgtccccggataccgcctgacgtagtgccaatcacacctctcgcgtctcggcgcctcggaggctaatgaggacgcctggcgaaacgcagtaacggatttccgggtggaccttcgctttacggctcgtgagttcttccgcccaacccagaggaagcgggagagcagtttacgacagcgccggtcgtgtttacggcggcgcccgctgcgcgcgcatgtttcctcttttcctggtttctcaagagtgctgctgctaacgcggtccccggcacgcaccatctgttgccatcccggccggccgaggccattgcagattttggaagatggcaaagttcatgacacccgtgatccaggacaacccctcaggctggggtccctgtgcggttcccgagcagtttcgggatatgccctaccagccgttcagcaaaggagatcggctaggaaaggttgcagactggacaggagccacataccaagataagaggtacacaaataagtactcctctcagtttggtggtggaagtcaatatgcttatttccatgaggaggatgaaagtagcttccagctggtggatacagcgcgcacacagaagacggcctaccagcggaatcgaatgagatttgcccagaggaacctccgcagagacaaagatcgtcggaacatgttgcagttcaacctgcagatcctgcctaagagtgccaaacagaaagagagagaacgcattcgactgcagaaaaagttccagaaacaatttggggttaggcagaaatgggatcagaaatcacagaaaccccgagactcttcagttgaagttcgtagtgattgggaagtgaaagaggaaatggattttcctcagttgatgaagatgcgctacttggaagtatcagagccacaggacattgagtgttgtggggccctagaatactacgacaaagcctttgaccgcatcaccacgaggagtgagaagccactgcggagcatcaagcgcatcttccacactgtcaccaccacagacgaccctgtcatccgcaagctggcaaaaactcaggggaatgtgtttgccactgatgccatcctggccacgctgatgagctgtacccgctcagtgtattcctgggatattgtcgtccagagagttgggtccaaactcttctttgacaagagagacaactctgactttgacctcctgacagtgagtgagactgccaatgagccccctcaagatgaaggtaattccttcaattcaccccgcaacctggccatggaggcaacctatcaacctgagcgtggagaatgcctggggcattttacgctgcgtcattgacatctgcatgaagctggaggagggcaaatacctcatcctcaaggaccccaacaagcaggtcatccgtgtctacagcctccctgatggcaccttcagctctgatgaagatgaggaggaagaggaggaggaagaagaggaagaagaagaggaagaaacttaaaccagtgatgtggagctggagtttgtccttccaccgagactacgagggcctttgatgcttagtggaatgtgtgtctaacttgctctctgacatttagcagatgaaataaaatatatatctgtttagtctt

SEQ ID NO: 336761 - DNA, 1401 bp, Homo sapiens
acaggtggatggggatggagatccacctcggagtacacagacttcagggggcctcctgcctggcacgttctttctctcccgtatcacctaaaccccgagactcttcagttgaagttcgtagtgattgggaagtgaaagaggaaatggattttcctcagttgatgaagatgcgctacttggaagtatcagagccacaggacattgagtgttgtggggccctagaatactacgacaaagcctttgaccgcatcaccacgaggagtgagaagccactgcggagcatcaagcgcatcttccacactgtcaccaccacagacgaccctgtcatccgcaagctggcaaaaactcaggggaatgtgtttgccactgatgccatcctggccacgctgatgagctgtacccgctcagtgtattcctgggatattgtcgtccagagagttgggtccaaactcttctttgacaagagagacaactctgactttgacctcctgacagtgagtgagactgccaatgagccccctcaagatgaaggtaattccttcaattcaccccgcaacctggccatggaggcaacctacatcaaccacaatttctcccagcagtgcttgagaatggggaaggaaagatacaacttccccaacccaaacccgtttgtggaggacgacatggataagaatgaaatcgcctctgttgcgtaccgttaccgcaggtggaagcttggagatgatattgaccttattgtccgttgtgagcacgatggcgtcatgactggagccaacggggaagtgtccttcatcaacatcaagacactcaatgagtgggattccaggcactgtaatggcgttgactggcgtcagaagctggactctcagcgaggggctgtcattgccacggagctgaagaacaacagctacaagttggcccggtggacctgctgtgctttgctggctggatctgagtacctcaagcttggttatgtgtctcggtaccacgtgaaagactcctcacgccacgtcatcctaggcacccagcagttcaagcctaatgagtttgccagccagatcaacctgagcgtggagaatgcctggggcattttacgctgcgtcattgacatctgcatgaagctggaggagggcaaatacctcatcctcaaggaccccaacaagcaggtcatccgtgtctacagcctccctgatggcaccttcagctctgatgaagatgaggaggaagaggaggaggaagaagaggaagaagaagaggaagaaacttaaaccagtgatgtggagctggagtttgtccttccaccgagactacgagggcctttgatgcttagtggaatgtgtgtctaacttgctctctgacatttagcagatgaaataaaatatatatctgtttagtctt

SEQ ID NO: 336762 - DNA, 1142 bp, Homo sapiens
ccgcgtacagttgcgcccgcgtaccagttgcgcccgcggtacagttgcgcaccacagacgagcctgtatccgcaagctggcaaaaactcaggggaatgtgtttgccactgatgccatcctggccacgctgatgagctgtacccgctcagtgtattcctgggatattgtcgtccagagagttgggtccaaactcttctttgacaagagagacaactctgactttgacctcctgacagtgagtgagactgccaatgagccccctcaagatgaaggtaattccttcaattcaccccgcaacctggccatggaggcaacctacatcaaccacaatttctcccagcagtgcttgagaatggggaaggaaagatacaacttccccaacccaaacccgtttgtggaggacgacatggataagaatgaaatcgcctctgttgcgtaccgttaccgcaggtggaagcttggagatgatattgaccttattgtccgttgtgagcacgatggcgtcatgactggagccaacggggaagtgtccttcatcaacatcaagacactcaatgagtgggattccaggcactgtaatggcgttgactggcgtcagaagctggactctcagcgaggggctgtcattgccacggagctgaagaacaacagctacaagttggcccggtggacctgctgtgctttgctggctggatctgagtacctcaagcttggttatgtgtctcggtaccacgtgaaagactcctcacgccacgtcatcctaggcacccagcagttcaagcctaatgagtttgccagccagatcaacctgagcgtggagaatgcctggggcattttacgctgcgtcattgacatctgcatgaagctggaggagggcaaatacctcatcctcaaggaccccaacaagcaggtcatccgtgtctacagcctccctgatggcaccttcagctctgatgaagatgaggaggaagaggaggaggaagaagaggaagaagaagaggaagaaacttaaaccagtgatgtggagctggagtttgtccttccaccgagactacgagggcctttgatgcttagtggaatgtgtgtctaacttgctctctgacatttagcagatgaaataaaatatatatctgtttagtctt

SEQ ID NO: 336763 - DNA, 1369 bp, Homo sapiens
  misc_feature (1369)..(1369): n is a, c, g, or t
ctcgagcttcgattgcgcggccgccaagtttcagtgatgaacgccctctttgggcgtccccggataccgcctgacgtagtgccaatcacacctctcgcgtctcggcgcctcggaggctaatgaggacgcctggcgaaacgcagtaacggatttccgggtggaccttcgctttacggctcgtgagttcttccgcccaacccagaggaagcgggagagcagtttacgacagcgccggtcgtgtttacggcggcgcccgctgcgcgcgcatgtttcctcttttcctggtttctcaagagtgctgctgctaacgcggtccccggcacgcaccatctgttgccatcccggccggccgaggccattgcagattttggaagatggcaaagttcatgacacccgtgatccaggacaacccctcaggctggggtccctgtgcggttcccgagcagtttcgggatatgccctaccagccgttcagcaaaggagatcggctaggaaaggttgcagactggacaggagccacataccaagataagaggtacacaaataagtactcctctcagtttggtggtggaagtcaatatgcttatttccatgaggaggatgaaagtagcttccagctggtggatacagcgcgcacacagaagacggcctaccagcggaatcgaatgagatttgcccagaggaacctccgcagagacaaagatcgtcggaacatgttgcagttcaacctgcagatcctgcctaagagtgccaaacagaaagagagagaacgcattcgactgcagaaaaagttccagaaacaatttggggttaggcagaaatgggatcagaaatcacagaaaccccgagactcttcagttgaagttcgtagtgattgggaagtgaaagaggaaatggattttcctcagttgatgaagatgcgctacttggaagtatcagagccacaggacattgagtgttgtggggccctagaatactacgacaaagcctttgaccgcatcaccacgaggagtgagaagccactgcggagcatcaagcgcatcttccacactgtcaccaccacagacgaccctgtcatccgcaagctggcaaaactcaggggaatgtgtgtgcactgatgcatccggcaaggctgatgaggtaccgatccagtattcgggatttgcgcagagagggggtcacaccctctggcagagagcaactgcttgactcgagtggatggcaggatgaccctagatgaaggactaacgcccgacgtaggggcacaagacaagctcaggtggaaggaagacacacgcacgtggggggtagacaacgagtgcgatatataggcacggaccaacacaaggccgggagtggcgttgtcacn

SEQ ID NO: 336764 - DNA, 902 bp, Homo sapiens
tctcttatccaacatcaacatcttggtcagatttgaactcttcaatctctgcactcaaatcgattggcgggcaacttacatcaaccacaatttctcccagcagtgcttgagaatggggaaggaaagatacaacttccccaacccaaacccgtttgtggaggacgacatggataagaatgaaatcgcctctgttgcgtaccgttaccgcaggtggaagcttggagatgatattgaccttattgtccgttgtgagcacgatggcgtcatgactggagccaacggggaagtgtccttcatcaacatcaagacactcaatgagtgggattccaggcactgtaatggcgttgactggcgtcagaagctggactctcagcgaggggctgtcattgccacggagctgaagaacaacagctacaagttggcccggtggacctgctgtgctttgctggctggatctgagtacctcaagcttggttatgtgtctcggtaccacgtgaaagactcctcacgccacgtcatcctaggcacccagcagttcaagcctaatgagtttgccagccagatcaacctgagcgtggagaatgcctggggcattttacgctgcgtcattgacatctgcatgaagctggaggagggcaaatacctcatcctcaaggaccccaacaagcaggtcatccgtgtctacagcctccctgatggcaccttcagctctgatgaagatgaggaggaagaggaggaggaagaagaggaagaagaagaggaagaaacttaaaccagtgatgtggagctggagtttgtccttccaccgagactacgagggcctttgatgcttagtggaatgtgtgtctaacttgctctctgacatttagcagatgaaataaaatatatatctgtttagtctt

SEQ ID NO: 336765 - DNA, 748 bp, Homo sapiens
  misc_feature (29)..(29): n is a, c, g, or t
atatcactgccacctccctgctggggacnaagggaatctgacacagaagtgatcacagttgagaaatccagccctattgaccttattgtccgttgtgagcacgatggcgtcatgactggagccaacggggaagtgtccttcatcaacatcaagacactcaatgagtgggattccaggcactgtaatggcgttgactggcgtcagaagctggactctcagcgaggggctgtcattgccacggagctgaagaacaacagctacaagttggcccggtggacctgctgtgctttgctggctggatctgagtacctcaagcttggttatgtgtctcggtaccacgtgaaagactcctcacgccacgtcatcctaggcacccagcagttcaagcctaatgagtttgccagccagatcaacctgagcgtggagaatgcctggggcattttacgctgcgtcattgacatctgcatgaagctggaggagggcaaatacctcatcctcaaggaccccaacaagcaggtcatccgtgtctacagcctccctgatggcaccttcagctctgatgaagatgaggaggaagaggaggaggaagaagaggaagaagaagaggaagaaacttaaaccagtgatgtggagctggagtttgtccttccaccgagactacgagggcctttgatgcttagtggaatgtgtgtctaacttgctctctgacatttagcagatgaaataaaatatatatctgtttagtctt

SEQ ID NO: 336766 - DNA, 601 bp, Homo sapiens
ctgtttctctaacggagcttctcctgcaggcactgtaatggcgttgactggcgtcagaagctggactctcagcgaggggctgtcattgccacggagctgaagaacaacagctacaagttggcccggtggacctgctgtgctttgctggctggatctgagtacctcaagcttggttatgtgtctcggtaccacgtgaaagactcctcacgccacgtcatcctaggcacccagcagttcaagcctaatgagtttgccagccagatcaacctgagcgtggagaatgcctggggcattttacgctgcgtcattgacatctgcatgaagctggaggagggcaaatacctcatcctcaaggaccccaacaagcaggtcatccgtgtctacagcctccctgatggcaccttcagctctgatgaagatgaggaggaagaggaggaggaagaagaggaagaagaagaggaagaaacttaaaccagtgatgtggagctggagtttgtccttccaccgagactacgagggcctttgatgcttagtggaatgtgtgtctaacttgctctctgacatttagcagatgaaataaaatatatatctgtttagtctt

SEQ ID NO: 336767 - DNA, 607 bp, Homo sapiens
gccatcatcattcactagtgagtggtattacacgcagggataactggtatcacctggcgtcagaagctggactctcagcgaggggctgtcattgccacggagctgaagaacaacagctacaagttggcccggtggacctgctgtgctttgctggctggatctgagtacctcaagcttggttatgtgtctcggtaccacgtgaaagactcctcacgccacgtcatcctaggcacccagcagttcaagcctaatgagtttgccagccagatcaacctgagcgtggagaatgcctggggcattttacgctgcgtcattgacatctgcatgaagctggaggagggcaaatacctcatcctcaaggaccccaacaagcaggtcatccgtgtctacagcctccctgatggcaccttcagctctgatgaagatgaggaggaagaggaggaggaagaagaggaagaagaagaggaagaaacttaaaccagtgatgtggagctggagtttgtccttccaccgagactacgagggcctttgatgcttagtggaatgtgtgtctaacttgctctctgacatttagcagatgaaataaaatatatatctgtttagtctt

SEQ ID NO: 336768 - DNA, 965 bp, Homo sapiens
gtgaggcctggttggaatcggccgaggcagctgctgctaacgcggtccccggcacgcaccatctgttgccatcccggccggccgaggccattgcagattttggaagatggcaaagttcatgacacccgtgatccaggacaacccctcaggctggggtccctgtgcggttcccgagcagtttcgggatatgccctaccagccgttcagcaaaggagatcggctaggaaaggttgcagactggacaggagccacataccaagataagaggtacacaaataagtactcctctcagtttggtggtggaagtcaatatgcttatttccatgaggaggatgaaagtagcttccagctggtggatacagcgcgcacacagaagacggcctaccagcggaatcgaatgagatttgcccagaggaacctccgcagagacaaagatcgtcggaacatgttgcagttcaacctgcagatcctgcctaagagtgccaaacagaaagagagagaacgcattcgactgcagaaaaagttccagaaacaatttggggttaggcagaaatgggatcagaaatcacagaaaccccgagactcttcagttgaagttcgtagtgattgggaagtgaaagaggaaatggattttcctcagttgatgaagatgcgctacttggaagtatcagagccacaggacattgagtgttgtggggccctagaatactacgacaaagcctttgaccgcatcaccacgaggagtgagaagccactgcggagcatcaagcgcatcttccacactgtcaccaccacagacgaccctgtcatccgcaaggcaggctgcgaaaactccgggacatttgtctgcctgatgccacctgcccagcgatagtggaccgcagggactccggaaatgggcgccaagacgggtcaaccttcttgcacaacgcgcacactgcttgcctagaggagaagccaagacc

SEQ ID NO: 336769 - DNA, 392 bp, Homo sapiens
acgccagtcaacgccattacagtgcctggaatcccactcattgagtgtcttgatgttgatgaaggacacttccccgttggctccagtcatgacgccatcgtgctcacaacggacaataaggtcaatcaaatacctcatcctcaaggaccccaacaagcaggtcatccgtgtctacagcctccctgatggcaccttcagctctgatgaagatgaggaggaagaggaggaggaagaagaggaagaagaagaggaagaaacttaaaccagtgatgtggagctggagtttgtccttccaccgagactacgagggcctttgatgcttagtggaatgtgtgtctaacttgctctctgacatttagcagatgaaataaaatatatatctgtttagtctt

SEQ ID NO: 336770 - DNA, 356 bp, Homo sapiens
ctgtttctctaacggagcttctcctgcaggcactgtaatggcgttgactggcgtcagaagctggactctcagcgaggggctgtcattgccacggagctgaagaacaacagctacaagttggcccggtggacctgctgtgctttgctggctggatctgagtacctcaagcttggttatgtgtctcggtaccacgtgaaagactcctcacgccacgtcatcctaggcacccagcagttcaagcctaatgagtttgccagccagtacaacctgccggtgagtacaacctgccggtggagtacccctgccggtggagtaccacctgccggtggagtacacctgccgtggagtacacctcc

SEQ ID NO: 336771 - DNA, 1904 bp, Homo sapiens
tttaaaaggtcgtcttgtccaatctcaaagttattttgcacagagtaacacctgctgctaacgcggtccccggcacgcaccatctgttgccatcccggccggccgaggccattgcagattttggaagatggcaaagttcatgacacccgtgatccaggacaacccctcaggctggggtccctgtgcggttcccgagcagtttcgggatatgccctaccagccgttcagcaaaggagatcggctaggaaaggttgcagactggacaggagccacataccaagataagaggtacacaaataagtactcctctcagtttggtggtggaagtcaatatgcttatttccatgaggaggatgaaagtagcttccagctggtggatacagcgcgcacacagaagacggcctaccagcggaatcgaatgagatttgcccagaggaacctccgcagagacaaagatcgtcggaacatgttgcagttcaacctgcagatcctgcctaagagtgccaaacagaaagagagagaacgcattcgactgcagaaaaagttccagaaacaatttggggttaggcagaaatgggatcagaaatcacagaaaccccgagactcttcagttgaagttcgtagtgattgggaagtgaaagaggaaatggattttcctcagttgatgaagatgcgctacttggaagtatcagagccacaggacattgagtgttgtggggccctagaatactacgacaaagcctttgaccgcatcaccacgaggagtgagaagccactgcggagcatcaagcgcatcttccacactgtcaccaccacagacgaccctgtcatccgcaagctggcaaaaactcaggggaatgtgtttgccactgatgccatcctggccacgctgatgagctgtacccgctcagtgtattcctgggatattgtcgtccagagagttgggtccaaactcttctttgacaagagagacaactctgactttgacctcctgacagtgagtgagactgccaatgagccccctcaagatgaaggtaattccttcaattcaccccgcaacctggccatggaggcaacctacatcaaccacaatttctcccagcagtgcttgagaatggggaaggaaagatacaacttccccaacccaaacccgtttgtggaggacgacatggataagaatgaaatcgcctctgttgcgtaccgttaccgcaggtggaagcttggagatgatattgaccttattgtccgttgtgagcacgatggcgtcatgactggagccaacggggaagtgtccttcatcaacatcaagacactcaatgagtgggattccaggcactgtaatggcgttgactggcgtcagaagctggactctcagcgaggggctgtcattgccacggagctgaagaacaacagctacaagttggcccggtggacctgctgtgctttgctggctggatctgagtacctcaagcttggttatgtgtctcggtaccacgtgaaagactcctcacgccacgtcatcctaggcacccagcagttcaagcctaatgagtttgccagccagatcaacctgagcgtggagaatgcctggggcattttacgctgcgtcattgacatctgcatgaagctggaggagggcaaatacctcatcctcaaggaccccaacaagcaggtcatccgtgtctacagcctccctgatggcaccttcagctctgatgaagatgaggaggaagaggaggaggaagaagaggaagaagaagaggaagaaacttaaaccagtgatgtggagctggagtttgtccttccaccgagactacgagggcctttgatgcttagtggaatgtgtgtctaacttgctctctgacatttagcagatgaaataaaatatatatctgtttagtctt

SEQ ID NO: 336772 - DNA, 2339 bp, Homo sapiens
ctcgagcttcgattgcgcggccgccaagtttcagtgatgaacgccctctttgggcgtccccggataccgcctgacgtagtgccaatcacacctctcgcgtctcggcgcctcggaggctaatgaggacgcctggcgaaacgcagtaacggatttccgggtggaccttcgctttacggctcgtgagttcttccgcccaacccagaggaagcgggagagcagtttacgacagcgccggtcgtgtttacggcggcgcccgctgcgcgcgcatgtttcctcttttcctggtttctcaagagtgctgctgctaacgcggtccccggcacgcaccatctgttgccatcccggccggccgaggccattgcagattttggaagatggcaaagttcatgacacccgtgatccaggacaacccctcaggctggggtccctgtgcggttcccgagcagtttcgggatatgccctaccagccgttcagcaaaggagatcggctaggaaaggttgcagactggacaggagccacataccaagataagaggtacacaaataagtactcctctcagtttggtggtggaagtcaatatgcttatttccatgaggaggatgaaagtagcttccagctggtggatacagcgcgcacacagaagacggcctaccagcggaatcgaatgagatttgcccagaggaacctccgcagagacaaagatcgtcggaacatgttgcagttcaacctgcagatcctgcctaagagtgccaaacagaaagagagagaacgcattcgactgcagaaaaagttccagaaacaatttggggttaggcagaaatgggatcagaaatcacagaaaccccgagactcttcagttgaagttcgtagtgattgggaagtgaaagaggaaatggattttcctcagttgatgaagatgcgctacttggaagtatcagagccacaggacattgagtgttgtggggccctagaatactacgacaaagcctttgaccgcatcaccacgaggagtgagaagccactgcggagcatcaagcgcatcttccacactgtcaccaccacagacgaccctgtcatccgcaagctggcaaaaactcaggggaatgtgtttgccactgatgccatcctggccacgctgatgagctgtacccgctcagtgtattcctgggatattgtcgtccagagagttgggtccaaactcttctttgacaagagagacaactctgactttgacctcctgacagtgagtgagactgccaatgagccccctcaagatgaaggtaattccttcaattcaccccgcaacctggccatggaggcaacctacatcaaccacaatttctcccagcagtgcttgagaatggggaaggaaagatacaacttccccaacccaaacccgtttgtggaggacgacatggataagaatgaaatcgcctctgttgcgtaccgttaccgcaggtggaagcttggagatgatattgaccttattgtccgttgtgagcacgatggcgtcatgactggagccaacggggaagtgtccttcatcaacatcaagacactcaatgagtgggattccaggcactgtaatggcgttgactggcgtcagaagctggactctcagcgaggggctgtcattgccacggagctgaagaacaacagctacaagttggcccggtggacctgctgtgctttgctggctggatctgagtacctcaagcttggttatgtgtctcggtaccacgtgaaagactcctcacgccacgtcatcctaggcacccagcagttcaagcctaatgagtttgccagccagatcaacctgagcgtggagaatgcctggggcattttacgctgcgtcattgacatctgcatgaagctggaggagggcaaatacctcatcctcaaggaccccaacaagcaggtcatccgtgtctacagcctccctgatggcaccttcagctctgatgaagatgaggaggaagaggaggaggaagaagaggaagaagaagaggaagaaacttaaaccagtgatgtggagctggagtttgtccttccaccgagactacgagggcctttgatgcttagtggaatgtgtgtctaacttgctctctgacatttagcagatgaaataaaatatatatctgtttagtcttttttggttggtcgaaaaaaaacaaacaacaaacaaaaaattttggggggcggcccgaaaaatttaaaattgtggggggcggggccaagtaaaaatggaagggtcaagaaacggcggaaagggggggttccaaaaaaacacggggcacggtggaacaaggtgggttgtgtacagagaacacacccgggg

SEQ ID NO: 336773 - DNA, 2319 bp, Homo sapiens
ctcgagcttcgattgcgcggccgccaagtttcagtgatgaacgccctctttgggcgtccccggataccgcctgacgtagtgccaatcacacctctcgcgtctcggcgcctcggaggctaatgaggacgcctggcgaaacgcagtaacggatttccgggtggaccttcgctttacggctcgtgagttcttccgcccaacccagaggaagcgggagagcagtttacgacagcgccggtcgtgtttacggcggcgcccgctgcgcgcgcatgtttcctcttttcctggtttctcaagagtgctgctgctaacgcggtccccggcacgcaccatctgttgccatcccggccggccgaggccattgcagattttggaagatggcaaagttcatgacacccgtgatccaggacaacccctcaggctggggtccctgtgcggttcccgagcagtttcgggatatgccctaccagccgttcagcaaaggagatcggctaggaaaggttgcagactggacaggagccacataccaagataagaggtacacaaataagtactcctctcagtttggtggtggaagtcaatatgcttatttccatgaggaggatgaaagtagcttccagctggtggatacagcgcgcacacagaagacggcctaccagcggaatcgaatgagatttgcccagaggaacctccgcagagacaaagatcgtcggaacatgttgcagttcaacctgcagatcctgcctaagagtgccaaacagaaagagagagaacgcattcgactgcagaaaaagttccagaaacaatttggggttaggcagaaatgggatcagaaatcacagaaaccccgagactcttcagttgaagttcgtagtgattgggaagtgaaagaggaaatggattttcctcagttgatgaagatgcgctacttggaagtatcagagccacaggacattgagtgttgtggggccctagaatactacgacaaagcctttgaccgcatcaccacgaggagtgagaagccactgcggagcatcaagcgcatcttccacactgtcaccaccacagacgaccctgtcatccgcaagctggcaaaaactcaggggaatgtgtttgccactgatgccatcctggccacgctgatgagctgtacccgctcagtgtattcctgggatattgtcgtccagagagttgggtccaaactcttctttgacaagagagacaactctgactttgacctcctgacagtgagtgagactgccaatgagccccctcaagatgaaggtaattccttcaattcaccccgcaacctggccatggaggcaacctacatcaaccacaatttctcccagcagtgcttgagaatggggaaggaaagatacaacttccccaacccaaacccgtttgtggaggacgacatggataagaatgaaatcgcctctgttgcgtaccgttaccgcaggtggaagcttggagatgatattgaccttattgtccgttgtgagcacgatggcgtcatgactggagccaacggggaagtgtccttcatcaacatcaagacactcaatgagtgggattccaggcactgtaatggcgttgactggcgtcagaagctggactctcagcgaggggctgtcattgccacggagctgaagaacaacagctacaagttggcccggtggacctgctgtgctttgctggctggatctgagtacctcaagcttggttatgtgtctcggtaccacgtgaaagactcctcacgccacgtcatcctaggcacccagcagttcaagcctaatgagtttgccagccagatcaacctgagcgtggagaatgcctggggcattttacgctgcgtcattgacatctgcatgaagctggaggagggcaaatacctcatcctcaaggaccccaacaagcaggtcatccgtgtctacagcctccctgatggcaccttcagctctgatgaagatgaggaggaagaggaggaggaagaagaggaagaagaagctggtgactgaaggaaatacctgcccagccctgtgagcatctgaaaggcttaacttcggaatggaagtgttgaaaactcacgcacagtccagcagaggttcagaaaggaaagtgaacatcatatcacacaacctggctcatttctcttacattttttgtgtctttcagaggaagaaacttaaaccagtgatgtggagctggagtttgtccttccaccgagactacgagggcctttgatgcttagtggaatgtgtgtctaacttgctctctgacatttagcagatgaaataaaatatatatctgtttagtctt

SEQ ID NO: 336774 - DNA, 1820 bp, Homo sapiens
ctcgagcttcgattgcgcggccgccaagtttcagtgatgaacgccctctttgggcgtccccggataccgcctgacgtagtgccaatcacacctctcgcgtctcggcgcctcggaggctaatgaggacgcctggcgaaacgcagtaacggatttccgggtggaccttcgctttacggctcgtgagttcttccgcccaacccagaggaagcgggagagcagtttacgacagcgccggtcgtgtttacggcggcgcccgctgcgcgcgcatgtttcctcttttcctggtttctcaagagtgctgctgctaacgcggtccccggcacgcaccatctgttgccatcccggccggccgaggccattgcagattttggaagatggcaaagttcatgacacccgtgatccaggacaacccctcaggctggggtccctgtgcggttcccgagcagtttcgggatatgccctaccagccgttcagcaaaggagatcggctaggaaaggttgcagactggacaggagccacataccaagataagaggtacacaaataagtactcctctcagtttggtggtggaagtcaatatgcttatttccatgaggaggatgaaagtagcttccagctggtggatacagcgcgcacacagaagacggcctaccagcggaatcgaatgagatttgcccagaggaacctccgcagagacaaagatcgtcggaacatgttgcagttcaacctgcagatcctgcctaagagtgccaaacagaaagagagagaacgcattcgactgcagaaaaagttccagaaacaatttggggttaggcagaaatgggatcagaaatcacagaaaccccgagactcttcagttgaagttcgtagtgattgggaagtgaaagaggaaatggattttcctcagttgatgaagatgcgctacttggaagtatcagagccacaggacattgagtgttgtggggccctagaatactacgacaaagcctttgaccgcatcaccacgaggagtgagaagccactgcggagcatcaagcgcatcttccacactgtcaccaccacagacgaccctgtcatccgcaagctggcaaaaactcaggggaatgtgtttgccactgatgccatcctggccacgctgatgagctgtacccgctcagtgtattcctgggatattgtcgtccagagagttgggtccaaactcttctttgacaagagagacaactctgactttgacctcctgacagtgagtgagactgccaatgagccccctcaagatgaaggtaattccttcaattcaccccgcaacctggccatggaggcaacctacatcaaccacaatttctcccagcagtgcttgagaatggggaaggaaagatacaacttccccaacccaaacccgtttgtggaggacgacatggataagaatgaaatcgcctctgttgcgtaccgttaccgcaggtggaagcttggagatgatattgaccttattgtccgttgtgagcacgatggcgtcatgactggagccaacggggaagtgtccttcatcaacatcaagacactcaatgagtgggattccaggcactgtaatggcgttgactggcgtcagaagctggactctcagcgaggggctgtcattgccacggagctgaagaacaacagctacaagttggcccggtggacctgctgtgctttgctggctggatctgagtacctcaagcttggttatgtgtctcggtaccacgtgaaagactcctcaccacgtactagcacccacattcacctataagtgccccaatcgaagggatcctctagatacgca

SEQ ID NO: 336775 - DNA, 2347 bp, Homo sapiens
ctcgagcttcgattgcgcggccgccaagtttcagtgatgaacgccctctttgggcgtccccggataccgcctgacgtagtgccaatcacacctctcgcgtctcggcgcctcggaggctaatgaggacgcctggcgaaacgcagtaacggatttccgggtggaccttcgctttacggctcgtgagttcttccgcccaacccagaggaagcgggagagcagtttacgacagcgccggtcgtgtttacggcggcgcccgctgcgcgcgcatgtttcctcttttcctggtttctcaagagtgctgctgctaacgcggtccccggcacgcaccatctgttgccatcccggccggccgaggccattgcaggtgagcggcgtgtttcataggttcctgcggccctccggagccggttcggactaggtccagccttcggggggcctcccggaagagacctctcttagtcccttcctgctgttgccgtccctccgctgggcggggcaggaatccactttcgggggccccgcgtcccgcacgctactgaacgcgggacacgaccttgtggattttggaagatggcaaagttcatgacacccgtgatccaggacaacccctcaggctggggtccctgtgcggttcccgagcagtttcgggatatgccctaccagccgttcagcaaaggagatcggctaggaaaggttgcagactggacaggagccacataccaagataagaggtacacaaataagtactcctctcagtttggtggtggaagtcaatatgcttatttccatgaggaggatgaaagtagcttccagctggtggatacagcgcgcacacagaagacggcctaccagcggaatcgaatgagatttgcccagaggaacctccgcagagacaaagatcgtcggaacatgttgcagttcaacctgcagatcctgcctaagagtgccaaacagaaagagagagaacgcattcgactgcagaaaaagttccagaaacaatttggggttaggcagaaatgggatcagaaatcacagaaaccccgagactcttcagttgaagttcgtagtgattgggaagtgaaagaggaaatggattttcctcagttgatgaagatgcgctacttggaagtatcagagccacaggacattgagtgttgtggggccctagaatactacgacaaagcctttgaccgcatcaccacgaggagtgagaagccactgcggagcatcaagcgcatcttccacactgtcaccaccacagacgaccctgtcatccgcaagctggcaaaaactcaggggaatgtgtttgccactgatgccatcctggccacgctgatgagctgtacccgctcagtgtattcctgggatattgtcgtccagagagttgggtccaaactcttctttgacaagagagacaactctgactttgacctcctgacagtgagtgagactgccaatgagccccctcaagatgaaggtaattccttcaattcaccccgcaacctggccatggaggcaacctacatcaaccacaatttctcccagcagtgcttgagaatggggaaggaaagatacaacttccccaacccaaacccgtttgtggaggacgacatggataagaatgaaatcgcctctgttgcgtaccgttaccgcaggtggaagcttggagatgatattgaccttattgtccgttgtgagcacgatggcgtcatgactggagccaacggggaagtgtccttcatcaacatcaagacactcaatgagtgggattccaggcactgtaatggcgttgactggcgtcagaagctggactctcagcgaggggctgtcattgccacggagctgaagaacaacagctacaagttggcccggtggacctgctgtgctttgctggctggatctgagtacctcaagcttggttatgtgtctcggtaccacgtgaaagactcctcacgccacgtcatcctaggcacccagcagttcaagcctaatgagtttgccagccagatcaacctgagcgtggagaatgcctggggcattttacgctgcgtcattgacatctgcatgaagctggaggagggcaaatacctcatcctcaaggaccccaacaagcaggtcatccgtgtctacagcctccctgatggcaccttcagctctgatgaagatgaggaggaagaggaggaggaagaagaggaagaagaagaggaagaaacttaaaccagtgatgtggagctggagtttgtccttccaccgagactacgagggcctttgatgcttagtggaatgtgtgtctaacttgctctctgacatttagcagatgaaataaaatatatatctgtttagtctt

SEQ ID NO: 336776 - DNA, 1901 bp, Homo sapiens
ctcgagcttcgattgcgcggccgccaagtttcagtgatgaacgccctctttgggcgtccccggataccgcctgacgtagtgccaatcacacctctcgcgtctcggcgcctcggaggctaatgaggacgcctggcgaaacgcagtaacggatttccgggtggaccttcgctttacggctcgtgagttcttccgcccaacccagaggaagcgggagagcagtttacgacagcgccggtcgtgtttacggcggcgcccgctgcgcgcgcatgtttcctcttttcctggtttctcaagagtgctgctgctaacgcggtccccggcacgcaccatctgttgccatcccggccggccgaggccattgcagattttggaagatggcaaagttcatgacacccgtgatccaggacaacccctcaggctggggtccctgtgcggttcccgagcagtttcgggatatgccctaccagccgttcagcaaaggagatcggctaggaaaggttgcagactggacaggagccacataccaagataagaggtacacaaataagtactcctctcagtttggtggtggaagtcaatatgcttatttccatgaggaggatgaaagtagcttccagctggtggatacagcgcgcacacagaagacggcctaccagcggaatcgaatgagatttgcccagaggaacctccgcagagacaaagatcgtcggaacatgttgcagttcaacctgcagatcctgcctaagagtgccaaacagaaagagagagaacgcattcgactgcagaaaaagttccagaaacaatttggggttaggcagaaatgggatcagaaatcacagaaaccccgagactcttcagttgaagttcgtagtgattgggaagtgaaagaggaaatggattttcctcagttgatgaagatgcgctacttggaagtatcagagccacaggacattgagtgttgtggggccctagaatactacgacaaagcctttgaccgcatcaccacgaggagtgagaagccactgcggagcatcaagcgcatcttccacactgtcaccaccacagacgaccctgtcatccgcaagctggcaaaaactcaggggaatgtgtttgccactgatgccatcctggccacgctgatgagctgtacccgctcagtgtattcctgggatattgtcgtccagagagttgggtccaaactcttctttgacaagagagacaactctgactttgacctcctgacagtgagtgagactgccaatgagccccctcaagatgaaggtaattccttcaattcaccccgcaacctggccatggaggcaacctacatcaaccacaatttctcccagcagtgcttgagaatggggaaggaaagatacaacttccccaacccaaacccgtttgtggaggacgacatggataagaatgaaatcgcctctgttgcgtaccgttaccgcaggtggaagcttggagatgatattgaccttattgtccgttgtgagcacgatggcgtcatgactggagccaacggggaagtgtccttcatcaacatcaagacactcaatgagtgggattccagggtgagccgccatctccatcaccctcctggtgacaccatgtctctattccctacagtgcctgtttacgcaggctaggttgtataaactgtttcttatcccctttcgttacttatagagctacctggatgtttttttttgtcttgtgagttttttcctctgcttagttccttgctgagaaagagcatgactgtgtgtgtagaactatgttaagtgttaagaacttttctgcttattttttacgcaggaaccagttaactcccttcttccagtactttcttcatctctgttccattgtggcctcctgttgacttctgctccctg

SEQ ID NO: 336777 - DNA, 1383 bp, Homo sapiens
tacaggctaggtacgaggctgggtggttaatcggccgaggggttaggcagaaatgggatcagaaatcacagaaaccccgagactcttcagttgaagttcgtagtgattgggaagtgaaagaggaaatggattttcctcagttgatgaagatgcgctacttggaagtatcagagccacaggacattgagtgttgtggggccctagaatactacgacaaagcctttgaccgcatcaccacgaggagtgagaagccactgcggagcatcaagcgcatcttccacactgtcaccaccacagacgaccctgtcatccgcaagctggcaaaaactcaggggaatgtgtttgccactgatgccatcctggccacgctgatgagctgtacccgctcagtgtattcctgggatattgtcgtccagagagttgggtccaaactcttctttgacaagagagacaactctgactttgacctcctgacagtgagtgagactgccaatgagccccctcaagatgaaggtaattccttcaattcaccccgcaacctggccatggaggcaacctacatcaaccacaatttctcccagcagtgcttgagaatggggaaggaaagatacaacttccccaacccaaacccgtttgtggaggacgacatggataagaatgaaatcgcctctgttgcgtaccgttaccgcaggtggaagcttggagatgatattgaccttattgtccgttgtgagcacgatggcgtcatgactggagccaacggggaagtgtccttcatcaacatcaagacactcaatgagtgggattccaggcactgtaatggcgttgactggcgtcagaagctggactctcagcgaggggctgtcattgccacggagctgaagaacaacagctacaagttggcccggtggacctgctgtgctttgctggctggatctgagtacctcaagcttggttatgtgtctcggtaccacgtgaaagactcctcacgccacgtcatcctaggcacccagcagttcaagcctaatgagtttgccagccagatcaacctgagcgtggagaatgcctggggcattttacgctgcgtcattgacatctgcatgaagctggaggagggcaaatacctcatcctcaaggaccccaacaagcaggtcatccgtgtctacagcctccctgatggcaccttcagctctgatgaagatgaggaggaagaggaggaggaagaagaggaagaagaagaggaagaaacttaaaccagtgatgtggagctggagtttgtccttccaccgagactacgagggcctttgatgcttagtggaatgtgtgtctaacttgctctctgacatttagcagatgaaataaaatatatatctgtttagtctt

SEQ ID NO: 336778 - DNA, 1684 bp, Homo sapiens
caggttacagtctaaagtggcaggatccaattacaattggagagtgactggggttagtacaaaagtaaaggaggagtaagatcaatagatggtaacatattctgaagtggtacgatccagtacagtaaccactagccataaatagctatcttacacttgaaatacacttgggtaaaattgaaatgtgcacactagatttcaatgaactggtaacaaaaaaattgtgaaatatcccatgaattaataatctttatactgattatatattgcaatgataatatctgggatatatcgggttaaatgaaacatacgtcaaggaaaaaaaataaatttctgtgcccatttcaattgaaatgggcacagaaattacagaaaccccgagactcttcagttgaagttcgtagtgattgggaagtgaaagaggaaatggattttcctcagttgatgaagatgcgctacttggaagtatcagagccacaggacattgagtgttgtggggccctagaatactacgacaaagcctttgaccgcatcaccacgaggagtgagaagccactgcggagcatcaagcgcatcttccacactgtcaccaccacagacgaccctgtcatccgcaagctggcaaaaactcaggggaatgtgtttgccactgatgccatcctggccacgctgatgagctgtacccgctcagtgtattcctgggatattgtcgtccagagagttgggtccaaactcttctttgacaagagagacaactctgactttgacctcctgacagtgagtgagactgccaatgagccccctcaagatgaaggtaattccttcaattcaccccgcaacctggccatggaggcaacctacatcaaccacaatttctcccagcagtgcttgagaatggggaaggaaagatacaacttccccaacccaaacccgtttgtggaggacgacatggataagaatgaaatcgcctctgttgcgtaccgttaccgcaggtggaagcttggagatgatattgaccttattgtccgttgtgagcacgatggcgtcatgactggagccaacggggaagtgtccttcatcaacatcaagacactcaatgagtgggattccaggcactgtaatggcgttgactggcgtcagaagctggactctcagcgaggggctgtcattgccacggagctgaagaacaacagctacaagttggcccggtggacctgctgtgctttgctggctggatctgagtacctcaagcttggttatgtgtctcggtaccacgtgaaagactcctcacgccacgtcatcctaggcacccagcagttcaagcctaatgagtttgccagccagatcaacctgagcgtggagaatgcctggggcattttacgctgcgtcattgacatctgcatgaagctggaggagggcaaatacctcatcctcaaggaccccaacaagcaggtcatccgtgtctacagcctccctgatggcaccttcagctctgatgaagatgaggaggaagaggaggaggaagaagaggaagaagaagaggaagaaacttaaaccagtgatgtggagctggagtttgtccttccaccgagactacgagggcctttgatgcttagtggaatgtgtgtctaacttgctctctgacatttagcagatgaaataaaatatatatctgtttagtctt

SEQ ID NO: 336779 - DNA, 1233 bp, Homo sapiens
ctcgagcttcgattgcgcggccgccaagtttcagtgatgaacgccctctttgggcgtccccggataccgcctgacgtagtgccaatcacacctctcgcgtctcggcgcctcggaggctaatgaggacgcctggcgaaacgcagtaacggatttccgggtggaccttcgctttacggctcgtgagttcttccgcccaacccagaggaagcgggagagcagtttacgacagcgccggtcgtgtttacggcggcgcccgctgcgcgcgcatgtttcctcttttcctggtttctcaagagtgctgctgctaacgcggtccccggcacgcaccatctgttgccatcccggccggccgaggccattgcagattttggaagatggcaaagttcatgacacccgtgatccaggacaacccctcaggctggggtccctgtgcggttcccgagcagtttcgggatatgccctaccagccgttcagcaaaggagatcggctaggaaaggttgcagactggacaggagccacataccaagataagaggtacacaaataagtactcctctcagtttggtggtggaagtcaatatgcttatttccatgaggaggatgaaagtagcttccagctggtggatacagcgcgcacacagaagacggcctaccagcggaatcgaatgagatttgcccagaggaacctccgcagagacaaagatcgtcggaacatgttgcagttcaacctgcagatcctgcctaagagtgccaaacagaaagagagagaacgcattcgactgcagaaaaagttccagaaacaatttggggttaggcagaaatgggatcagaaatcacagaaaccccgagactcttcagttgaagttcgtagtgattgggaagtgaaagaggaaatggattttcctcagttgatgaagatgcgctacttggaagtatcagagccacaggacattgagtgttgtggggccctagaatactacgacaaagcctttgaccgcatcaccacgaggagtgagaagccactgcggagcatcaagcgcatcttccacactgtcaccaccacagacgaccctgtcatccgcaaggcaggctgcgaaaactccgggacatttgtctgcctgatgccacctgcccagcgatagtggaccgcagggactccggaaatgggcgccaagacgggtcaaccttcttgcacaacgcgcacactgcttgcctagaggagaagccaagacc

SEQ ID NO: 336780 - DNA, 756 bp, Homo sapiens
cggacgcgtgggtcgacccacgcgtccggaatgaaatcgcctctgttgcgtaccgttaccgcaggtggaagcttggagatgatattgaccttattgtccgttgtgagcacgatggcgtcatgactggagccaacggggaagtgtccttcatcaacatcaagacactcaatgagtgggattccaggcactgtaatggcgttgactggcgtcagaagctggactctcagcgaggggctgtcattgccacggagctgaagaacaacagctacaagttggcccggtggacctgctgtgctttgctggctggatctgagtacctcaagcttggttatgtgtctcggtaccacgtgaaagactcctcacgccacgtcatcctaggcacccagcagttcaagcctaatgagtttgccagccagatcaacctgagcgtggagaatgcctggggcattttacgctgcgtcattgacatctgcatgaagctggaggagggcaaatacctcatcctcaaggaccccaacaagcaggtcatccgtgtctacagcctccctgatggcaccttcagctctgatgaagatgaggaggaagaggaggaggaagaagaggaagaagaagaggaagaaacttaaaccagtgatgtggagctggagtttgtccttccaccgagactacgagggcctttgatgcttagtggaatgtgtgtctaacttgctctctgacatttagcagatgaaataaaatatatatctgtttagtctt

SEQ ID NO: 336781 - DNA, 1033 bp, Homo sapiens
  misc_feature (13)..(13): n is a, c, g, or t
  misc_feature (64)..(64): n is a, c, g, or t
ggcacccagcagntcaagcctaatgagtttgccagccagatcaacctgagcgtggagaatgccnggggcattttacgctgcgtcattgacatctgcatgaagctggaggagggcaaatacctcatcctcaaggaccccaacaagcaggtcatccgtgtctacagcctccctgatggcaccttcagctctgatgaagatgaggaggaagaggaggaggaagaagaggaagaagaagaggaagaaacttaaaccagtgatgtggagctggagtttgtccttccaccgagactcctcacgccaagctgatcctaggcacccagcagttcaagcctaatgagtttgccagccagatcaacctgagcgtggagaatgcctggggattatcacgatggcgtcatgactggagccaacggggaagtgtccttcatcaacatcaagacactcaatgagtgggattccaggcactgtaatggcgttgactggcgtcagaagctggactctcagcgaggggctgtcattgccacggagctgaagaacaacagctacaagttggcccggtggacctgctgtgctttgctggctggatctgagtacctcaagcttggttatgtgtctcggtaccacgtgaaagactcctcacgccacgtcatcctaggcacccagcagttcaagcctaatgagtttgccagccagatcaacctgagcgtggagaatgcctggggcattttacgctgcgtcattgacatctgcatgaagctggaggagggcaaatacctcatcctcaaggaccccaacaagcaggtcatccgtgtctacagcctccctgatggcaccttcagctctgatgaagatgaggaggaagaggaggaggaagaagaggaagaagaagaggaagaaacttaaaccagtgatgtggagctggagtttgtccttccaccgagactacgagggcctttgatgcttagtggaatgtgtgtctaacttgctctctgacatttagcagatgaaataaaatatatatctgtttagtctt

SEQ ID NO: 336782 - DNA, 1083 bp, Homo sapiens
  misc_feature (504)..(504): n is a, c, g, or t
  misc_feature (519)..(519): n is a, c, g, or t
  misc_feature (523)..(523): n is a, c, g, or t
ctcgagcttcgattgcgcggccgccaagtttcagtgatgaacgccctctttgggcgtccccggataccgcctgacgtagtgccaatcacacctctcgcgtctcggcgcctcggaggctaatgaggacgcctggcgaaacgcagtaacggatttccgggtggaccttcgctttacggctcgtgagttcttccgcccaacccagaggaagcgggagagcagtttacgacagcgccggtcgtgtttacggcggcgcccgctgcgcgcgcatgtttcctcttttcctggtttctcaagagtgctgctgctaacgcggtccccggcacgcaccatctgttgccatcccggccggccgaggccattgcagattttggaagatggcaaagttcatgacacccgtgatccaggacaacccctcaggctggggtccctgtgcggttcccgagcagtttcgggatatgccctaccagccgttcagcaaaggagatcggctaggaaagacggctngcagcactggacagngacnccacataccacagactaacgcaggctacacaacataagctacctccctcatcagctctctggctggctggaagcctcacacctcactgccctatacttctcccactggcacgcgcacggcactgcacacacgctacgccctctcgcgacggcctgcgcctggcactaccacgccgccgcccaccaccacgcacacgcaccgcgcccctaccccacgccgcgccacacctccgcacacctgcagcacttctggcccccagcagcgcacacccctccgccaggacgcaccacacacgcaactccgcctcagagacaacacctgctatgacaagcatctcacacccatggccagcacctcgcatgccccctacaacacagcctgacaccaacacccacgcacacacgcacgacgcacgcacaccgcccactctccagcaccgtggaccacgcaacacaccacacgcctctcccacgcaaacacaacacctctctgcgggcgcctctacgagcacgcacacaactgcgggaactccacgcacacaccccacccaggaacaaacc

SEQ ID NO: 336783 - DNA, 333 bp, Homo sapiens
ccaaaacacaccaaaaacaaaacagaacactacgcacctactgaaatactggactttatctcagcttcccagaagactacaatgcaaaaacaactactatttaagcatctttttgctcttcccaatttctaggttcccatttctacttatttaagtgtatgagacctaaataaccactggtttttttaaagcagtccttctggagggtttctacttcttccaataaccacagtgaaactaaaacatttcgaaatcctcctttgaaatttcctttaaagtctatttacaggccaggcgcagtgactctcatgcctgtaatcctagcactttggg

SEQ ID NO: 336784 - DNA, 675 bp, Homo sapiens
ggaaagacccaactccagcccactctagctatcttgcccttgctgagaaagatgaaaaaaacaaaacaaaatggggaaacacgtgtgaagttcatagttctgaggctcaggctcactacaagactgagactataggattatgaaatgcttccactcccccgacaccttactgtcacagtactaagagcctacttatagcatttccttttacccagtacatcatgtctcacaatcaagaaaaattacgaggcacattgaaaggcaaaacatgacaatttgaagatacagagccagaatcagaatcagacatgataggaatgttgggattataacaccagtaatttaaaacaactatgattgatatgccaagtgctataatggataaagcagacagcatacaaaaccagataagaaatgtcagaagagaggtggaaatccaaagaaaataccaaaaagaagggatagagattaaaacaaacaaacaaacaaacaaaaaaacactgtagtagaaatgaagaatgtcgttgatgaacttatcagtagactcaacatggctgaaggcaaaatctatgagcttgagaatttagcaatagaaaccttggaaactaaaaagaaagagaacacaggctgaataagatggagtggagtatccaaagactgtgggttacatatatt

SEQ ID NO: 336785 - DNA, 1780 bp, Homo sapiens
ataaataaaatccatatttcctctcatacagaccccagagttgctttgcctgacagtgtagttgatggagaaaataatctttatccttagcctccatctggttgcagaccataaagacagggaaaaaatgagggtgttggtagcttcgttagaaactgaaagctcactgattttttcaaaacctaaatagcctgtgtttctccaaataactaatttgcagccttcggcagccaggactggcagggatggggctagggggactggggagaactgctctctcctgagggtggtctgacccgacagcacgcatgaccttcccacagtcaggaactgctcagagacgtgatggcaactccatagaatgaaatactcttcagccagtaaaatgtatttttggataaatatttgctttaaaaaactttactatatgttgttaaatgaaaaaaaaaccttaaggcatcagaaattatgtgcagtaaaatctcacttttgtaaataaatatacctgtttactacgtatgcataaaaagaatcctgagaaatataagtactgtatgcatattgttgttaagtattttttctgtttgcttatctataattctaattttgcttcaaagaaaaagttactccggcaatataaaaataaaataactaatttgtcttgtcatcaaacagatagtaagaacaggcaaacctggccctccacactgccagccttttgtgattcaaggcttcagtttcctccacttgttaaaaagattcaacaaagtagttgaaatagtatgtgaaccagtaaaccctaaaaggtgtccagtgttgtctgtgagctaattaagtgatttgattctgactccccgagtcttctgatttcgaagcagtggggagtcagacaggagcctcaggtggcctctcctgagaggccctggaaagtgatgagaacctggcctctggcagctcttcataaacgtccatgttttccctctactctctcactcttttcccagggcctcaaacagaagatgaaaatcaatttctaaaacagccctctgtgtgctctctcgtatctctccttttcacacatcgtggtggtggctttctctgtgttcctctgttgattcagtctctggaattaacggatcaggattccatgcccagaatgctacaaagactgtgcttgagttctcccacatctcactcaattacacagaagtttcagattatgtaacagatgctgtgctgggttaggcagagccatctgacttgttttgctttattttagaccatgagatgggtgagtttttctttttaatgccacattcttttaagaattaaaaacctccacttggctgtcagcattggaaatcagagtgatggtgcaagccctgatgaggacaatgtccttgtctatgaaaaggtgaaatcattgcttgaaatcgctaagcaggacatgcagtcccagatggaggggggaattcgggagctggttggaaaagagtatttggcactttgcagccttgagaggtgcagaagagacaccgaggggttcaccaccagagccaccattgtcagagaggcgtccagctgtgtccacctgggactctgccttcagggcttcttgcctggctgggagctgcacaggcagactcctgggacggtgtgccgacagctctgggcacccccttctaggatctgattcctgaggaatcacaatgtggatttcacaatcacttccagtgtcttttgccaacctctgtgaacagatgtgcaattaaaaaaaaaa

SEQ ID NO: 336786 - DNA, 363 bp, Homo sapiens
ccccttttttggcactccaaaactcccactctgtcagttttcttacaaaaaatgttctttcttttgtgtttgtgacaaagattgtgtaggttaaatctcttctgtggagcaaggctaatttcctgtgttctccctttttctgctttctggatcctgctctggttttcctttaagcgtgttggtcaaaaattgaacaagaaatctttgttgatagaagctaacatttccaatattcagctttcctaaattattacattgccagttttttttttttttttttttttttttttttttttttttttttttttttttttttttttttttttttttttttttttttttttttttaacagggcggacaaa

SEQ ID NO: 336787 - DNA, 511 bp, Homo sapiens
tatcacttcacaatgtcctcaatgccagaatctcacactttaatttcactttctcccctcacatttcactttacaatggttttttctatcttttaaaaactataccgtattactgttaaggggttttaacagtatttagtcaatatcagtttatatttattcacatatttaccctttttattattcatcatttggatggttccttatggggatatcttccttttacctgaagaactctgtggtggctgttgacttgttctgttagtgttttaattttagaccaggttgctggtaatgattttcttggtttttatttctctggaaataatttttttttttacattgaagtttgaagaatattttgctggatatttagaagtttaggttagctgctattttcctccaacagtttcaagatggcctccactatttcagttgtgaagtctgccatcagtcttattgttgactcttttgaaagtcatgtcatttatttctcaaactcttttttttt

SEQ ID NO: 336788 - DNA, 407 bp, Homo sapiens
cctgatctgtaaaataaggataatagctacataatagggctgttttggtattaaatgggtttatatgtatgcctggtacataataggcttgatgagtccttaccatttgtttcaattatctaatgctatggaataaaccaccccaaaacttagtgagttgaaacagtcattttatttatttttcattcagtgggatgataggctgagttggatagttcttgtggttttgtggtttgtcatgcagctgttaagtcaggtgcagctgaggctggaacgtgtgtgatgctttgttttgttttctttcttttttttaaggacacctcgagaccgttgagtaagtgctttgttgtagtcaggtggcaactggggctggaagatgtgtggtgctttggagggtatggctaaga

SEQ ID NO: 336789 - DNA, 287 bp, Homo sapiens
cctcctataagcaccttttcctcactcaccttcagccacagtgttctccaaattcacttatcccattcctgcctcagaaccaccgcacctgagtagaatactctccactcagatacctacaagatgcttccttacctaatgcaagttctctgctaaatgtcacctcagaaagagggattccctaaccactctaagatagttctcaaggtgtagcatagtggataaagaggctatttttttgtgtcatagaggggacacaaaatatgtatttatatttgcttgaggtg

SEQ ID NO: 336790 - DNA, 322 bp, Homo sapiens
agtaggatcagaacactgcagatcaaaaacatggcaaagtgggggaacacacacagcacacaatgaaccgtggaagtgggagagggaacaccagtctcaggagtgaggggcctgggggacaacactgacttcccttccccctagccacacccggtctctgactggatacttctcctccacccatgtaaacgccgggagcacccgggcttagtcctcggccttcccttcatctacatgctctccacaaaggagctaatggggaacctcagtttcacgaagtttaaacaaaaaaagatatctggaaaactctcaggctgacgat

SEQ ID NO: 336791 - DNA, 562 bp, Homo sapiens
gggactctacttaggtcctgtggcttcctttctccaaaccctggaacagcagcccaggatgaactctagcctgtgagacccttctgtgtgcccccgatctttgcagtcttgtctttcatgagatgtgcagggagtctgtggagcatgtgcttcgaatcaagccacctgtgatttgcaatcgggccatcgcactgttctgagtcgcctgctcctcttccaggaagcctttccctgactggggaggatcccttcctctttaaaatcctgccacttgcttcagactctccctattatatttccacttcctggctgcagtcatcagaattcgggttttattgcatccccttaaagacaagggtcatctgttgtatagctttctgtccccagcacctgacagtcattccgttggaaaaaatactgatagattgcttcttggacttttggctaagatcaagtagagaaacagtgatggagacatccctgaacttgcacaggaggactgaggccatgagtctgaaagaagagactgctcagtgacagattgttggctttgccaagggtg

SEQ ID NO: 336792 - DNA, 524 bp, Homo sapiens
atacatcatgatagtgacatacagtcgtgctgagtccatgatatgccactgacacctcctacatccagagacttcagaagctcacaggaatgcaaaggtcggcatgataaagagaaggttccacagagagcgacaagacatcaacccaccatgcctgcctgagaggagcagcaggaccgctgtaaggtttcttgtttctgtctgcagcatgggggggctccactgcccgaccctaccagctactagatgccattcaggtgaggcttaaggaggctcctgggctgagccaggctgtacaccaccctccctgtcccatgggacatctgctcagcaccacacaacagcgaccaagcaagggagatccaaacacaggtccttccaagcaaccttccacctcttccttccatcctctcttcggttcccagcagctccctccacagatccagggaaagaaggaggaagaagtgtgcgttaggacctgggatttggggtctcacgtgtatccctcaccagctgcaggacat

SEQ ID NO: 336793 - DNA, 414 bp, Homo sapiens
tttggccgggcatggtggcttacgcatgtaatcccaacactttaggaaactgcgggggggaaggatcacttgaacgcaggaggctgaggctgcacgtcacagggagagacgggccgcggtgatgtatgagcttcctgttgataggcagttaagttggttcgggataacgtggcctgcctggcacgggtattcccagagtcacagatgctcacccgtgccagcgtttggctgcttgggacatggggacggcgaggtccccacaccccacatgtgagctgctggtagctgggctgagcccaggtcccatccgtgtgtggggcgtgagtgtgcggtgccatcgggtctgcacgggcctcgcctcgtcccggacgctccaggcttcctgtggcacgggtgccgagagggaccagcctg

SEQ ID NO: 336794 - DNA, 136 bp, Homo sapiens
ttgtcctttttcatctcaattttgttacttaaaaacaattcttggcgttccttccagccacatttccttttaattctcagcttattgtgggcatgaagacatgatagcctttcttcagcaacaacaaaaaacacaa

SEQ ID NO: 336795 - DNA, 114 bp, Homo sapiens
tcacaaagtccctgggtggtttccctgataagcttccagccatctatcttgtataagaatttgttatttacctgcaagtaatttggggtacaaacttctacagtgagggctcag

SEQ ID NO: 336796 - DNA, 366 bp, Homo sapiens
aacccctgcatactatacaagacaaccatccccaagacacatagtcatcatattctccaaggtcaaagtgaaagacaaaatgttaaaggcagctagagagaaagggcaggtcacctacaagggaaccccatcaggctaacagcaaatctttcagcagaaaccttacaagccagaagagattgggggattgggggcctatattcagtgttcttaaagaaaagaaattgcaaccatgaattttatatccagccaaattaagcttcataagtaaaggagaaataagatccttttcagataagcaaatgctaaagaagtttgttgccaccagatctgtcttagaaggggcctttaagggattgctaaata

SEQ ID NO: 336797 - DNA, 402 bp, Homo sapiens
tcttagtgacccgactctttgattcctgcttcctcttcaccagcctgctccatgctgaccgggtctaggatcctgtagagcacctgatgctcactgacctgtggctacagaacactcctttctctttaaaaatttcgcaatgtatttgcccccctctagtctcccagcctctctcctgatgtcccacctttctccaacatctctggcagggaggggtcagtgatttcatttacaagatctctcagcatgtggggaggtaacttgtccaggtcaggaaaacgtgagctcatttaaatcttcaaggcaatctctttactgatcttggatctaaagtccctttaagccaagaaaattctatacctttccttctaaagatcatgttctggacaggaaggtagagca

SEQ ID NO: 336798 - DNA, 465 bp, Homo sapiens
gcggtgagctgagatcatgccactgctctctagcctgggcaacaagagcgaaactccatctcaaaaacaaacaaacaaacaaagaaacaaccatcaactttgtttctgtaaattttttttggaagggctcacccttgaatggttgggtgcttggattttgatttctgatacattcgggcttaattctcggttgtatggtttcctaactgtgggactttgggcaagctacctaggggcgctgcaatttataggaatgatggtgtctctgtcagagggtcgttgggagaatcaactgggataatgcaagaaaagcacttatttgcatagtgactcgatggtggacagccattccatcaataactaacgctccccgctggctgagtcacatttcgtattgcactaaagggtgtttctttcttcctgcgctcaatctggcgcacatcttgtgtcgttcagtaccgaaac

SEQ ID NO: 336799 - DNA, 363 bp, Homo sapiens
ttttaatagtgcctttgctcaacaaaaatgtagctgttactggcccatagggctgcttcttagaaagactggtgtggaaagactggcttagaaagactggctgtgtggaaatgccagccttggggcggaaacctccatgagatctttttaaatgtggaactagaacaaaacaaaataagacaaaacaaaactatgaggttacagcatcaccataaagatctaaggtatctacaaatatcatagcttggtttcagtgacattaccaaaccaaactggagtgggcttgcccagcgcagtaaggccaaacgttcataccaaagttttatagtgggagaaggaaggggattgattagcaagacacca

SEQ ID NO: 336800 - DNA, 389 bp, Homo sapiens
ggagaggagaataagctggttatagaccctcttgcttctggccctggcccctaagtgaactggcagtctggtcagggactccatagcggttgggctttccgaactctgttttgagatatcttgtactggaaatcagggacaatggtgtggtggtagtggtggtgttgatggggtcgtgatgttcactgctgtatctctgtctagcacctatccaagaatagatattcaggcagttggttaagttaattattcccattaccctcagcttggaatcacgaagagtaaaggtgttggctggaatgtaaaggggtgaaggcttggtagtagccttgcctttcagatctgaggataatataggaaatgggggatgtcattcataggcgggtttc

SEQ ID NO: 336801 - DNA, 293 bp, Homo sapiens
tcaggctggagtgcagtgatgcgatcatgggtcactgcagcctcgacttcctgggctcaagcaatcccctcccacctcagcctcctgaatagctgggactacaggtgcatgccaccaagcctggctaattaaaaaaaaaaaaaattgtaaagacagtcttgctatgttgcccaggctggcctgaagcaatcctgccaccctcagcctcccaaagtgctgggattataggtatgagctactgttcctgatttcacagaggctttctgaggctgggccgtgcaccccagcagtgg

SEQ ID NO: 336802 - DNA, 860 bp, Homo sapiens
tttatttctcgtgggagaagtgtgtctcctctttgtctcaggcacccctctgccctgtacagcagcaagtcagcaggaatgagctgagccgcccaagtagtggctccctccactatgggggctctgtggtcctgggggctgtcctgcctccactgccataggcctggccccagagcatgctgcagtggtcacaacctgtggaggtgcccccagacccccatatttgggcccaactacagcctccttccccagctttgccacctggcttgggagccagggcaccaccagcttcgttggcagggagagatgaagaaagaggccatagccacgcaagtgactgaagttcatgttcgtgcacaccaattagagagggacagcacgttcatttacctccaaatccagccacagacacatcgcccttttctcttggctctgaggcctccacagaagggtttttttaaggttgcagccaggacctttatagcctagtcctgagaagattatctttttattgcaactttgattaatgattgatcaaaaactgatactagaaacactgaagaacaaatttgctgtagacattaggaaaggtctacatctggcaggcctggagacctgcccaccctctccccccacggtcaaaccagggcaaaggtacattggaagacccaacccctacacactcttacacgtgcactcgcacacacacactgaggggaaagaaatatttaattgtccttaaatcctcttggattaggctataaattgcaaataaatggagcaacaagagcaaaactccatttcaaaaaaaagtttttgcagtagttgtacgccagctgttccattagcccaaaaaacaa

SEQ ID NO: 336803 - DNA, 223 bp, Homo sapiens
caatttggggtgaggtcacataggtttggggtcaacccaaggattaaaataacaatctagaaggttctggaaggggctgagtatgaagacagaatactagaggccgggctcggtggctcatgcctgtaatcctggcactttgggattacaggcgtgagccaccgtgcctggtccagtcttctttttttttttttttgggagaccgggactctcgctctgtcgg

SEQ ID NO: 336804 - DNA, 338 bp, Homo sapiens
ccttttgttttctctctcatagtgtgaaattgaccaccttacttctgtctcctttaactcttacccccctgtgagaccacaataagtactgtaaactgtgtgaagtataatgactaacgccaaataattgggtttatctgctcaagggaaaaaggtgcagttgaactagaagtacattaagcctttcactcctgaaggaatgtgtttattctggcaagaattttccagtaaatttccattaagatagcatgtgcagaaaaatgcaaggtcattgagtaacaccattgttacataaatacaccatctatatcaagccttgctttcaaaacatgcataaa

SEQ ID NO: 336805 - DNA, 171 bp, Homo sapiens
ttctgccctccttggggtacccctatcaggcccgagacacaccctgtgctcgaaacagtgttgccagtgtccacggggcccagcgcaggggctgatgggaaggcattttcgtgcatgggggacacaggcccccccttctccgtggcgcttttttttttttttttttttttc

SEQ ID NO: 336806 - DNA, 145 bp, Homo sapiens
aaaaattacagtagcaactttgaaactatgtaaactgtacaaattattaatgttatctcttcatgggtaagtccatcttttccttgttttaaagttagaggaagcagtttatcagctagaatttctttttttttttttttttttg

SEQ ID NO: 336807 - DNA, 438 bp, Homo sapiens
ataaccatatccagatctggtttgtataggtgactgagataacctcagcctcatctcaggaagtggccacttttggagagtccgactatcacggtaggcacagaactctgccatgtcactagctgaatgacctcggatgtcacttcaactctgagccttagaacttgtcaactgcaaagtggggcacttcaccgagctacatcattgagctacttcactgagctacttcattgaattgggaaaattaaaggagcaaatatgggagaaggatttggcccatagtaaacactatgactgtccgtcttctgccatctttcagtagacccagtggaattatatgaaggttgataggcacttaaaccaagaatatatgaacatctattctgtgcaagatgtgtgcattgaactcagtccaggactgaaggggacaggaggaag

SEQ ID NO: 336808 - DNA, 461 bp, Homo sapiens
atggagatgactggctctggaagtccctgttctgaacagttgtacagagggatacagacaaggggaggagactgggggcacccagctgctactcctgcatgtcatcccctgaccacagtgtcctctgaactaactggtgattatgctggataaaattggcatctgggagaagtgagggcaggtggtgttcatctgaatgcaggagagtgtagagtgttttctctaacaaggctaggtaagtcatcttcaggggaggggcttacaaggactcattggggaagcgacccctgtgtatgcaggtggctatgctaagagctggtgatagagcagggtgtctcggtggagggctccctctcggactcagaggcacattttagagcttcattgctggtggctgaaaagcacagcttaggtccttctgtgtatcttatagagatgaaagtaaagggcatcgggaacca

SEQ ID NO: 336809 - DNA, 169 bp, Homo sapiens
ggaagaggggagcagggggagcccagcaggagggagaaagagagagagagaggcagagatacagagagatatatagagatgactgagacagaaggactgagagagataggaacagagatagagagacagaaagagacagagatagacccagagagagtctctgaaagga

SEQ ID NO: 336810 - DNA, 683 bp, Homo sapiens
  misc_feature (11)..(11): n is a, c, g, or t
taaatcacaangagggataaaccaagtggatggcaaactggcccccgttgaagagctgctgcagtctctgcttggcctctttgctcagcttcaccatggcgatggccgtgtggcacagggaggaccccttacagcaaccaccgcatcgggaatccgaaagggagaagttatttttatttttacttatctatttatttattgagacggggtttcaccatgttggccaggctggtctcgaactcctgacctcaagtgatccacccacctcggtctcccaaagtgctaggattacaggccatgagccactgcgcccggccagcatagtttcttttcaaaactcatccaagtagtagcatgtgtcagaatttccttcctttttacggctgaatagtattccattgtacatatgtatcacattttctgtatccattcatccatcagtggatgcttagatggcttccaccttttggttattgagtggacagtgctgctacaaatatcgagggtgtgaatatccattcgtgtgtctgctttcggttcttgggtttatacctggggtgtcccttggcttttgctgtatgatcgactcctgctggggatttctgggattgccctctttgttacctttctgttttagcttctgggagaatcttaggtgtgtccctaggctgggctttgtgacc

SEQ ID NO: 336811 - DNA, 265 bp, Homo sapiens
acagaatctgcatttttatgagattgtcaggtgaatcatatgcacatgaatgtttgcacattaaatgagcactggtctggatcctttaaaaaggaatgattggttttatttaattcatattttaatagagtgactcctcccttatcttccaagttgagctctcccagcatagatggcccagctgccagggctgatgcccatagtctgtgcataaacaggggagttcccgagcccttttccaagccgcttttaaatgcaactcctt

SEQ ID NO: 336812 - DNA, 440 bp, Homo sapiens
agacggggtttcaccctgttgaccaagctggtcttaaactcctgacctcgggtgatccgcccgcctgggcccaagtgtttggattacaggcgtgagccactgcgcccggcctggaggtgcacttcaaacagccttgcagtgaagtcctgtacttgccagaccagtttttgggccccatccccatgctgagcacgtggcagtcccatcagctacccaatccttctccagatccctaccagagttgttacagaggtcaacttcattcctttctccaccttgcccatccattagttcatttgttcacacaatcattcagcaagtactttctaggcaccagctgtgtgccaagcccatgccagcctcatgctaggtgctaggtgccaagtttccagagatcagcgttacttgaaaatgcctacacagctgacaggaaaaacaga

SEQ ID NO: 336813 - DNA, 838 bp, Homo sapiens
gtagcagaagctgactttggccacgtgaggcagagccacctcctgaatatcagaggtgctgaggtagcccctggataataagacccatgcagaattgcgaagcctcactccaaccttaatttcaaacagctcagtcagtcaatcaatcaagtacagtatttcttgaacagcttcatgtagccggagagctcagcatggtgctctgctgcataggaatcccatcagaaggatatgtccatgctgtcattgtttgtgtatgtttcaaggacttgcaattatgtgatttggaagagcacattatagatttattaatcaaaactgaccgaccaggtatcatctctgctccttctcttaagccctctgtacctgtgcaggtgagcagtgaaggacagggttggggtcaacaggagggggctcctctgttcatctcagaggtgtctgctggtccccagagaatcagacgtttcccttgtcatacatttgccactccctggaactgacttcttgaggagtctctaggttttaagacataataatttttttcaagtgttatctgtgagattttatggtctgttgcatgctaagatagaaacttgacttttctttaactttttgttcctcacttactgctaggcagaataaatgagtccttcagcacagttcctttctccctaggcttgtttactgctttatgatattcatgtgtagtattttgatgaaatgtatttgcttctcaatagtttttaaatcattcgtgggcttctcccttttacttacctctcgtttttgtctgtctgtctgtttgtcgttatagccatcctggggtctccagctagtg

SEQ ID NO: 336814 - DNA, 225 bp, Homo sapiens
tatgcattgtgttttaatttgtatttctttgattatgtatttttagtcatttgtatccttctgtgaatttcctgttaccttgcacatttttctgttaggattttaatgctttagtattctatgtttgttttcttttgaatttgagttcttggtgggcttctttttgttttttttgagacggagtctcgctgtcacccaggctggagtgcagtggcgttgtctggg

SEQ ID NO: 336815 - DNA, 493 bp, Homo sapiens
ttgcaaagtgcccaagcacaccacagaatcctatgtctggaaggaatcctgagggagctgtctctctccagggttaacacataagaattctctatcaaaacccccagatgaggtcatctagcctctttgtgaacactccacaagggggaacttactaccttcaacataatcactaagtgagtcaacatgaaggactgcagtaactcaagagggttgggtgggcagtttgaaggcctccatgtgaatatcaaggtagatgctatcaactctctagactgggagctggcaagcctcttcattttggagccagtggcaggcctaagaaaaaagactaaaaaaaaaaaaaagaaaaaaagaaatgaaccaaaaaaccccaacaaattaagcgaactgatccagaaaactggtgggaggatcacttgggcccaggagtttgagaccagcctgggcaacaaagtgagatcctatctctacaaaaaatacaaaatttagc

SEQ ID NO: 336816 - DNA, 255 bp, Homo sapiens
ccaacgctcaacagagatttcaggtgggttggaagtccagggtggaaaccatttgccttagattttctaaggcagcactccattccttccagcttcttgagttgctatggagaggtccccagtcattcagattcccgatccattgtacatgacctggtttttatcagaaacttgtaaattttctccctttgcccagtgttcagaaattccacactgacctatctttgtgcggcttttcatttcttaccactcagt

SEQ ID NO: 336817 - DNA, 455 bp, Homo sapiens
gtgagggcacagcattcatgtcctgttgcccttcccccctctgtcatgtgaggatgttgttgcaagaagatgcttttactggaacagaccctcaaagaagctgccagtgctttgatcttggacttgctcgcctccagaactgtgagaaaaaaaaaattctattatttataaattacccagtctgtgttattttgctcttgcagtacaaaccaggcagaccaacctacctgtgcctaggtggtccgcaaaaaaatgtagccttcacagcagtgttcgcagagccagcccacattcatggattcatagaagtctaagtcctggcaaactgacagaagagctatggcattgggagagtgggaatctaaattttagatgagatagctaaggatacctcaattaaaatgtgacattgtaggcaaagatttcatggctaagacttcagaagcatagacaac

SEQ ID NO: 336818 - DNA, 426 bp, Homo sapiens
gggttgctgtttagacgagtcactgttcatggtgaagaaatgattaggggtatagggaccactgaagtagttgctagaagttccgagtgagagaagagggatgtctaaaccagggagggactgtagggaagtgccaggatagcagatgcaaggtgccaggcagcaggaagggtcaagggtttccagcttgcacaatgatggtgagggaacaaaggaggaggaaaaagggcctcctccttctccacttagaattccaagtgcccatgtgccacccaagtggagttatccagtgtgtgctttatgtaattggctatctgggtttcaggctccagagaagtgataggctgcggagagagccttgggaaaagcccatttatgattggaatggtatccatggaaaatgaagaggaattccttagtccctcc

SEQ ID NO: 336819 - DNA, 228 bp, Homo sapiens
atgtgtttccctgaacatttgccagacaataaccctttaagattgtgcccgtggagagttatatagaggaagaaacatctggtttctttcggtgcctaataccatatcaaaacacttggtctttaatttagaggagatcaaacaagaagactgtttaactttgttgattatatcagacttctttgtgataatttatgttttgatttctacctcagagcaagggaaaaa

SEQ ID NO: 336820 - DNA, 565 bp, Homo sapiens
aatgtcagtgtgctttaatttgttcactcatgctggattctctgcttccccctttgctttgggcttctgagaattatttccaagcaaataactatacctccaagattcccaaagccactcagaaaaaaagaagccacaaggatgcatttttttatatgaagtgacttagctgtgtaaaaagaagcactgttttaaaatcccacagagtatctttggacacttatgtaaaacttatatgtaagtattttagctgaagactgagaatcaactggatttatggggagatagtcctctcttttaagctgttccatgcttactgtacatctcccagatcagtggggtaacttgtattatgttgtgctgtgttatttatccttccacgaattgctgcaaaagctgtgttctgggtcatccccacaactgctgtgaacaagggcatgccttgcgaggtggcatgggttaaggaccaaggcttaggaccccacagggcagagaggcaaactaggcttatattagtattaaacctgtgacttgagactgcatcatattgcttcattcttaaaga

SEQ ID NO: 336821 - DNA, 191 bp, Homo sapiens
aaactgacttacgaaaagcaaatcatactcaattcctattgagatgtcagtcaaagcccgagatctatctttctctgcaagtgttactgttaagcaacacctgcaccaagtgtaatggaacagatgaacctggggatcagggtacaggactttaagcaaacaattaggaatttttttttttgagacagagt

SEQ ID NO: 336822 - DNA, 350 bp, Homo sapiens
caagagggccagggtctaaagccaccagtggctcaacccatgcgccccggacagccctagctccacatggctttagctgggggaactcaggatgggctgcttcccgaaggacacctgcagagggaccagaagagcactttgtgtccttctgggagtcccagggaacctccgagagcctctctgcttggggctgttatttgttcacatgcgtgctggagcacttaccataggatatggtgatgaggggcagagctgtttaccataacgtccttgacacagggtgggaagcagtaaatgagtacatgttttttaaatgaacaaacaaatgaataaatgaacctaaatctctg

SEQ ID NO: 336823 - DNA, 912 bp, Homo sapiens
tataggtgcccagcaaagacctgaatgccatcaccctccccagggctctgcagttttctcgtggtgaacccttgatggatttgttgttgcttgagaaatggcgatgatcgaattggggtttggaagacagaattttcatccattaaagaggaagagttcattgctgttgaaactcatagctgttgtctttgctgtgcttctattttgtgaatttttaatctattacttagcgatctttcagtgtaattggcctgaagtgaaaaccacagcctctgatggtgaacagaccacacgtgagcctgtgctcaaagccatgtttttggctgacacccatttgcttggggaattcctaggccactggctggacaaattacgaagggaatggcagatggagagagcgttccagacagctctgtggttgctgcagccggaagtcgtcttcatcctgggggatatctttgatgaagggaactggagcacccctgaggtaggactctgtgttccaggtgccctcatcctgctgtgaggtccagcacaagtatcccagagaatccacgaatcaatgtcagcttgagcgggagattttatggaagttgtacttactactgatattaaaaaatgcgtaggctatttggaaagatgattagaattcataggctatctaaaggattattagaacaactcaatcttgagttaggttggctaaattgtaaacatttgtctatgtaggacatatgtcgattagccagatatcatttagttggaatacactgttttgtgaacctcttggggaagggagaaacgggcaagatagatattatttcagttgtcacccgaaattgaaaatacatattggaatgtacatttaatttcacactcttattgaccatgacatcagagagaggtgcaggg

SEQ ID NO: 336824 - DNA, 815 bp, Homo sapiens
ctgggctttgcttctgccatccatgggcactgcctgtgtgctgggctcaggtgccagcctgggggcttgcagcacggcatggctgcccccggaaggccccaggcgccaattctgtgcaggctcacgaggtggtcaggagtgagcccgagggaggggcagggatagtactccaggcagggagctttggggatctcagggtgggtggggcctctggggtccccggcctggctccttcccagtagttggggtcaaggttgttgagagagtgggtcgggtcctacctagggaagtggggggttttctctggctgctctgcaggaagccactgggccatggagtgcagatagcagcctcgcagtaacccccaccaggctgtgcaccctagcacagctggtcctgcctggtgagaggggaggttggtggcccaggccagcgttggcctctggcctctgtccccacagggcctggtggcccctggctggtgagagccctgacctcttagatcctctgaatctggacccctgaccccaccttcacggggttgaggtctgcagagtagaccgtgattccagttcctgttggggtcagtcctcctgtccccagacctccctggcccacgactgagcctcccagcgggctctgtggagggcctgagctatgctgcctgcagcgctggcctctggcccctggcacccagcacatgggccacagggccagctcctcttgctggccttggctctcctgctgtttgaagctccagctttgatttcctcaagcgttcgtccagctagaaagttctctgaaacggctcccta

SEQ ID NO: 336825 - DNA, 577 bp, Homo sapiens
ttatatactttacatgtccctctctctgatcctgtcactaatttttccaagtagatatctatccctatgtttaaggaaggggaaaaaaagcttaaattttttgcatgtttcatgctttgtgtagatttagaataaagtatctggaggatttttgaaaagttgttatcaaacgaaagaagctggcaagtaccctaaatacatttaaataatattctccctgctgaatggatggcattcatatacaaacttaaatgaaagcagatgcccatcacaaaaagaagccactatggttctccagagattctcatataagtgctaaatctgatttcaacttcaaaagaagatatcagaagctatcagcctccgcctctgttcatcctccacctctcatacggaattaccagacctaaagagccccaggaacaattttaatgttcagcattaaaacattagtaatattagataagcattacttatccaccaatttctccatactttaaaaaaatttaggcagaagcaattcaactggcatgggaagatgtagagccattaataacaccttcacttagcctgcaaa

SEQ ID NO: 336826 - DNA, 162 bp, Homo sapiens
agagggaaatggagtggcagaaagaaaggggacagtggccacctcaagggcaaaggaatgggaaacaatagccccaagcagggaataaataacaacttgttggcagaagcaaaggaaagttaagggaactaaggcagagatttgccatggaatgccctcctg

SEQ ID NO: 336827 - DNA, 353 bp, Homo sapiens
ctgatgacccattcaaccttcttctcatgctgattaataatgatatattactttactccctaaactatagacccctgtaggaaaaaataaaagtaggcacttaatcaataggactccagcaaatttttttcatataacatactcgcttttgttgttgttgttgttgttgttgttgagatggagtcttgatctgccacccaggctggagtgcagtggcacgatctcagctcactgcaatctcacctcctgggttcaagcaattcacctgcttcagcctcctgagtagctgggactacaggcatgcgccaccgcacctggctaatttttgtatttttagtagagacagggtttca

SEQ ID NO: 336828 - DNA, 418 bp, Homo sapiens
catgcaaaaactattcacttgagaaatatggtgaggaaagcaccaagaaaataaccaactgactgggtgaagtcgagggaagtcccgccttataatcagtgcttaggatccccatcccctatgacctttcccccaaactgacactttctctaaaatgtccattcccgtagctaaaacacaggtaacatttccttgaaattcaatacaacaaaagttcattaaccaaaactgaaggaaatactgaaatgagattgcacctgtgggatgatggttttaatctacatataaatttcaattgttttaaaacccaaattgattaacggtactacagttcccaaggaaggcttcaggtaagatgcttatcattcgggtttctgcgtgggactaacaggttactagcagctcatgggcagcaatg

SEQ ID NO: 336829 - DNA, 1131 bp, Homo sapiens
caggttagttcctaccttttttgtcattaacctagtttttaaaatctattttgtgctgccttgtttctaagaacacaagaaactctaaaataaaaatagtctttgttttgtgtaccatctgaatatttgtagatacattaattgagtttcgtttttctttaacaggttcctcctgaatttgatttctctgctcataaatattttcctgttgtgaaacttgtttgagagagactggggaggtggccataaaggggcagagtcttctttcagacccaactcttagagggcacatcaccaggctccacatcacgggaagtgagatggatttcttgggtaacaactcattataaggaatacttttagtttgacagccttatatgacatgaatgaaaactgctgttttaaagtggtttattatgttccatggaagaaactggtcttattgaatgcattgatgaacgttatatggttttattacagatttaatcacaaatcattttttatgaatgattgagtgaaaatagtgtttataaaggttaataaatttcttgacaaaaaaaaaatgcactgctggagatgaaaaacagtaggtctttgtccatgttaagaactgaagaaggtgtatgctctttaacatttgagtagttccaaaaacgttatccaaaagaagtttcaaatcaagggattaattaaacacttgtatgagattttggtaaaatacatttagaagggatttttgggagggcctctaaattacatgaaaattgtgatttttatgtgtcatgacatcacaaattatatatctgtaagaatacagatgtgtaaaaaaaatccttttagcacttttaaaagattatacattgtttgctggtgacatgcaaaaaggaggcagatagaaatgtatatagattaaaatttaggactaggtttaaatgtggtgtactttttgtttacttcatattcagtttaacccatgaaacattttcaaatgggtgtctgttcagtatcctctggctttgaaaaactgactacatccccctgtgcttgcaagtgcctgctgccagaggccctccccttcctttcctgcttgtcctgtgtctgctctgatgtttgcggtggcagctttctagg

SEQ ID NO: 336830 - DNA, 483 bp, Homo sapiens
actaacattattacatatattggtatctctctgaattcctttacgcatggttgatgtcaacattgagtcgtgccgatggctctcaaatggcagaggaaaggataatggaagagcagcagaaaggccgtagtagtaaaaaaacaaagaaaaaaaagaaaggtgctgtggattatttttaaacttaagaacagagtgtactttaatttctacagataaatagatggagagctactcgtgagttggtcattatattttagttcttgttcctcttttcagaaactataaggtagagactgagtcccagtatcaatgacataagctttttggttcctttctttgctttcatttctttgctgttctgtgtatcagagaatctttgatcaagaagtagccacgtggagtgtgcaagcaagatatcggtgagggaacaagacagcaggaggccagtgacctattgacagagccagatagctcaggagggca

SEQ ID NO: 336831 - DNA, 2639 bp, Homo sapiens
atacgcatgcgtgcacgctgccggtcgggctgggctgagaggggagggggcggcggcggccgaggcggcgtcgttatttccgtggtccggacagtgcgtggcggcgcgggtgaccacgggagaagtaggcataatggttatgaaagcttctgtagatgatgacgattcaggatgggagctcagtatgccagaaaaaatggagaaaagcaatacaaactgggtggacattacccaagattttgaagaagcttgtcgagaattaaagttgggagaactacttcatgataagctatttggtctttttgaagccatgtctgctattgaaatgatggatcccaagatggatgctggcatgattggaaaccaagttaatcgaaaagttctcaattttgaacaagctatcaaggatggcactattaaaattaaagatctcaccttgcctgaactgatagggattatggatacatgtttttgctgtttgataacgtggttagaaggccattcactggcacagacagtatttacgtgcctttacattcataatccagactttatagaagatcctgctatgaaggcttttgctctgggaatcttgaaaatctgtgacattgcaagggaaaaagtaaataaagctgctgtttttgaagaggaagattttcagtcaatgacttatggatttaaaatggctaacagtgtgacagatcttcgagttacaggcatgctaaaagatgtggaggatgacatgcaaagaagagtaaagagtactcgaagtcgacaaggagaagaaagagatccagaagttgaactagaacaccaacgatgtttagcagtattcagcagagtgaaatttactcgtgtgttactgacagtgcttatagcctttactaagaaagagaccagtgctgttgcagaagctcaaaaattgatggttcaagcagcagatcttctttctgccattcataattcattgcatcatggcatccaggcccagaatgatactacaaaaggagatcatccaattatgatgggttttgaaccccttgtgaaccagaggctacttccacctaccttccctcgatatgcaaaaataattaaaagggaagaaatggtgaactattttgcaagattaatagatagaataaaaactgtctgtgaggttgtgaatttaacaaatttacattgtatcctggattttttctgtgaatttagtgaacagtcaccatgtgttctttcaagatctctgttacaaaccactttcctggtggataacaaaaaggtctttggaactcatctcatgcaagacatggtgaaagatgcacttcggtcttttgtcagtcctccggtgctttcccccaagtgctacctatataataatcaccaggctaaggactgtatcgactcctttgttactcactgtgttcggccattctgtagtcttattcagatccatggacataacagggctcgacagagagataagcttggtcatattcttgaggaatttgccaccttgcaggatgaggcagagaaggttgatgcagcgcttcacaccatgctgttgaaacaggaaccccaaaggcaacatttggcctggttaggtacctgggtcctttaccataaccttcgcattatgatacagtaccttctaagtggctttgaattggaactctacagtatgcacgagtactattacatatattggtatctctctgaattcctttacgcatggttgatgtcaacattgagtcgtgccgatggctctcaaatggcagaggaaaggataatggaagagcagcagaaaggccgtagtagtaaaaaaacaaagaaaaaaaagaaagttcgcccattgagccgagagatcacaatgagccaagcatatcagaacatgtgtgctggaatgtttaaaaccatggtagcatttgacatggacggcaaagtacgtaaaccgaagtttgagcttgatagtgaacaagttcggtatgaacacaggtttgctccattcaacagtgtgatgaccccgccgccagtgcactacttacagttcaaggaaatgtctgacctcaataaatatagccctcctcctcagtctcctgaactgtatgtggcagctagtaagcactttcaacaggcaaaaatgatattggaaaatattcctaacccggaccatgaggttaatagaattttaaaggttgccaaacccaactttgtggttatgaagttattggcaggaggacacaaaaaggaatctaaagttcctcctgaatttgatttctctgctcataaatattttcctgttgtgaaacttgtttgagagagactggggaggtggccataaaggggcagagtcttctttcagacccaactcttagagggcacatcaccaggctccacatcacgggaagtgagatggatttcttgggtaacaactcattataaggaatacttttagtttgacagccttatatgacatgaatgaaaactgctgttttaaagtggtttattatgttccatggaagaaactggtcttattgaatgcattgatgaacgttatatggttttattacagatttaatcacaaatcattttttatgaatgattgagtgaaaatagtgtttataaaggttaataaatttcttgac

SEQ ID NO: 336832 - DNA, 1284 bp, Homo sapiens
ccgttgtcagtgtatgagtggatagaaaatgtagaattctttaataattagaaatgggattttagtgttgttcatattaaacgtgttttgaattatacttccccttctttttaggaaatgtctgacctcaataaatatagccctcctcctcagtctcctgaactgtatgtggcagctagtaagcactttcaacaggcaaaaatgatattggaaaatattcctaacccggaccatgaggttaatagaattttaaaggttgccaaacccaactttgtggttatgaagttattggcaggaggacacaaaaaggaatctaaagttcctcctgaatttgatttctctgctcataaatattttcctgttgtgaaacttgtttgagagagactggggaggtggccataaaggggcagagtcttctttcagacccaactcttagagggcacatcaccaggctccacatcacgggaagtgagatggatttcttgggtaacaactcattataaggaatacttttagtttgacagccttatatgacatgaatgaaaactgctgttttaaagtggtttattatgttccatggaagaaactggtcttattgaatgcattgatgaacgttatatggttttattacagatttaatcacaaatcattttttatgaatgattgagtgaaaatagtgtttataaaggttaataaatttcttgacaaaaaaaaaatgcactgctggagatgaaaaacagtaggtctttgtccatgttaagaactgaagaaggtgtatgctctttaacatttgagtagttccaaaaacgttatccaaaagaagtttcaaatcaagggattaattaaacacttgtatgagattttggtaaaatacatttagaagggatttttgggagggcctctaaattacatgaaaattgtgatttttatgtgtcatgacatcacaaattatatatctgtaagaatacagatgtgtaaaaaaaatccttttagcacttttaaaagattatacattgtttgctggtgacatgcaaaaaggaggcagatagaaatgtatatagattaaaatttaggactaggtttaaatgtggtgtactttttgtttacttcatattcagtttaacccatgaaacattttcaaatgggtgtctgttcagtatcctctggctttgaaaaactgactacatccccctgtgcttgcaagtgcctgctgccagaggccctccccttcctttcctgcttgtcctgtgtctgctctgatgtttgcggtggcagctttctagg

SEQ ID NO: 336833 - DNA, 399 bp, Homo sapiens
aaggactgtatcgactcctttgttactcactgtgttcgggtaagagctacaatttggattgtcataatgggtactttaaaaatcatgggctgtggccgggcacggtggctcactttgggaggctgaggcaggtggatcacctgaggtcaggagtttgagaccagcctggccaacatagtgaaaccccatctctactaaaaatacaaaaatcagcgtatggtggcgcacgcctgtagtgccagctactcaggagcctgaggtgggaaaatcgcttgaacccaggaggtttcagtgaaccaagatcgtgccactgcactgcagcctgggggacagagtgagactttgtctcaataaccataataataataataataataataaattgctggactgcaattc

SEQ ID NO: 336834 - DNA, 475 bp, Homo sapiens
ataacgtggttagaaggccattcactggcacagacagtatttacgtgcctttacattcataatccagactttatagaagatcctgctatgaaggcttttgctctgggaatcttgaaaatctgtgacattgcaagggaaaaagtaaataaagctgctgtttttgaagaggtaagatttcgtaatgtaagaaatccttggccaggtgcggtggctcatgcctgtaatctcagcagtttgggaggccaaggtgggcagatcacctgaggtcaggagtttgagaccagcctggccaacatggtgaaacactgtctctactaaaaatacacaaaatagccaggtgtggtggcatgcatctgtaatcccagctacttgggaggctgaggcatgagagttgcttgaacccaggaggcagaggttgcggtgagctgagattgtgccactgcactccagcctgggcaacagagcgagactctgt

SEQ ID NO: 336835 - DNA, 726 bp, Homo sapiens
atacgcatgcgtgcacgctgccggtcgggctgggctgagaggggagggggcggcggcggccgaggcggcgtcgttatttccgtggtccggacagtgcgtggcggcgcgggtgaccacgggagaagtaggcataatggttatgaaagcttctgtagatgatgacgattcaggatgggagctcagtatgccagaaaaaatggagaaaagcaatacaaactgggtggacattacccaagattttgaagaagcttgtcgagaattaaagttgggagaactacttcatgataagctatttggtctttttgaagccatgtctgctattgaaatgatggatcccaagatggatgctggcatgattggaaaccaagttaatcgaaaagttctcaattttgaacaagctatcaaggatggcactattaaaattaaagatctcaccttgcctgaactgatagggattatggatacatgtttttgctgtttgataacgtggttagaaggccattcactggcacagacagtatttacgtgcctttacattcataatccagactttatagaagatcctgctatgaaggcttttgctctgggaatcttgaaaatctgtgacattgcaagggaaaaagtaaataaagctgctgtttttgaagagatttcgcggctcctagaactgattgattttcatgaatataattttaaaaatgaaaatgttcaatgttggaaggaatg

SEQ ID NO: 336836 - DNA, 3217 bp, Homo sapiens
atacgcatgcgtgcacgctgccggtcgggctgggctgagaggggagggggcggcggcggccgaggcggcgtcgttatttccgtggtccggacagtgcgtggcggcgcgggtgaccacgggagaagtaggcataatggttatgaaagcttctgtagatgatgacgattcaggatgggagctcagtatgccagaaaaaatggagaaaagcaatacaaactgggtggacattacccaagattttgaagaagcttgtcgagaattaaagttgggagaactacttcatgataagctatttggtctttttgaagccatgtctgctattgaaatgatggatcccaagatggatgctggcatgattggaaaccaagttaatcgaaaagttctcaattttgaacaagctatcaaggatggcactattaaaattaaagatctcaccttgcctgaactgatagggattatggatacatgtttttgctgtttgataacgtggttagaaggccattcactggcacagacagtatttacgtgcctttacattcataatccagactttatagaagatcctgctatgaaggcttttgctctgggaatcttgaaaatctgtgacattgcaagggaaaaagtaaataaagctgctgtttttgaagaggaagattttcagtcaatgacttatggatttaaaatggctaacagtgtgacagatcttcgagttacaggcatgctaaaagatgtggaggatgacatgcaaagaagagtaaagagtactcgaagtcgacaaggagaagaaagagatccagaagttgaactagaacaccaacgatgtttagcagtattcagcagagtgaaatttactcgtgtgttactgacagtgcttatagcctttactaagaaagagaccagtgctgttgcagaagctcaaaaattgatggttcaagcagcagatcttctttctgccattcataattcattgcatcatggcatccaggcccagaatgatactacaaaaggagatcatccaattatgatgggttttgaaccccttgtgaaccagaggctacttccacctaccttccctcgatatgcaaaaataattaaaagggaagaaatggtgaactattttgcaagattaatagatagaataaaaactgtctgtgaggttgtgaatttaacaaatttacattgtatcctggattttttctgtgaatttagtgaacagtcaccatgtgttctttcaagatctctgttacaaaccactttcctggtggataacaaaaaggtctttggaactcatctcatgcaagacatggtgaaagatgcacttcggtcttttgtcagtcctccggtgctttcccccaagtgctacctatataataatcaccaggctaaggactgtatcgactcctttgttactcactgtgttcggccattctgtagtcttattcagatccatggacataacagggctcgacagagagataagcttggtcatattcttgaggaatttgccaccttgcaggatgaggcagagaaggttgatgcagcgcttcacaccatgctgttgaaacaggaaccccaaaggcaacatttggcctggttaggtacctgggtcctttaccataaccttcgcattatgatacagtaccttctaagtggctttgaattggaactctacagtatgcacgagtactattacatatattggtatctctctgaattcctttacgcatggttgatgtcaacattgagtcgtgccgatggctctcaaatggcagaggaaaggataatggaagagcagcagaaaggccgtagtagtaaaaaaacaaagaaaaaaaagaaagttcgcccattgagccgagagatcacaatgagccaagcatatcagaacatgtgtgctggaatgtttaaaaccatggtagcatttgacatggacggcaaagtacgtaaaccgaagtttgagcttgatagtgaacaagttcggtatgaacacaggtttgctccattcaacagtgtgatgaccccgccgccagtgcactacttacagttcaaggaaatgtctgacctcaataaatatagccctcctcctcagtctcctgaactgtatgtggcagctagtaagcactttcaacaggcaaaaatgatattggaaaatattcctaacccggaccatgaggttaatagaattttaaaggttgccaaacccaactttgtggttatgaagttattggcaggaggacacaaaaaggaatctaaagttcctcctgaatttgatttctctgctcataaatattttcctgttgtgaaacttgtttgagagagactggggaggtggccataaaggggcagagtcttctttcagacccaactcttagagggcacatcaccaggctccacatcacgggaagtgagatggatttcttgggtaacaactcattataaggaatacttttagtttgacagccttatatgacatgaatgaaaactgctgttttaaagtggtttattatgttccatggaagaaactggtcttattgaatgcattgatgaacgttatatggttttattacagatttaatcacaaatcattttttatgaatgattgagtgaaaatagtgtttataaaggttaataaatttcttgacaaaaaaaaaatgcactgctggagatgaaaaacagtaggtctttgtccatgttaagaactgaagaaggtgtatgctctttaacatttgagtagttccaaaaacgttatccaaaagaagtttcaaatcaagggattaattaaacacttgtatgagattttggtaaaatacatttagaagggatttttgggagggcctctaaattacatgaaaattgtgatttttatgtgtcatgacatcacaaattatatatctgtaagaatacagatgtgtaaaaaaaatccttttagcacttttaaaagattatacattgtttgctggtgacatgcaaaaaggaggcagatagaaatgtatatagattaaaatttaggactaggtttaaatgtggtgtactttttgtttacttcatattcagtttaacccatgaaacattttcaaatgggtgtctgttcagtatcctctggctttgaaaaactgactacatccccctgtgcttgcaagtgcctgctgccagaggccctccccttcctttcctgcttgtcctgtgtctgctctgatgtttgcggtggcagctttctagg

SEQ ID NO: 336837 - DNA, 2162 bp, Homo sapiens
atacgcatgcgtgcacgctgccggtcgggctgggctgagaggggagggggcggcggcggccgaggcggcgtcgttatttccgtggtccggacagtgcgtggcggcgcgggtgaccacgggagaagtaggcataatggttatgaaagcttctgtagatgatgacgattcaggatgggagctcagtatgccagaaaaaatggagaaaagcaatacaaactgggtggacattacccaagattttgaagaagcttgtcgagaattaaagttgggagaactacttcatgataagctatttggtctttttgaagccatgtctgctattgaaatgatggatcccaagatggatgctggcatgattggaaaccaagttaatcgaaaagttctcaattttgaacaagctatcaaggatggcactattaaaattaaagatctcaccttgcctgaactgatagggattatggatacatgtttttgctgtttgataacgtggttagaaggccattcactggcacagacagtatttacgtgcctttacattcataatccagactttatagaagatcctgctatgaaggcttttgctctgggaatcttgaaaatctgtgacattgcaagggaaaaagtaaataaagctgctgtttttgaagaggaagattttcagtcaatgacttatggatttaaaatggctaacagtgtgacagatcttcgagttacaggcatgctaaaagatgtggaggatgacatgcaaagaagagtaaagagtactcgaagtcgacaaggagaagaaagagatccagaagttgaactagaacaccaacgatgtttagcagtattcagcagagtgaaatttactcgtgtgttactgacagtgcttatagcctttactaagaaagagaccagtgctgttgcagaagctcaaaaattgatggttcaagcagcagatcttctttctgccattcataattcattgcatcatggcatccaggcccagaatgatactacaaaaggagatcatccaattatgatgggttttgaaccccttgtgaaccagaggctacttccacctaccttccctcgatatgcaaaaataattaaaagggaagaaatggtgaactattttgcaagattaatagatagaataaaaactgtctgtgaggttgtgaatttaacaaatttacattgtatcctggattttttctgtgaatttagtgaacagtcaccatgtgttctttcaagatctctgttacaaaccactttcctggtggataacaaaaaggtctttggaactcatctcatgcaagacatggtgaaagatgcacttcggtcttttgtcagtcctccggtgctttcccccaagtgctacctatataataatcaccaggctaaggactgtatcgactcctttgttactcactgtgttcggccattctgtagtcttattcagatccatggacataacagggctcgacagagagataagcttggtcatattcttgaggaatttgccaccttgcaggatgaggcagagaaggttgatgcagcgcttcacaccatgctgttgaaacaggaaccccaaaggcaacatttggcctggttaggtacctgggtcctttaccataaccttcgcattatgatacagtaccttctaagtggctttgaattggaactctacagtatgcacgagtactattacatatattggtatctctctgaattcctttacgcatggttgatgtcaacattgagtcgtgccgatggctctcaaatggcagaggaaaggataatggaagagcagcagaaaggccgtagtagtaaaaaaacaaagaaaaaaaagaaaggtgctgtggattatttttaaacttaagaacagagtgtactttaatttctacagataaatagatggagagctactcgtgagttggtcattatattttagttcttgttcctcttttcagaaactataaggtagagactgagtcccagtatcaatgacataagctttttggttcctttctttgctttcatttctttgctgttctgtgtatcagagaatctttgatcaagaagtagccacgtggagtgtgcaagcaagatatcggtgagggaacaagacagcaggaggccagtgacctattgacagagccagatagctcaggagggca

SEQ ID NO: 336838 - DNA, 1279 bp, Homo sapiens
aggtgtgaggcattgcacctggcttagcgttctgatttgacattgtaatgaaaagtgtgagtctcatctacagggccttttgtcctctgaaatgatagcaggaagggaattttcaggcagtggtcaaagctggggaaaccaggatagtgaagaaggccttgaggtgagagatggaagctaattggtgaactagccttggaagcctgaaacagacaagtagcaattcagagactttgtgggctccactgctccaacttgttttgaagattttcagttctgcagaagaggtatttccccagttgtcctttcagtgctcttagctgttttcccaacatccagatccaatcaaggctgggacatagcattttatcatgtctatttaagtcagaagtgatgaaccccagctgtttacctcatggtaaacctttgaagattccaggtagaatcttctcagactttgaagactgtctcattttatatctttttctcgttattcctagggtcaagacgttttgggcaagaataaggatgtgaacatcagaaagctcataacattttgtttttgatgctaagtttaacaaaggcatgctttagtagcctgtgggccctagggtttgttaaagtgtggagaacaactgagtggagcaagaggacttttctaggaaggtccttgtaatgtgacatttgaaaacaaatgaaggtgtggaagtaggccatgtggatatcaggacaaaccattccaggccaagacaacagcagttagtctggagtgtgatgtgttctgggaaaaaagtggccactttgctaacccaagaagacaggaagggttgtaaagcagtgggagtgtgcaaggaaggaagaccagacctcaaggaaaccacaggcgctctgagcagaagagttacatgatatgactcaaatttttaaaggatcactttggctgccaggtggcagggtaaaagcatagaataattgtgtataatgtgtttttaaggcaaagatagtggcttagtctagggtagtagactgaggtggtaggaaatgaagatagagacaacaggatatgctggtgggtgaggatggatttaatgttgatacaagtattttggtctgagcgtttggaagaaagttggcactgaggtgggaagtcgagtttagttttgttagttttggatgtgttaagtttgagatgctgattcttcagagaagtctaagctggagaactatatagagagtggaaagataacaatagacattgaaagccatgatacaggataag

SEQ ID NO: 336839 - DNA, 740 bp, Homo sapiens
gtccgtgaggtgggaagtcgagtttagtttcgttagtttaggatgtgttaagtttgagatgctgatttttcagagaagttaaagtgtggagaacaactgagtggagcaagaggacttttctaggaaggtccttgtaatgtgacatttgaaaacaaatgaaggtgtggaagtaggccatgtggatatcaggacaaaccattccaggccaagacaacagcagttagtctggagtgtgatgtgttctgggaaaaaagtggccactttgctaacccaagaagacaggaagggttgtaaagcagtgggagtgtgcaaggaaggaagaccagacctcaaggaaaccacaggcgctctgagcagaagagttacatgatatgactcaaatttttaaaggatcactttggctgccaggtggcagggtaaaagcatagaataattgtgtataatgtgtttttaaggcaaagatagtggcttagtctagggtagtagactgaggtggtaggaaatgaagatagagacaacaggatatgctggtgggtgaggatggatttaatgttgatacaagtattttggtctgagcgtttggaagaaagttggcactgaggtgggaagtcgagtttagttttgttagttttggatgtgttaagtttgagatgctgattcttcagagaagtctaagctggagaactatatagagagtggaaagataacaatagacattgaaagccatgatacaggataag

SEQ ID NO: 336840 - DNA, 132 bp, Homo sapiens
tgtggggaaaggggctgtgggaacctatgcagaaagccagggagggggtgatttctatgcagaagggacagataaaacttccaactgacaacttgtaagaccttcagaagggaaattagccagaccctggag

SEQ ID NO: 336841 - DNA, 565 bp, Homo sapiens
atttgcgcaagttaattcatgcttggagctttaatattttaaaatgattcagacatcaatcaagcaaccagaatttatcacaaaatctgtaagatatatagtttctagtttacattctcgatgttgacagctttcctcgcccaaattattgcatctgatccacactattattgtgtgtggtaagcatgtcaggcattatatccattttagtaaaggagaagttgagtcaaggcattaagtggcttgcacaaggttatatggctgttaagtcatagtcaggactataactgaaattttctgactcctcgaccaatgttctctataccaatgttttcaaactctgttatagaaggaactgaaggaggtgacataatatgaaatgaggacaagagaggccatcttagatgaaatgttttatttatttaaaaaaagatgctgcccttttaagtaaaactttgaaaatcattgcactgtattgtcgccgtttttgttttgaaatgggagtgctaagtcagatttgtcaatggtaactccaaaaagggataagaaaaagtcatctgttcct

SEQ ID NO: 336842 - DNA, 236 bp, Homo sapiens
atgccaagaattccacacctaatctcaacataaccaccttaggggctctgcctgtggcttccagaccatggaagtggcgtgggggaggggagacaggaaaatccttgaaaagcagcggacatgagaactgctccgtcgcacagggccccatgctcaggacactacacatggtttaacactgtcattgccagcttgaaattcttagtaatttgattttttttttttttttttttttt

SEQ ID NO: 336843 - DNA, 247 bp, Homo sapiens
caaggaggcaacccaggctgtgtgcagcatcgccccttccctccaaggcaggctgggggccagatctttccctggctttggaggagcggagtgcctaaatcatatactaaatcagagattccaaagaggggtgtgtgtgtgtgtgtgtgtgtgtgtgtgtgtgggagacggtgtctcactctgtcactgaggctggagcgcagtggtgagatctcggctcactgcagtctgtggtcccaggctcaag

SEQ ID NO: 336844 - DNA, 303 bp, Homo sapiens
cttgcatagtcagggtcctcaaatgaacttatgtgttggatcatgataactctggtaattactcgaattacccttgttgagtaatagtatggaccctgaatacaagggtttgatttatgtggccagctctgtgctgctgggtttatgaggacttgccagatgtcatctcctaattaaaatccttctttacccttaatatcctctcctctgtccccaagaaattaatccattctattgctggagcatgtaacagctgatgttgaagttacaagtttacagcttgaactttgcctagactgtacc

SEQ ID NO: 336845 - DNA, 579 bp, Homo sapiens
tcgctttattaatccttagggaccacatagagctgaaggcttgtttctcttcactgtggcaattaaatcctattactccttgacttcttatacatgcactgagtgtgcatgtaatttggcccttcccaatgataaaatgcagaggtgaaacacggttgctgtgctgtgaagccactctgtccttgtcagtgtccttgcagtgccaaaagcagatccgtagtgattttgccaaaaaactgtggttcaaatgtgaggccccgtgagggcttccttgctgtttgaaaccttctcctgagatgtagcctcagggatgctgttgtaaccgttacctcgggaccgtctgaccccactcaccccagaagagggaagatttatggatccaaaatagaataaatgcaaagctcaattgacaaagtctgtagacaaggcccagacatcacagctgttgagcaggcccaggagaagcttgagtccttgaaaccagtgaagaaaatgctgtttcagggatgagggggagcgaccgagagaggagaactcagacttagcggtatagaggatacacagttcgcgaggagaact

SEQ ID NO: 336846 - DNA, 434 bp, Homo sapiens
aggagaagaggaataaggaagagtccttgaactaggaaattagagggttttaagtgagatttcatccctgtcaacatcaatgaccagcgtggatgccacctgatactgagagccctcagtattcaaaacacatctaagaaattctggacagcacagagactaccaaattttaaaaattcaacagtgactcaggacacactgaacatagctctgggcaccattcggaaataaacactttaaccataagtgtcaaagggcatgtgtgtagcccaggcccaaagaccagacaaaccaatattgtctcacagaaacccttttccacctccccaaactcccactccccacttgctgccttcttagtcgcagccatcactcacttcaagcaaagcagtgcacagaatatcacagtctaaatacacaacgcccttaaaaaa

SEQ ID NO: 336847 - DNA, 422 bp, Homo sapiens
aacacatttttctaaaataagtgtgggttttgagagtagaaactacagtttaaataagttaatttgatctagccaaaggtacttaccaggatttttggctattttcttaatttgctcaataggtacttagtgcctactatatgtcaggcactatgcctggaactgtggcaaagaaaggtcagtaagatagggttcttctccccaagaaatactgaatttgttgggggaaacagacagatgtgttactgacagaatataaaagttacctgaagaagcacacaggcacaaatggatgccatgtgtggaatatagtacaaagaggggtttactttctattgagaggatcaggaaagaccttctagagaagatgatgtgtagaacctggagaaggatgaataagactttgggagaaaggatattct

SEQ ID NO: 336848 - DNA, 445 bp, Homo sapiens
tcacacctttggtaaaacatctctggtcagggaatataaaagaatgtagaatctgcggctgaataatgatttctatttccatagaacatacacactcaacacaactccctctttgtggggaagcccttcttctttctcagtgccagcgtgtaccctgctgtgggatcactgctattccttgatctacaaaaaaaaaaaaaaaactcttttccatcacatacatctcatgaatctcagaactcaattttactctttaaatatttttaaagctgaaagatttattttcacttaaaaacaaaaagtcagtcccaaagtcaagagttcacctggtgtcaaagcaacattacctcctttttctgcatctctctccccgttttccttcctacagctcatctgagtccgaataatgttcttaaataagtcttctcactctttccccacaaat

SEQ ID NO: 336849 - DNA, 293 bp, Homo sapiens
ccaaaatttattataggactgtagtaattaacagaggttcaggggtggaaaaatagacctgtggaacagactatagagcccagaacagattgataggtacagatccatagatggaatctattttcagtatgctatgagataggactgttaattttcttcactccaactcagattagcaattgaaccagtaccacagtgaatagtttgtcctttcctcactagtttatttcttttttaattttttttttttttgagacagtctcattctgtcacccaggctggagtgtaggggt

SEQ ID NO: 336850 - DNA, 96 bp, Homo sapiens
agagagagagaagcattgcctgatgtaagatggggaaggtgaagagttcagggaagccagagaaagactcacccattgctcaaaagttcaggcaac

SEQ ID NO: 336851 - DNA, 543 bp, Homo sapiens
tgtctcaactgttcctccctgaccttgaggagagtgctacacctaattcagagattgatgtggggggttctaagaggttaaatgactaggctaccagcgcagagtttgaaactcctgtctatagtatcttaccttgtgttatgacacctgaaagggaaactctaagcttagagaaaaatccttttgatatgacaatctcaataaagactgtttatgactgcacaatacgttgtaatgccaaaaggcaaatctcacaggaaaattccacatacagacaagcaataagaactggtttgtttcgtaactaacctgcatcttgaggaataattcaggacaaggacaataagtgccataaccacatcaccttaagaagacctatcctaacctagtaccaagaaaaggttaagagcgtcagcctctgaaaaaaaggcataaacccattaggagccctggaaagagcagttgaggggaaaacggaatcaaaacactaagacaggtggccacactgcctgaaggctgggatgtctgagacagcagaaccat

SEQ ID NO: 336852 - DNA, 89 bp, Homo sapiens
atgtactgtcattaaccagtgctttggggaggattcgttgactaggatttccaaaactgaaaatcattgattgataacgtaaaatgata

SEQ ID NO: 336853 - DNA, 476 bp, Homo sapiens
gcatgggaaaaaaaaataaaaaggcatccagattgaaaaagaagaagtaaaattatttctatctgcagaagacataatcttatatatagaaaattctaaaaatggcacaaaaaactggctagagctaataaattcagcaaagttggagaatagatcagaacacaccaaaaaaatccactgtttttctacatattggagctgaaaaatatgaaaaggaaatttagaaaacttcatttccaatagcatcaaaaagaataaaatactcaggagtaaacgtaaccaaggaacaactgtatactgaaaacaaaaagttgctgaaagaaattaatatgaactaaatgaaaagaaatcacatgttcatggactgaaggacttaatattgttaagatggcaatattccccaaagtgatctatagattcattatattcccaaagtttcaatagctttttttgcagaaatgaaaaagccaacccta

SEQ ID NO: 336854 - DNA, 307 bp, Homo sapiens
ccaaatcacaggctctgtaacttttctcattcttgtctttctgtgagtctccaatgtcaggagaactgcctctcctgtgagctttgtgccttcctgttgtgtctgtcatccttctccccagcatggggcaattggtgtccctctgggagttttcagatagtaatttgcccatcttggaaggaaatggtctccctttggcctccttacttttctcagggtgtctgttctcttcttgcaaatgtctagactcctaagactattgcctccacagcctggaacttttaatgctaatattgtataatctggt

SEQ ID NO: 336855 - DNA, 914 bp, Homo sapiens
ccgaaaggaaagaaggccaagggaaagaaggtggctccggccccagctgtcgtgaagaagcaggaggctaagaaagtggtgaatcccctgtttgagaaaaggcctaagaattttggcattggacaggacatccagcccaaaagagacctcacccgctttgtgaaatggccccgctatatcaggttgcagcggcagagagccatcctctataagcggctgaaagtgcctcctgcgattaaccagttcacccaggccctggaccgccaaacagctactcagctgcttaagctggcccacaagtacagaccagagacaaagcaagagaagaagcagagactgttggcccgggccgagaagaaggctgctggcaaaggggacgtcccaacgaagagaccacctgtccttcgagcaggagttaacaccgtcaccaccttggtggagaacaagaaagctcagctggtggtgattgcacacgacgtggatcccatcgagctggttgtcttcttgcctgccctgtgtcgtaaaatgggggtcccttactgcattatcaagggaaaggcaagactgggacgtctagtccacaggaagacctgcaccactgtcgccttcacacaggtgaactcggaagacaaaggcgctttggctaagctggtggaagctatcaggaccaattacaatgacagatacgatgagatccgcgtcactggggtggaatgtcctgggtctaagtctgtggtcgtatcgcaagctcgaaaaggaaaggtaagaattgcataactgggttaatgtacactgtgagtttctgtactaaaatattgatataaaaaaaaaaatcgggttttggggtggggaaggtttgatgcatgggatgtcggcatttgcacgggaatcgggccaaggggtaatagggacga

SEQ ID NO: 336856 - DNA, 814 bp, Homo sapiens
ccgaaaggaaagaaggccaagggaaagaaggtggctccggccccagctgtcgtgaagaagcaggaggctaagaaagtggtgaatcccctgtttgagaaaaggcctaagaattttggcattggacaggacatccagcccaaaagagacctcacccgctttgtgaaatggccccgctatatcaggttgcagcggcagagagccatcctctataagcggctgaaagtgcctcctgcgattaaccagttcacccaggccctggaccgccaaacagctactcagctgcttaagctggcccacaagtacagaccagagacaaagcaagagaagaagcagagactgttggcccgggccgagaagaaggctgctggcaaaggggacgtcccaacgaagagaccacctgtccttcgagcaggagttaacaccgtcaccaccttggtggagaacaagaaagctcagctggtggtgattgcacacgacgtggatcccatcgagctggttgtcttcttgcctgccctgtgtcgtaaaatgggggtcccttactgcattatcaagggaaaggcaagactgggacgtctagtccacaggaagacctgcaccactgtcgccttcacacaggtgaactcggaagacaaaggcgctttggctaagctggtggaagctatcaggaccaattacaatgacagatacgatgagaatccgcgtcactggggtggcaggtcctgggtctaaggtctggggtcgtatggcaagctcgaaaaggcagctaaaactgcctaacgggtatggccggggtccggcttatatggtttaaaaa

SEQ ID NO: 336857 - DNA, 645 bp, Homo sapiens
  misc_feature (499)..(499): n is a, c, g, or t
  misc_feature (501)..(502): n is a, c, g, or t
  misc_feature (513)..(513): n is a, c, g, or t
  misc_feature (543)..(543): n is a, c, g, or t
  misc_feature (551)..(551): n is a, c, g, or t
  misc_feature (556)..(556): n is a, c, g, or t
  misc_feature (572)..(573): n is a, c, g, or t
  misc_feature (581)..(581): n is a, c, g, or t
  misc_feature (587)..(587): n is a, c, g, or t
  misc_feature (605)..(605): n is a, c, g, or t
  misc_feature (624)..(624): n is a, c, g, or t
ccgaaaggaaagaaggccaagggaaagaaggtggctccggccccagctgtcgtgaagaagcaggaggctaagaaagtggtgaatcccctgtttgagaaaaggcctaagaattttggcattggacaggacatccagcccaaaagagacctcacccgctttgtgaaatggccccgctatatcaggttgcagcggcagagagccatcctctataagcggctgaaagtgcctcctgcgattaaccagttcacccaggccctggaccgccaaacagctactcagctgcttaagctggcccacaagtacagaccagagacaaagcaagagaagaagcagagactgttggcccgggccgagaagaaggctgctggcaaaggggacgtcccaacgaagagaccacctgtccttcgagcaggagttaacaccgtcaccaccttggtggagaacaagaaagctcagctggtggtgattgcacacgacgtggatcccatcgagcttggtntnnttttttccttnccctgttgtcgtaaaaatgggggtcccttnacttgaanttttnaaagggaaagggaaannctttgggnccgttnttggtcccccaagggaanggaccctttaaacccaatngtttggcctttaacaacaagg

SEQ ID NO: 336858 - DNA, 909 bp, Homo sapiens
ccgaaaggaaagaaggccaagggaaagaaggtggctccggccccagctgtcgtgaagaagcaggaggctaagaaagtggtgaatcccctgtttgagaaaaggcctaagaattttggcattggacaggacatccagcccaaaagagacctcacccgctttgtgaaatggccccgctatatcaggttgcagcggcagagagccatcctctataagcggctgaaagtgcctcctgcgatttaaaccaggtttcaacccccaaggggcccccttgggaccccggccaaaaaccaggcttaaattcccaggcttggcttttaaaggcttggggccccaaccaaaaggttaacccaggaacccaaggaaggaaacaaaaaaggcaagaagaaggaaagcccagaagaacttggttgggccccggggccggaagaaaaggaaaggcttggctgtggccaaaaaggggggacggttccccaaaacggaaaggaagaaagccaacctggttcctttcggagccaaggaaggtttaaccaacccgccaaccaaaccttggcggtgggaggaaaccaggaaaaagcttcaagctggatgggggaagttgggcccaacggaaagtggtgtggaattccccccatttgcggaggcctgtgcgtttgggcctcctcccttgggccccttgtgacccccgttggtttgtttcggttaccactgtggggggggttccccttttacttgtggctttttatctccagggggggaacacaggcgcaaagggcacctgtggggaaccgttctctttacgtttcgcccaccaggtgaagggacaccctgtggacgcccaacttggtgttgtcggccctttatacaccaccagctgttgtgacactctcggggaaagcaccacaacagggg

SEQ ID NO: 336859 - DNA, 727 bp, Homo sapiens
ccgaaaggaaagaaggccaagggaaagaaggtggctccggccccagctgtcgtgaagaagcaggaggctaagaaagtggtgaatcccctgtttgagaaaaggcctaagaattttggcattggacaggacatccagcccaaaagagacctcacccgctttgtgaaatggccccgctatatcaggttgcagcggcagagagccatcctctataagcggctgaaagtgcctcctgcgattaaccagttcacccaggccctggaccgccaaacagctactcagctgcttaagctggcccacaagtacagaccagagacaaagcaagagaagaagcagagactgttggcccgggccgagaagaaggctgctggcaaaggggacgtcccaacgaagagaccacctgtccttcgagcaggagttaacaccgtcaccaccttggtggagaacaagaaagctcagctggtggtgattgcacacgacgtggatcccatcgagctggttgtcttcttgcctgccctgtgtcgtaaaatgggggtcccttactgcattatcaagggaaaggcaagactgggacgtctagtccacaggaagacctgcaccactgtcgccttcacacaggtgaactcggcaagaccaaaggcgctttgggcctaaaagcttgggttgggaaaaggccctaaattcccaaggggggaaacccccaaaaaatttttaaccaaatggacagata

SEQ ID NO: 336860 - DNA, 321 bp, Homo sapiens
ccgaaaggaaagaaggccaagggaaagaaggtggctccggccccagctgtcgtgaagaagcaggaggctaagaaagtggtgaatcccctgtttgagaaaaggcctaagaattttggcattggacaggacatccagcccaaaagagacctcacccgctttgtgaaatggccccgctatatcaggttgcagcaggacgttggatccagtcagtgcggcgttggatgcagtcagtgcggcgttggatgcagtcagtgcggcgttgatcgtcagtgcggcgttggatgcagtcagtgcgcgtgatcagtcagcgctgaggcctat

SEQ ID NO: 336861 - DNA, 399 bp, Homo sapiens
acatacaaaaaaggagccttgtgggaggtcagatataaacaagggggagtggtagtaccacaggttttctttagtgatactgggagcttgatggactggctcaatgtgaatttctactctaagtaatttttaacaacagattaagaagccaccttttgtccctgacttactgcccattttctgagctccaggatccagactattgctctaattcctagttctacttggacataccagttcttcactatcttccctattcaagataatttcttccaaagaggctaagggaatcctatagccagatattctttatttaaaaaacatacacaatgtttgatacaggtggctattgatacatgctagggattttacttgatctcaaagacttaaataagagac

SEQ ID NO: 336862 - DNA, 422 bp, Homo sapiens
gtgggttgtctctagtttttttgctatcataagcaattccgccatgaacattctcatacgtctcctggtatacaggtagagcagcttctctggggtagaaaactaaggtgggatttctggggcatcaggaagaatatcttcaaccatattaaatattatgcaaagtcactgtcctcattttacattcttgtcagaaatgtgtaagaattcaggatatttcaaatcttcagtaatgctgagtaaaagcgcaagttacatgatttcacacgtgacacaagacttcaattagacagttcaattattaactacattaatactgtagactgtatagtactgtatactgtatacttgaaaattgctaagagaatagattttgagtgttctcaccaccgaaaaataagtaaggtggcatgcaaaagttg

SEQ ID NO: 336863 - DNA, 207 bp, Homo sapiens
cccagatctgctcagactacactaccacctccttgaacatttagctcagcatcacctgcaagtcttcctgaaggttaaacagagagcctagctctctagcaacagtcttgagataagcctaagcatctggaccgagaagggcactcatcacagcacaactgatgtagccaacagcaagacttgcaagctgttactgggtgtagcaag

SEQ ID NO: 336864 - DNA, 232 bp, Homo sapiens
ggctgagatttgatctcgttttttcactactgtgcctcacggcctaaaacagtgcctggcacaaagtgggtctttattacatatgtgtgggatgggggcataaattcccatcagcctccagcctcagtttttcaccaaatcattgagctctgtgggtcccctcatccctctaggccatcctagagattaattcacttccagtgagagctctctggctgccgttagccttgta

SEQ ID NO: 336865 - DNA, 177 bp, Homo sapiens
aatgagggaatgtcacagaagaaggcagggaggacacatggttgacaaagcgatagttgtgtgatggaagttgtcacagtgaccatcttaactaacccaccaaggtagcatcctgctaccaagaaaagataatggcctcttgacatggtaatgtggtagaacagtgggtgacagatg

SEQ ID NO: 336866 - DNA, 100 bp, Homo sapiens
  misc_feature (93)..(93): n is a, c, g, or t
ctggacacagctcatatacccaccagttggagactggatcaacaaataggtatagtcataaatggaatacaacttagcaatgataaggaacanctgtctt

SEQ ID NO: 336867 - DNA, 195 bp, Homo sapiens
tgcttctgcagatcaccaggaactccaggaaccttagtaatggaactcaggtgtcttcttctacgactccttcttgaccctgagcactctcttgtgttgacctcagcattgctgtatgttcctggtctccccttgtccctaaaagactcttcctcctctctctgttctctggcttttctttctccttattccctc

SEQ ID NO: 336868 - DNA, 392 bp, Homo sapiens
agctacctgcttaaaggattttttttttccagacagggtcttagtctggttgcctactctcaagtgcagagtgacgtgatcttggctcactccaaccttgaattcccaggcgcaggtgattctcctacctcagcctcctgagtagtgcacatcaccatgccctagaaagtttttcagagtttcactctcttgcccaggctggagtgcagtgccgtgatcttggctcaactgcacctccacttcccaggtcaagtgattctcatgcctcagccgcccgagtagctgggattataggtctgtgccagcacacccagataatttttgtacttttagtagagaccgggttttgcctgttggccaggcttgtttcaaactctaggcctcaagtgatc

SEQ ID NO: 336869 - DNA, 1096 bp, Homo sapiens
ttccttttcacttcgactccttcctagcatggcacacgatagatcatttgatcattagaaaggtaacttctgaggcctcacacatggaaatatattgaataatttctagcataaatcaatgtcccaggcttatcattttctttccctgtctcagttcttgaatcagccaattttgcaaggaccctggttcctttacggaaggacaggatttagaaatcagtatctaggcacttggtgtgttcattattactgcagtgccttctagtctctccattgagctgagaaatatgtatgtgtgtatctatagacatgtggagatcaatgtatatatatggagatctctatgtatgttcataggttagaaaaaaccatgaggccagaccaatatttccaattctaatccaacacctcaaagctctttctagcctcacctttcaatatttgtaagttccttttccaactgtgaggaaacgtggctctcattatactcactgttttgttcgtttgtttgtttttgagacagagtcttgctctgccacccaggctggagtacagtgacctgatcttggctcactgcaatctctgcctccgaggttcgagagattctcctgcctcagcctcccaagtagctgggactacaggcatgtgccaccacgcccagcaaatttttgtattttttagccacagtgctgggattaacaagcttgagccaccgtcccagctgttttaaataacgtaaataacagtgctgagcagtaagaaaatgagatccagcccttgttaacaaaccgacaaagcctctccaattgggtttactttcctctccagtcttcttctcagaagtcactctggctcttgtcagacatcctttttcccccaagtctcaatatatcggtgctctttactcggcttgcccagtgtactcgttgaggtgtcaatccccctacacttgggggatttctgggtcgaagattcggccaggcggggctggggggtcggatcgccgggactgtatcacgctcggggtacgcgtactcaggggcgcactggtgagtgtgtggcgcgacacaaggcggtggtgggtggtggtcgtcga

SEQ ID NO: 336870 - DNA, 971 bp, Homo sapiens
ttccttttcacttcgactccttcctagcatggcacacgatagatcatttgatcattagaaaggtaacttctgaggcctcacacatggaaatatattgaataatttctagcataaatcaatgtcccaggcttatcattttctttccctgtctcagttcttgaatcagccaattttgcaaggaccctggttcctttacggaaggacaggatttagaaatcagtatctaggcacttggtgtgttcattattactgcagtgccttctagtctctccattgagctgagaaatatgtatgtgtgtatctatagacatgtggagatcaatgtatatatatggagatctctatgtatgttcataggttagaaaaaaccatgaggccagaccaatatttccaattctaatccaacacctcaaagctctttctagcctcacctttcaatatttgtaagttccttttccaactgtgaggaaacgtggctctcattatactcactgttttgttcgtttgtttgtttttgagacagagtcttgctctgccacccaggctggagtacagtgaccaagatcgcgccattgcactccagcccaggctacagtgtgagactccgtctcaaaaaaaaaaaaaaaaaaaaaaaagaagagaaaagaaatatagcatctcttcaacaaacggttggggacaactggatttgcacatgcgaaagaatgaagttggattcctatccctcaccatgtaaaaaaaatcaactcaaaatggatcaacgacctaaatataaaagctgaaatcacacaactcttagaaaaaacataggagttaatcttcatgaccttggatttggcaatggattcttagataggacaccaaaaggaccagcaataaaagaaaaaaacagataaattggacttcgtcaaaatttaaaactttcgtgcacaaaggacattataaataaagtaaaatgacaacctatggaa

SEQ ID NO: 336871 - DNA, 407 bp, Homo sapiens
ccactgtgcccggctggcagtcagtatctttttaagggtgtaatgtgtaagttggacacatgactttcactcctattgtattggcaagaacacagtcacatctagttgcaagggaggctgtgaggtataatttctagttgaagaaccttgctaaattttagccttgctaaaattgaaggtggaatggcttaatgctaaatgggggaaatggagaaagaatactggagcttttagtcatctctgccacctagaataatagagaggtcaaagttcagcagtgtgcacccaaacctccattttcttcatacctgacaccatgttgcagaaactgaaagcttgcaacctgagggctaagactaatccattgcttgagataattctatccatgtttagcagtactttaaaag

SEQ ID NO: 336872 - DNA, 1017 bp, Homo sapiens
gtgaggtgaagttagggcagcgacgattggccgattactgaagaggcatgccacttaggctttctgaacctcagtttcctcattcgtaaaatagaaacaagaatcctgctcttgcgccccctcccgggattattagaagattgaatcctaaaaaaaaagaagaagaagattgaatccttttatggatttgagggtccctggctttataaatttaaaatatttaattctttcagccagcctggattatttgctcccttagagcccatagatttactgtaattgattcagtccactccgatttttctcgcccataagtatttttatttaaaaatgaatatatcttatcttcttcaacgaagcacttttgcagccattacgtcttttcggagctagacagaagttactaaacctggaaaattccttaaggatcacttgcttcaaagggagacacggtggccctgctgttcaaggagcgtcagtgacccagagagtcagtgaccaagaggaaacgcctgtctcctggggacttccaagatactagctacagtctcttatatttacacctttcctccctaaggacagcaggaaaaagaaagttccgtgtttctttttaaatcagggagatgttaatagctacatggctcattttgtctacaccacagaaataacagtggttccagttaatcatgctcatgttgagggggagtgcttatgcaggggccaccagaagacccctctccttcactaccaccaccaccaccctaagaaatgaaaagccaaaaaaagaaaccaaaaaaccagaggtcaacaagaagcttccagaggtagtcagcaggggacaagaaagtgtttttataaaaaacgcacatatctttgatgacaaaaaaaaagggatagctatgaaggaaaaatgaagcaaataaaaattatttaaagcatatatttacttaaagcataattttaaagtcatttaaagtatgaaccataggaaagtgttgaagaaaaacatttaagaaa

SEQ ID NO: 336873 - DNA, 241 bp, Homo sapiens
ggatgtgatgagctactggagttgctattttgcataaaatggcatttgagcagaggcctggaggtaggctgggagcaagcccatcccaaggagatgtgtttcagaaagtggaatggggagtaccaaggccctgcagctggagaacactcatcaagtttgagtggcaaactggaggccggtatgttgaggggtggggaaagaaaagaagggccaaggactggggagaagctcaaagggtgtg

SEQ ID NO: 336874 - DNA, 471 bp, Homo sapiens
ggctgggcagatgggcacagaaattttcagggtatgacagctaaagggtgtttttgaagaaaagagtttttgaaggaaagagaaagttctaaaatttatcaggtgatagttgcacaattttgtgaataaactaaaaaccactgacttgtacactttaagtgaattgtatggtacaggaattatatctcaataaagctgttacactcaccccaccccgccaaattgagatagagattgaaatgggcacagaaatttgcagatgaggaaattgaggcccagaaataaagtaacttgactgaaggacagctaactagaaagtgggagaacaaagactccaccctggcacctgggctccagagttctaaagaaattttcaaagaaattcaacaccataaaaagcactccatgatccctcagctcagccaaaccgaatgcgtctaagcaggtaactgaatttctgtgcccatttaa

SEQ ID NO: 336875 - DNA, 1290 bp, Homo sapiens
ggctgggcagatgggcacagaaattttcagggtatgacagctaaagggtgtttttgaagaaaagagtttttgaaggaaagagaaagttctaaaatttatcaggtgatagttgcacaattttgtgaataaactaaaaaccactgacttgtacactttaagtgaattgtatggtacaggaattatatctcaataaagctgttacactcaccccaccccgccaaattgagatataatttctgtgcccatttcaatgatatgggccagaaattttatttctataaaaattactacatgaactaagtctaaatcaaacaaaaatgccttcctctactttgaaacaatagtcttctctcataaacattttattcaaatatttcccagcaacaggcttgtgtgcactaaccaggaagtgaaaccaaatatgatcatattgtgaaagcagagtaaaatgaaagaacacaattggaattatctgaagcattattaaaatttcatctgaaaatccaattcccttggaaacaacaatttaatcaaggaagtaataaaaggaatttcaaaagcataattcttcattttcttgtgtggcagtgtccccagtcttctatgcaaatatcttttcctgtagccaggctggctcatctgaaacacaagctttcaccaacccgcctggtgaatacagggagcagggttaagcaatcattttcatgctagtaaatcaactctggtataaacgattgcaatctttaatgacttactttggagaaaaatgtatcttttgcttcttaggtaacaagtaaatcacatttctcttaattatttttctgtggttactgtcattccctttaatctattgtaaattataagctctctaaaaccagaaaatgtattttactgattagtctgcttttaactgactcagtaacctaaacatagtgagagttattataagtacctaaagattattcttattgtctaaggatagtgttagcaaacaaaactcactatggtttacatttttctgctaagatggatactaagtaggatcatgaatttctgtgccatttcacatccacacaaaactcacagaaatttaatgtatagatgatttctaatgtctcctgacaaactgtaaatactgcatttcttttgcgtatataattgcttacagcttttctcatttgatatatagcattgtacatatgacaagtcttttgcaaaactgtgtgatcgttgtgaaagtagtatcagtatatgacctttaatttctggcccaatcagggccggctgagt

SEQ ID NO: 336876 - DNA, 1078 bp, Homo sapiens
ggctgggcagatgggcacagaaattttcagggtatgacagctaaagggtgtttttgaagaaaagagtttttgaaggaaagagaaagttctaaaatttatcaggtgatagttgcacaattttgtgaataaactaaaaaccactgacttgtacactttaagtgaattgtatggtacaggaattatatctcaataaagctgttacactcaccccaccccgccaaattgagatataatttctgtgcccatttcaatgatatgggccagaaattttatttctataaaaattactacatgaactaagtctaaatcaaacaaaaatgccttcctctactttgaaacaatagtcttctctcataaacattttattcaaatatttcccagcaacaggcttgtgtgcactaaccaggaagtgaaaccaaatatgatcatattgtgaaagcagagtaaaatgaaagaacacaattggaattatctgaagcattattaaaatttcatctgaaaatccaattcccttggaaacaacaatttaatcaaggaagtaataaaaggaatttcaaaagcataattcttcattttcttgtgtggcagtgtccccagtcttctatgcaaatatcttttcctgtagccaggctggctcatctgaaacacaagctttcaccaacccgcctggtgaatacagggagcagggttaagcaatcattttcatgctagtaaatcaactctggtataaacgattgcaatctttaatgacttactttggagaaaaatgtatcttttgcttcttaggtaacaagtaaatcacatttctcttaattatttttctgtggttactgtcattccctttaatctattgtaaattataagctctctaaaaccagaaaatgtattttactgattagtctgcttttaactgactcagtaacctaaacatagtgagagttattataagtacctaaagattattcttattgtctaaggatagtgttagcaaacaaaactcactatggtttacatttttctgctaagatggatactaagtaggatcatgaatttctgggcccaatcaccatatctctta

SEQ ID NO: 336877 - DNA, 605 bp, Homo sapiens
gaggggagaagatattggctatcacagaacctcaattttcacccactaaacaagaacaataacactttcctacttccttcacaggatgggtgtgaggattaatttaggccaggtcaattataaggaactatacagaaggtattttttgcagagaaggtcccagctttaaagctgaagctatatttactctaaggatttggagaggtcactaaagtgtatgaggcaggccaaggaagactggaggagagagtggattctagaagggaatcaatccaattgggtgaatggaggactaaggtgagctcattgtccaggaccaatggatcaatattagtgggtggggtaatcgtattcatagtatgctagcccctttatgccatacttatgctgaggccctgggtagggaaagtataaaaattagaagacctgtttcactaaaatctctgtaagatgccgagaacataaggcaacgcttctgtaaccaagtaatagtgcaaagcataaatctacctgtggtgcctccgtttcctcaccccccattattcttcagaatactccaatcttcttgaggtgatcagccaatttatccctaataatagaaatga

SEQ ID NO: 336878 - DNA, 1023 bp, Homo sapiens
ttttttttcttctcttaaccagattaaaactaacattaaaaaaaacaacaggtggtactagaggtgtgggtagatatcaggaaatgcttccctcaggaattgatgtgcatgaggaatcctggagaataagaaggcatgaagtagagatgaaagagaatgtttcacacaaaggaaacatatgcaagcatcaactcaactctatgcctacagttctggggcagaagaactgccaagggagaaattatgcattgcctgcccccagttccctcaggatacattacattaaggaagaaatcattctcaaaatgtggaagccaaagcaaactcccattcttgactagaatattcagcttgccatttaccattccattctgagaggcaaaagttctttctctcagtcccttttccccagaaactgtgagaaggtgcagagttgttggatgaagaagcccgttcatcaagggctcctccctgtttcctgtgctctttctcaacccaaactcagtgtgcctccttggccttagcagtttccttcactcctggactgatgggtggcacatgattgtgcacttaaataccacagtacaaacgggaggaacacctggctaataactcacagccccaatttctcattcagtaccttagcccatgtaacccagactagctagagcagtgaaggtcctctctcatccttgattacatgcatcatttattacatcctaaacagagatgattacattccaatttcaactgtccttaaaacatttctttaggctcacagaaacatcagcagcagcttttcctcagctaattagagactaattgactctttagcactgttatcagctgtgacagagcccttcctgcctcctgtctgccagcgtacttgggaccatgcctctgtgaaggacttcaatttctctttacaagaatcaacgtggagcaaactccagttgcctactgcctagcattcttgctaagatacgtatgtaaataaaatgtctttatatacctgagaattta

SEQ ID NO: 336879 - DNA, 1034 bp, Homo sapiens
  misc_feature (42)..(43): n is a, c, g, or t
  misc_feature (60)..(60): n is a, c, g, or t
gcagtacttcatgcgctacacgcttttatacaaagcagggcnnggcctagtgggtaatangagtggtactagaggtgtgggtagatatcaggaaatgcttccctcaggaattgatgtgcatgaggaatcctggagaataagaaggcatgaagtagagatgaaagagaatgtttcacacaaaggaaacatatgcaagcatcaactcaactctatgcctacagttctggggcagaagaactgccaagggagaaattatgcattgcctgcccccagttccctcaggatacattacattaaggaagaaatcattctcaaaatgtggaagccaaagcaaactcccattcttgactagaatattcagcttgccatttaccattccattctgagaggcaaaagttctttctctcagtcccttttccccagaaactgtgagaaggtgcagagttgttggatgaagaagcccgttcatcaagggctcctccctgtttcctgtgctctttctcaacccaaactcagtgtgcctccttggccttagcagtttccttcactcctggactgatgggtggcacatgattgtgcacttaaataccacagtacaaacgggaggaacacctggctaataactcacagccccaatttctcattcagtaccttagcccatgtaacccagactagctagagcagtgaaggtcctctctcatccttgattacatgcatcatttattacatcctaaacagagatgattacattccaatttcaactgtccttaaaacatttctttaggctcacagaaacatcagcagcagcttttcctcagctaattagagactaattgactctttagcactgttatcagctgtgacagagcccttcctgcctcctgtctgccagcgtacttgggaccatgcctctgtgaaggacttcaatttctctttacaagaatcaacgtggagcaaactccagttgcctactgcctagcattcttgctaagatacgtatgtaaataaaatgtctttatatacctgagaattta

SEQ ID NO: 336880 - DNA, 1034 bp, Homo sapiens
tgatgaatagtaaataatatttaagatgtgaggggcaagcagtcaaactaaggggaactagagtggtactagaggtgtgggtagatatcaggaaatgcttccctcaggaattgatgtgcatgaggaatcctggagaataagaaggcatgaagtagagatgaaagagaatgtttcacacaaaggaaacatatgcaagcatcaactcaactctatgcctacagttctggggcagaagaactgccaagggagaaattatgcattgcctgcccccagttccctcaggatacattacattaaggaagaaatcattctcaaaatgtggaagccaaagcaaactcccattcttgactagaatattcagcttgccatttaccattccattctgagaggcaaaagttctttctctcagtcccttttccccagaaactgtgagaaggtgcagagttgttggatgaagaagcccgttcatcaagggctcctccctgtttcctgtgctctttctcaacccaaactcagtgtgcctccttggccttagcagtttccttcactcctggactgatgggtggcacatgattgtgcacttaaataccacagtacaaacgggaggaacacctggctaataactcacagccccaatttctcattcagtaccttagcccatgtaacccagactagctagagcagtgaaggtcctctctcatccttgattacatgcatcatttattacatcctaaacagagatgattacattccaatttcaactgtccttaaaacatttctttaggctcacagaaacatcagcagcagcttttcctcagctaattagagactaattgactctttagcactgttatcagctgtgacagagcccttcctgcctcctgtctgccagcgtacttgggaccatgcctctgtgaaggacttcaatttctctttacaagaatcaacgtggagcaaactccagttgcctactgcctagcattcttgctaagatacgtatgtaaataaaatgtctttatatacctgagaattta

SEQ ID NO: 336881 - DNA, 1039 bp, Homo sapiens
attatcagatgctctaaccaaactgaaaagacaagaaaataattttagtggaactagcagtgtggttgtggtactagaggtgtgggtagatatcaggaaatgcttccctcaggaattgatgtgcatgaggaatcctggagaataagaaggcatgaagtagagatgaaagagaatgtttcacacaaaggaaacatatgcaagcatcaactcaactctatgcctacagttctggggcagaagaactgccaagggagaaattatgcattgcctgcccccagttccctcaggatacattacattaaggaagaaatcattctcaaaatgtggaagccaaagcaaactcccattcttgactagaatattcagcttgccatttaccattccattctgagaggcaaaagttctttctctcagtcccttttccccagaaactgtgagaaggtgcagagttgttggatgaagaagcccgttcatcaagggctcctccctgtttcctgtgctctttctcaacccaaactcagtgtgcctccttggccttagcagtttccttcactcctggactgatgggtggcacatgattgtgcacttaaataccacagtacaaacgggaggaacacctggctaataactcacagccccaatttctcattcagtaccttagcccatgtaacccagactagctagagcagtgaaggtcctctctcatccttgattacatgcatcatttattacatcctaaacagagatgattacattccaatttcaactgtccttaaaacatttctttaggctcacagaaacatcagcagcagcttttcctcagctaattagagactaattgactctttagcactgttatcagctgtgacagagcccttcctgcctcctgtctgccagcgtacttgggaccatgcctctgtgaaggacttcaatttctctttacaagaatcaacgtggagcaaactccagttgcctactgcctagcattcttgctaagatacgtatgtaaataaaatgtctttatatacctgagaattta

SEQ ID NO: 336882 - DNA, 724 bp, Homo sapiens
attatcagatgctctaaccaaactgaaaagacaagaaaataattttagtggaactagcagtgtggttgtggtactagaggtgtgggtagatatcaggaaatgcttccctcaggaattgatgtgcatgaggaatcctggagaataagaaggcatgaagtagagatgaaagagaatgtttcctgtgctctttctcaacccaaactcagtgtgcctccttggccttagcagtttccttcactcctggactgatgggtggcacatgattgtgcacttaaataccacagtacaaacgggaggaacacctggctaataactcacagccccaatttctcattcagtaccttagcccatgtaacccagactagctagagcagtgaaggtcctctctcatccttgattacatgcatcatttattacatcctaaacagagatgattacattccaatttcaactgtccttaaaacatttctttaggctcacagaaacatcagcagcagcttttcctcagctaattagagactaattgactctttagcactgttatcagctgtgacagagcccttcctgcctcctgtctgccagcgtacttgggaccatgcctctgtgaaggacttcaatttctctttacaagaatcaacgtggagcaaactccagttgcctactgcctagcattcttgctaagatacgtatgtaaataaaatgtctttatatacctgagaattta

SEQ ID NO: 336883 - DNA, 338 bp, Homo sapiens
attatcagatgctctaaccaaactgaaaagacaagaaaataattttagtggaactagcagtgtggttgtggtactagaggtgtgggtagatatcaggaaatgcttccctcaggaattgatgtgcatgaggaatcctggagaataagaagcactgttatcagctgtgacagagcccttcctgcctcctgtctgccagcgtacttgggaccatgcctctgtgaaggacttcaatttctctttacaagaatcaacgtggagcaaactccagttgcctactgcctagcattcttgctaagatacgtatgtaaataaaatgtctttatatacctgagaattta

SEQ ID NO: 336884 - DNA, 578 bp, Homo sapiens
tggaggagtacagggacctgtagaacgtggtctggggcttctgggagccttattgacttagtcaaagctcattggctatagagtagggggatatacaaaatggaaagagcaagataatttgttttaaggtgtttttatttgccctagttttaacaaaactttcttagacttattaggcattttgtaccatttacttgactattactgtgatacattacatgaccactgcctttagtgttaatctttgcaaagatctttttgtttctacaattgtaatgcaagccttcttataaaatattcaaacaatatagaaacaaaatgagaaggtggtatgtgtggggtagggagaccattgctaggagattttcttcattatgtgctttttttgttttttactgtaaaaattgtgggagacttttaagtagcctacatattaaagcattttgagatgtgtgatagagcactgcttctctgaaattcttaaaaattctgaagtttaggctgggtgtggtggctcatgcctgtaatcccagcactttgggaggccgaggtgggcggatcacaaggtcaggagatcg

SEQ ID NO: 336885 - DNA, 1104 bp, Homo sapiens
ataaagtgtgcattctagaaacttagtaaaaatattacatatgcacaaaatacataaaagaattgcacaatgaatccaaataatgatggagccagtattgggaataagataattgccttactttttatactttcacaacctgggtatgcatccccatcagtatattttatttttgcacattttttatgcaaatgataaccaatgtgtgatattttatattggattttaactcagttatgaaccttacatggaatgatagttaattcactttcttatttcattgattttattatttagaacagtggttgtttgcccaaaacgttgagcaaataatccacagagttcccacatttttcttccaagctcataattccccctgttttaaacatcttgactggccagatgctgtgcctcatacctgtaatcctaccacttagggaggctgaagcaagaggacagcttgaactgcagtgttggagttcagcctaggcaacataacaagaccctgtttcaaaaaaaaaaaaaatcattttaaaccatattgactgtgtgtagtatatcccacaattgatgcaagaatatattacatgtgaacacgatggaaattgaagaaaccaatattattattacctaaagtccatcttttacattaaacttcactctttttgttctgtggtttaagacaactacatgtgtcttgtatccaccatcacagtcttatacagaaacgtttcactgccttcaaaatcccctgtgctcctcctaattctatctctcccctccctcttttgccacccctatttatccctggcaacagatgatgatgttccttcctctagagttttgcattttccagaatatcacatatttggaatgatgctgtaagtggccatttcagacttgcttctttcatgtaaaaatatgccttgaaggtctctcgatacctttgttgcttgacgactcatttattttttatttttatttatctaaaaaaattttgttttgtgagagacagggtctcaaactcctcagctcaggtgattctcccacctcagcttcccagagtgctgggattcctcttgtgagccaccacgttcggccact

SEQ ID NO: 336886 - DNA, 249 bp, Homo sapiens
ctggtccaaatgagaggtagctgtagttgagaacagaatatgccaatgtcggctggacgtggtggctcatgcctgtaatcccagcacttttgggaggcttaaactcccttgagcccaggagtttgagaccagcctggccaacatggtgaaaccccatctctactaaaaatacaaaaatacaaaaattagctgggtgtgatggcatgtgcctgtaatctcagctacttgagaggccgaggcagggagaat

SEQ ID NO: 336887 - DNA, 274 bp, Homo sapiens
tggtagacggaggagaagtccatccccaccacccaccagaaggcgacggtctccttctcccgcccctcatcctcgacggctgcagcatcctcccgacaggcgccaacaaccccataatcgtgctgcctcacccacgagttttgtaaaaagcacaggtagctcacgtttgcttccctggacttaaacatccctcagttggctttcctctctgataatgagagccagggtcccaatccgaagtcagcttgccgggcgtaccgagactctgaattcg

SEQ ID NO: 336888 - DNA, 397 bp, Homo sapiens
aaaaaatattcctatgagaatacaggctgaaaaagatcaaagtaaaatgaatcaggtcggtatcagaaatttcagtgatatacaatgaaggaataaaatggagcagcagctatagttttgaaacaaaatgtattttccaaggttcttgtacccaaccaaattataacttatgtgttaggacaatagagaagtaattttagccaaagaaataatctgaaattatagcatctatgcacatttattgaaacaagaaactcagaaatcaaaatagccgagaaattaataaaatattcaaaaggaggaaaatacattttagaataaagcataatgaggaataaaatcactatgactttttgaaagtataaaaattgttatttttttctatgaatacttgctc

SEQ ID NO: 336889 - DNA, 368 bp, Homo sapiens
ccatccataatcccattacttagtgaaacagttgtaaatgttttgggcctgtcttcagttgacttttcaggataaattcacaagctgctgttctttcccgtcctctttttattttaaagtaatactagaaattctaatgataactttatgttgtttggttcttccttcatagagtaagataaaaagactgataatcagaacagccatggtttataaagtaaatcataaagaaatttactgatttaacaaagatcacagaatgagtgtgtaagcaggtttgagattagtaactaaatcttcaaatatccaaattggacttttggttatttcgtgtcatgtattctgacacagctaaggttatttagtgt

SEQ ID NO: 336890 - DNA, 471 bp, Homo sapiens
cctgattcttgccttttctgaccatctcagtcagaatcacttaaaccatcttctgagtttccatagctgtttatagcacacgtagcaataccatgcagtgactgagtacagccctcagtccacacccctgcttcctagctgtgtgactgacaagtagattaacctctctgtttccaaatctataattaggaataataataacagttcctactttatagagttgatgtgtgaggattaagatgttctgtggtacatagtaaacatccaaatgttacatgctgttattggtggtgacggcctgattactattcataaatcgctagaggctaattactggctgcctctagtttcagctcttcctgtgtctgactgcttattgctgaatccagggttgcccagttttgtaaggggtatatcctaacctgcaggttaccctcagacacttgttggaatatttttgcgaataacatt

SEQ ID NO: 336891 - DNA, 167 bp, Homo sapiens
atggtgaatttagcatttctttttatttcattgtgttttgcatctacttctgttgcttagtcctttaagcagtgatcctaccaagctgattgaaaactgtatatttaaagaggcatctaactgtggacttgagatagccttgcctttgagcagcatgtactttctcc

SEQ ID NO: 336892 - DNA, 394 bp, Homo sapiens
tgtggcacatccagacaatgaaatattattcagcattaaacagaaatgagctatcaaaacataaaaagacatggaagaaacttaaatggatattactaagtgaaagaggcaaatctgaaaaggctacatactgtatgattccaactgtatgacgttctgcaaagacgtatctgtgaagactataaaaagaccagtggttgcccacggcatatctcttaacctccctttgtctcagtttccaatctgtatgatcacgatcaatacaacctacttcttagggttgaggtgagaatgaaataatattttatatgtataaaaggcttcgcacatagtaaccttcagtaaatattagctctattagtataaacaaaaggtaccaagtatgatatctcaa

SEQ ID NO: 336893 - DNA, 431 bp, Homo sapiens
ctctctatagggaatttgggccccccaggccaagacttcggcccgaggagtctacccaggcaggcaggaccttgaggaatcagactatctgtctgtgtgtcacctctcctccttcagccatgctggccccgagcttagggatgtgcttgcaaacccttctcaagggtctcacaaccccaacatcttcagactggcctgacctgggccttgtcttccagttcctttctcccattcccagcctcatttcttaaatgactaggaattttttaatggaccatcatagggagggggtgctcctcttttcccaccaggttgaggtgggggccttgcatcgggggtccccagggtatggggtaggggtgggggtgggcaccagctcaggggcttccatttgcaaagggaaattaaagaaagaatgttgcttaaacatg

SEQ ID NO: 336894 - DNA, 1922 bp, Homo sapiens
taactagaaaaagaaatttgtaaaccataaattaagatgcacaggtggaggtatactgtcatcaattaaggcagagatatttcaacttctaggatcataaatccctatgggtctgatgaaaagccttgcaccctctgtcctccaaaaatacaccctgcactaagaactcttagaagttacaagctggccacccatgggcaacacccagcacacagactggtttggtttagacactgaactgtcttaaaattttgtttgcttttgttaaaaagttgagaattttcataaaaatccagatttccaacatctcttgaacaatcgggaaatccgataacaacttgggcccgcattctcacatggctgaagttacctggcgtggaatagaagctgcttcccatgatgggcatgcactgtccagtttgccgtagtttctaccacttcctcttctctgtcctgcttgccttagtttgtcatttggctgtgggcatttaagtttgcagcccccatcttagacgtaaataagctacagaaaaggaacaagctgacaaagttcctatcttggctcctgtaagaccagctctccaagccgtaccaaagaaattcctcttttggttttgcatgttctatccttacataatccagtcctgggggaggggcaagggacataccaagtagacaggtgcaggaagctggcaggggtccagctctggtccagggtgggggcatggggcagaacatcctgttctgccagtctctgggcttttcctaatcagggattaaagtctccagtgacaggatagaagaggtccatggaccctgggtctccaaccctcttggttttgctcccatcctcttagggtggctgagtctgtgaatccatgctggggagggagctcagacacctgaccccaaatgaaaaactgagcctacagctctcaccactgggggtggaggggcagcagattcattgtacagaggggtagcatgttatcatcacacttccccttctgtgtctctcccagtgggggcgtgatgctggtacatgacatccgacgaaatgagagccacctaattgatttccgggagtccgcaccaggggccctcagggaagagaccctgcaaagatcctgggagaccaaggtggggaccctggtgagaagagagagttcaggggagtctctcttcattgcccttctgctaacccaagcattaatttgctaagtatttaccaggggagtgggaaaaagagttgagcaggattctcttaggctatgagagagtcaggcagcccccaagataaaataatgaactagaaaatctggaaccttacttctctgggaatcttacctatctggcacgtgggaaggaagaaaaaaggctactgagtaccctgaaatgtcacgaagttgatgcaatgaaactcacacatctcactctgagccagttgactataactttcccagcccttgatatattggaagattagaggggaattgccagaagtaaaccaactgtctgctgaaagaaaaagaagatatcgaataacttggaaaaatgggtacttagtgcggtggcaaaagccaaacacacccctgagtcttcagagctcagagtaatggtggggtgaaactgaataggttaaatgaaggtcctttgtccaccgttttaaaaggtagggttgcctgggcacagtggctcacacctgtaatcccaacactctgggaagccaaggcaggaggattgcttgaggccaggagtttgagaccagcctgagtgacatagtgagactttgtctctacaaaaaatgctttgaaattagccaggcacagtagcatgcaccaaggatcgcttgacttgagcccaggagttggaggccacagtgagctatgactatgccactgtactccagcctgggtaacagg

SEQ ID NO: 336895 - DNA, 5370 bp, Homo sapiens
tcgctgcgctgctggggggcgcgggcgaggatggcggcggagaacgaggccagccaggagagcgccctgggcgcctactcgccagtggactacatgagcatcaccagcttcccgcggctgcccgaggacgagccggcgcccgcggccccgctgaggggccgcaaggacgaggacgcctttctgggagaccccgacaccgacccggactccttcctgaagtctgcacggctgcagcggctgccatcgtcgtcgtcggagatgggcagccaagacgggtcgccgctacgcgagacgcgcaaagacccgttctccgccgcagcggccgagtgctcctgccgccaggatgggctcacggtcatcgtcacggcctgtctcaccttcgctaccggtgtcaccgtggcgctggtcatgcagatctacttcggggacccccagatcttccagcagggtgccgtggtgaccgatgctgcccgctgcacttcactgggcatcgaggtgctcagtaaacagggatcttctgtggacgcagcggtggcagcagccttgtgtttgggtatcgtggctccacacagttctggcctgggcggtgggggcgtgatgctggtacatgacatccgacgaaatgagagccacctaattgatttccgggagtccgcaccaggggccctcagggaagagaccctgcaaagatcctgggagaccaagcctgggctcttggtgggggttcccggaatggtgaaggggctacatgaagctcaccagctctatggcaggctgccatggtcccaagtcctggcctttgcagcagctgtggcccaagatggcttcaacgtgactcatgatctagcccgtgccctggctgaacagctgcacccaacatgtccgagcgcttccgggagacgttcctgccatcgggccgcccgccactacctggctcgttgctgcatcggcccgacctggctgaggtgctggatgtacttggcacctccggcccggctgccttctacgcaggtggcaacctcacactggagatggtggccgaggctcagcacgcagggggtgtcataaccgaagaggacttcagcaattacagcgcccttgtggagaagcctgtgtgtggcgtgtacagaggtgacctctcccccggctcccagggtcccccctcaggagaagcctcccagtccatggccacatcgttttggcctagagactcctctccatttcacaggagagaaactaaggcagtgagctacctgggcagtcaactgttgaagcaaaccagagtcagcccaccttctgaaaagtagctgtggggtcagttaccccaagtatttaggatattggggggtggacctggtcaaagggtccaacctggaagttggggttctggccataggttttcttgatttgggctctgtgttgcctctgccctttccccagcagcgctgtcactgccctgtacttcctaagaatttttaagacaaagtccatccaagcttcacagtagaatgaacctttcaagacagtcatagacccagctcctcatagtgccaaaaagaaattgaggcccgaggagggaatataacaactggccaaactcaagaaaaccaacagggaacccagaaaaccaagcttatgacatgggtggggtccatgtttactgaacccaaggtggtaggtgctggatttctcagaagattctcaggttctttcccttctaggagagccagatcacatcaagccccaggaaagggtttctctgagttcaactttccaggcctcaatctccaacctgattcctctgccagaggcagtggaatatgaagcaatggaaagagcctatcagctgggtgcagtggctcaggcctataaccccagcacattgggaggctgaggcaggaggatcacttgagcccaggagttcatgaccagcctgggcaacatagtgagacaccgtctctataaaaaatttaaaaattacccaggcgtggtggtgtacctatagtcctagctactcaggaggttgagatgggaggattgcttgagcctgggaggtcaaggctgcagtaagcatgattgtgccactgcactacagcctgggtgacagagtgagaccattatcacacacacacacacacacacacacagaaaagaaaaaagaacaagcgtagcgttggagctaggaagacctgggtttgagtaccaactgtgccatttaccttgaacaagctacttcccactctgagccttggttccctccttaaaatggaaataataatagtgcctacatcttaggatgcccataaggatttgatgagatgatgtaggaagttgccctgatcagagcatgcactgaatatagattttccatttccccttcccagcctgggttgtctcaacaatgctagtaccttgagtgctctggattccccttgtctctctgtaccacagtttctggacctatcaaatatgtgtgataacagtagccacagtgaggactaaatgagttaatgttagtgttatgcatcagctattattcctttgatgtccaaacatctagtaacagaataggaagagaaggttgctgctgccaagaagtttggggctggatgagaccatcaggagtcatggataatatcctggcctatgggagagctaaaaggagacacatgacaggccaggaatatgaacatctggtcacctgtttctgctgtgctctgctgatagcctgcagtgtgactctgggcaagccacagccctcttgagccttagttttctcaaatggcagaggaaactgaagaccagtgttctgagttcaagtcctggccctgcccttgacttgccatgtgaacttgaatgagtctctttgcctctcaatgtttcagtttccccatctggtgagggagttcagcgcagtggtctcagtgtgtgatggtggaatgtggagatgggatgtgggatgtgaaggtgccttgacccctaccctgccatcagtcacttcctgtcctttcaggccacctggttcttagtcccccacctccgcacacgggccctgccctcatcagtgctctcaacatcctggagggcttcaatctcaccagcctggtatcccgagaacaggctcttcactgggtggcagagaccctgaagattgcattagccctggccagcagactgggagatcccgtctatgattctaccatcactgagagcatggatgacatgctcagcaaggtggaggccgcctacctccggggccatatcaatgactcccaggcagcccctgccccactcctgcctgtctatgaactagacggagctcccacggctgcccaggtgctgatcatgggacctgatgacttcattgtggccatggttagctccctgaaccagccctttggcagcggccttatcaccccctcggggatcctgctcaacagccagatgctggacttctcctggcccaaccggacagctaaccactctgcacccagcctggagaattcagtgcagccagggaagcggccactctctttcctgctgcccacagtggtccgacccgcggaggggctctgtggaacctacctcgctctgggggccaatggagctgcgcggggcctcagcggcctgacacagcatctgaatagacaaccagccctctttagggtgggatttgaaaggaagggcctgcttttctccagaacacctcagaatggctccatgaatgtcttgagaacctgatatatatgccaggcacctattttggcaggtggtgagttaacgatcttaagttctggaatcagacactcctgggttccggcccaagtgctaccaatttgtaactgtgtgatgctggagcattcacttaacagctctgaacctcagtctcttcatctttaaaatggaaataataacaatagctaacatttaaagagttcgtactaagtgctgggcactgtgttatgtgtgttaaccattttaaccttcccagttctggagagaatccttatttctattttatagataaggaaaccgaagcccagagaggttaagactttaggtcaagtaccttcagctagaaagagcagggaggcagtttggttccagagcctacgcacactcctaaccactaagttaaaagcacccacattgtgccctagaccactcctagctattaaccttgccctatccagagagaaaagaagggagccccgggctagattaaagagacttggttctagtggtgtatcttccctggcttcctctaaactctggagtaagtcattttccttgctggacttcactttccctctctgtgaaatggaaacagtcatcacaggcctgcctgtcttccagggctgttaggaggctcagatgacacccggtgtaagaattctcaagactaaggagcctggaccaagggtgagagctgaggaatcctggaccatcacccctgggacagccctgatttttctgtaccttggctaccacaggttctgctgaatgtcctgaccttgaaccggaacctgagtgacagcctggcccgcggccgcctacacccggacctgcagtccaacctcctgcaggtggacagtgagttcacagaggaagagattgagttcctggaagccaggggtcaccacgtggagaaagtagatgtcttatcctgggtccatggcagccgaaggaccaacaacttcatcatcgctgttaaggaccctcggagcccagatgcagctggagccaccatcctgtagagcagcggggtggggcggggtctctgctcccccactttgcatgttcccagagtccctccttctcccaggtttggtctcagggggaccccagggatgccccagatcaggggccagaggggatgcttagcaaacccaatcccagagtaactggaaaattctccatcaggaggcctgtggtggtggtggtggtggtggtggtggtggtggtggtggtgagtgtcagcatctacagtacagccaggcaggcaggaccttgaggaatcagactatctgtctgtgtgtcacctctcctccttcagccatgctggccccgagcttagggatgtgcttgcaaacccttctcaagggtctcacaaccccaacatcttcagactggcctgacctgggccttgtcttccagttcctttctcccattcccagcctcatttcttaaatgactaggaattttttaatggaccatcatagggagggggtgctcctcttttcccaccaggttgaggtgggggccttgcatcgggggtccccagggtatggggtaggggtgggggtgggcaccagctcaggggcttccatttgcaaagggaaattaaagaaagaatgttgcttaaacatg

SEQ ID NO: 336896 - DNA, 5355 bp, Homo sapiens
tcgctgcgctgctggggggcgcgggcgaggatggcggcggagaacgaggccagccaggagagcgccctgggcgcctactcgccagtggactacatgagcatcaccagcttcccgcggctgcccgaggacgagccggcgcccgcggccccgctgaggggccgcaaggacgaggacgcctttctgggagaccccgacaccgacccggactccttcctgaagtctgcacggctgcagcggctgccatcgtcgtcgtcggagatgggcagccaagacgggtcgccgctacgcgagacgcgcaaagacccgttctccgccgcagcggccgagtgctcctgccgccaggatgggctcacggtcatcgtcacggcctgtctcaccttcgctaccggtgtcaccgtggcgctggtcatgcagatctacttcggggacccccagatcttccagcagggtgccgtggtgaccgatgctgcccgctgcacttcactgggcatcgaggtgctcagtaaacagggatcttctgtggacgcagcggtggcagcagccttgtgtttgggtatcgtggctccacacagttctggcctgggcggtgggggcgtgatgctggtacatgacatccgacgaaatgagagccacctaattgatttccgggagtccgcaccaggggccctcagggaagagaccctgcaaagatcctgggagaccaagcctgggctcttggtgggggttcccggaatggtgaaggggctacatgaagctcaccagctctatggcaggctgccatggtcccaagtcctggcctttgcagcagctgtggcccaagatggcttcaacgtgactcatgatctagcccgtgccctggctgaacagctgcacccaacatgtccgagcgcttccgggagacgttcctgccatcgggccgcccgccactacctggctcgttgctgcatcggcccgacctggctgaggtgctggatgtacttggcacctccggcccggctgccttctacgcaggtggcaacctcacactggagatggtggccgaggctcagcacgcagggggtgtcataaccgaagaggacttcagcaattacagcgcccttgtggagaagcctgtgtgtggcgtgtacagaggtgacctctcccccggctcccagggtcccccctcaggagaagcctcccagtccatggccacatcgttttggcctagagactcctctccatttcacaggagagaaactaaggcagtgagctacctgggcagtcaactgttgaagcaaaccagagtcagcccaccttctgaaaagtagctgtggggtcagttaccccaagtatttaggatattggggggtggacctggtcaaagggtccaacctggaagttggggttctggccataggttttcttgatttgggctctgtgttgcctctgccctttccccagcagcgctgtcactgccctgtacttcctaagaatttttaagacaaagtccatccaagcttcacagtagaatgaacctttcaagacagtcatagacccagctcctcatagtgccaaaaagaaattgaggcccgaggagggaatataacaactggccaaactcaagaaaaccaacagggaacccagaaaaccaagcttatgacatgggtggggtccatgtttactgaacccaaggtggtaggtgctggatttctcagaagattctcaggttctttcccttctaggagagccagatcacatcaagccccaggaaagggtttctctgagttcaactttccaggcctcaatctccaacctgattcctctgccagaggcagtggaatatgaagcaatggaaagagcctatcagctgggtgcagtggctcaggcctataaccccagcacattgggaggctgaggcaggaggatcacttgagcccaggagttcatgaccagcctgggcaacatagtgagacaccgtctctataaaaaatttaaaaattacccaggcgtggtggtgtacctatagtcctagctactcaggaggttgagatgggaggattgcttgagcctgggaggtcaaggctgcagtaagcatgattgtgccactgcactacagcctgggtgacagagtgagaccattatcacacacacacacacacacacacacagaaaagaaaaaagaacaagcgtagcgttggagctaggaagacctgggtttgagtaccaactgtgccatttaccttgaacaagctacttcccactctgagccttggttccctccttaaaatggaaataataatagtgcctacatcttaggatgcccataaggatttgatgagatgatgtaggaagttgccctgatcagagcatgcactgaatatagattttccatttccccttcccagcctgggttgtctcaacaatgctagtaccttgagtgctctggattccccttgtctctctgtaccacagtttctggacctatcaaatatgtgtgataacagtagccacagtgaggactaaatgagttaatgttagtgttatgcatcagctattattcctttgatgtccaaacatctagtaacagaataggaagagaaggttgctgctgccaagaagtttggggctggatgagaccatcaggagtcatggataatatcctggcctatgggagagctaaaaggagacacatgacaggccaggaatatgaacatctggtcacctgtttctgctgtgctctgctgatagcctgcagtgtgactctgggcaagccacagccctcttgagccttagttttctcaaatggcagaggaaactgaagaccagtgttctgagttcaagtcctggccctgcccttgacttgccatgtgaacttgaatgagtctctttgcctctcaatgtttcagtttccccatctggtgagggagttcagcgcagtggtctcagtgtgtgatggtggaatgtggagatgggatgtgggatgtgaaggtgccttgacccctaccctgccatcagtcacttcctgtcctttcaggccacctggttcttagtcccccacctccgcacacgggccctgccctcatcagtgctctcaacatcctggagggcttcaatctcaccagcctggtatcccgagaacaggctcttcactgggtggcagagaccctgaagattgcattagccctggccagcagactgggagatcccgtctatgattctaccatcactgagagcatggatgacatgctcagcaaggtggaggccgcctacctccggggccatatcaatgactcccaggcagcccctgccccactcctgcctgtctatgaactagacggagctcccacggctgcccaggtgctgatcatgggacctgatgacttcattgtggccatggttagctccctgaaccagccctttggcagcggccttatcaccccctcggggatcctgctcaacagccagatgctggacttctcctggcccaaccggacagctaaccactctgcacccagcctggagaattcagtgcagccagggaagcggccactctctttcctgctgcccacagtggtccgacccgcggaggggctctgtggaacctacctcgctctgggggccaatggagctgcgcggggcctcagcggcctgacacagcatctgaatagacaaccagccctctttagggtgggatttgaaaggaagggcctgcttttctccagaacacctcagaatggctccatgaatgtcttgagaacctgatatatatgccaggcacctattttggcaggtggtgagttaacgatcttaagttctggaatcagacactcctgggttccggcccaagtgctaccaatttgtaactgtgtgatgctggagcattcacttaacagctctgaacctcagtctcttcatctttaaaatggaaataataacaatagctaacatttaaagagttcgtactaagtgctgggcactgtgttatgtgtgttaaccattttaaccttcccagttctggagagaatccttatttctattttatagataaggaaaccgaagcccagagaggttaagactttaggtcaagtaccttcagctagaaagagcagggaggcagtttggttccagagcctacgcacactcctaaccactaagttaaaagcacccacattgtgccctagaccactcctagctattaaccttgccctatccagagagaaaagaagggagccccgggctagattaaagagacttggttctagtggtgtatcttccctggcttcctctaaactctggagtaagtcattttccttgctggacttcactttccctctctgtgaaatggaaacagtcatcacaggcctgcctgtcttccagggctgttaggaggctcagatgacacccggtgtaagaattctcaagactaaggagcctggaccaagggtgagagctgaggaatcctggaccatcacccctgggacagccctgatttttctgtaccttggctaccacaggttctgctgaatgtcctgaccttgaaccggaacctgagtgacagcctggcccgcggccgcctacacccggacctgcagtccaacctcctgcaggtggacagtgagttcacagaggaagagattgagttcctggaagccaggggtcaccacgtggagaaagtagatgtcttatcctgggtccatggcagccgaaggaccaacaacttcatcatcgctgttaaggaccctcggagcccagatgcagctggagccaccatcctgtagagcagcggggtggggcggggtctctgctcccccactttgcatgttcccagagtccctccttctcccaggtttggtctcagggggaccccagggatgccccagatcaggggccagaggggatgcttagcaaacccaatcccagagtaactggaaaattctccatcaggaggcctgtggtggtggtggtggtggtggtggtgagtgtcagcatctacagtacagccaggcaggcaggaccttgaggaatcagactatctgtctgtgtgtcacctctcctccttcagccatgctggccccgagcttagggatgtgcttgcaaacccttctcaagggtctcacaaccccaacatcttcagactggcctgacctgggccttgtcttccagttcctttctcccattcccagcctcatttcttaaatgactaggaattttttaatggaccatcatagggagggggtgctcctcttttcccaccaggttgaggtgggggccttgcatcgggggtccccagggtatggggtaggggtgggggtgggcaccagctcaggggcttccatttgcaaagggaaattaaagaaagaatgttgcttaaacatg

SEQ ID NO: 336897 - DNA, 3488 bp, Homo sapiens
tcgctgcgctgctggggggcgcgggcgaggatggcggcggagaacgaggccagccaggagagcgccctgggcgcctactcgccagtggactacatgagcatcaccagcttcccgcggctgcccgaggacgagccggcgcccgcggccccgctgaggggccgcaaggacgaggacgcctttctgggagaccccgacaccgacccggactccttcctgaagtctgcacggctgcagcggctgccatcgtcgtcgtcggagatgggcagccaagacgggtcgccgctacgcgagacgcgcaaagacccgttctccgccgcagcggccgagtgctcctgccgccaggatgggctcacggtcatcgtcacggcctgtctcaccttcgctaccggtgtcaccgtggcgctggtcatgcagatctacttcggggacccccagatcttccagcagggtgccgtggtgaccgatgctgcccgctgcacttcactgggcatcgaggtgctcagtaaacagggatcttctgtggacgcagcggtggcagcagccttgtgtttgggtatcgtggctccacacagttctggcctgggcggtgggggcgtgatgctggtacatgacatccgacgaaatgagagccacctaattgatttccgggagtccgcaccaggggccctcagggaagagaccctgcaaagatcctgggagaccaagcctgggctcttggtgggggttcccggaatggtgaaggggctacatgaagctcaccagctctatggcaggctgccatggtcccaagtcctggcctttgcagcagctgtggcccaagatggcttcaacgtgactcatgatctagcccgtgccctggctgaacagctgcacccaacatgtccgagcgcttccgggagacgttcctgccatcgggccgcccgccactacctggctcgttgctgcatcggcccgacctggctgaggtgctggatgtacttggcacctccggcccggctgccttctacgcaggtggcaacctcacactggagatggtggccgaggctcagcacgcagggggtgtcataaccgaagaggacttcagcaattacagcgcccttgtggagaagcctgtgtgtggcgtgtacagaggccacctggttcttagtcccccacctccgcacacgggccctgccctcatcagtgctctcaacatcctggagggcttcaatctcaccagcctggtatcccgagaacaggctcttcactgggtggcagagaccctgaagattgcattagccctggccagcagactgggagatcccgtctatgattctaccatcactgagagcatggatgacatgctcagcaaggtggaggccgcctacctccggggccatatcaatgactcccaggcagcccctgccccactcctgcctgtctatgaactagacggagctcccacggctgcccaggtgctgatcatgggacctgatgacttcattgtggccatggttagctccctgaaccagccctttggcagcggccttatcaccccctcggggatcctgctcaacagccagatgctggacttctcctggcccaaccggacagctaaccactctgcacccagcctggagaattcagtgcagccagggaagcggccactctctttcctgctgcccacagtggtccgacccgcggaggggctctgtggaacctacctcgctctgggggccaatggagctgcgcggggcctcagcggcctgacacagcatctgaatagacaaccagccctctttagggtgggatttgaaaggaagggcctgcttttctccagaacacctcagaatggctccatgaatgtcttgagaacctgatatatatgccaggcacctattttggcaggtggtgagttaacgatcttaagttctggaatcagacactcctgggttccggcccaagtgctaccaatttgtaactgtgtgatgctggagcattcacttaacagctctgaacctcagtctcttcatctttaaaatggaaataataacaatagctaacatttaaagagttcgtactaagtgctgggcactgtgttatgtgtgttaaccattttaaccttcccagttctggagagaatccttatttctattttatagataaggaaaccgaagcccagagaggttaagactttaggtcaagtaccttcagctagaaagagcagggaggcagtttggttccagagcctacgcacactcctaaccactaagttaaaagcacccacattgtgccctagaccactcctagctattaaccttgccctatccagagagaaaagaagggagccccgggctagattaaagagacttggttctagtggtgtatcttccctggcttcctctaaactctggagtaagtcattttccttgctggacttcactttccctctctgtgaaatggaaacagtcatcacaggcctgcctgtcttccagggctgttaggaggctcagatgacacccggtgtaagaattctcaagactaaggagcctggaccaagggtgagagctgaggaatcctggaccatcacccctgggacagccctgatttttctgtaccttggctaccacaggttctgctgaatgtcctgaccttgaaccggaacctgagtgacagcctggcccgcggccgcctacacccggacctgcagtccaacctcctgcaggtggacagtgagttcacagaggaagagattgagttcctggaagccaggggtcaccacgtggagaaagtagatgtcttatcctgggtccatggcagccgaaggaccaacaacttcatcatcgctgttaaggaccctcggagcccagatgcagctggagccaccatcctgtagagcagcggggtggggcggggtctctgctcccccactttgcatgttcccagagtccctccttctcccaggtttggtctcagggggaccccagggatgccccagatcaggggccagaggggatgcttagcaaacccaatcccagagtaactggaaaattctccatcaggaggcctgtggtggtggtggtggtggtggtggtggtggtggtggtggtgagtgtcagcatctacagtacagccaggcaggcaggaccttgaggaatcagactatctgtctgtgtgtcacctctcctccttcagccatgctggccccgagcttagggatgtgcttgcaaacccttctcaagggtctcacaaccccaacatcttcagactggcctgacctgggccttgtcttccagttcctttctcccattcccagcctcatttcttaaatgactaggaattttttaatggaccatcatagggagggggtgctcctcttttcccaccaggttgaggtgggggccttgcatcgggggtccccagggtatggggtaggggtgggggtgggcaccagctcaggggcttccatttgcaaagggaaattaaagaaagaatgttgcttaaacatg

SEQ ID NO: 336898 - DNA, 5463 bp, Homo sapiens
tcgctgcgctgctggggggcgcgggcgaggatggcggcggagaacgaggccagccaggagagcgccctgggcgcctactcgccagtggactacatgagcatcaccagcttcccgcggctgcccgaggacgagccggcgcccgcggccccgctgaggggccgcaaggacgaggacgcctttctgggagaccccgacaccgacccggactccttcctgaagtctgcacggctgcagcggctgccatcgtcgtcgtcggagatgggcagccaagacgggtcgccgctacgcgagacgcgcaaagacccgttctccgccgcagcggccgagtgctcctgccgccaggatgggctcacggtcatcgtcacggcctgtctcaccttcgctaccggtgtcaccgtggcgctggtcatgcagatctacttcggggacccccagatcttccagcagggtgccgtggtgaccgatgctgcccgctgcacttcactgggcatcgaggtgctcagtaaacagggatcttctgtggacgcagcggtggcagcagccttgtgtttgggtatcgtggctccacacagttctggcctgggcggtgggggcgtgatgctggtacatgacatccgacgaaatgagagccacctaattgatttccgggagtccgcaccaggggccctcagggaagagaccctgcaaagatcctgggagaccaagccatccctggcttggggctctgcggagttcagcccagcaccccccttccagtgacctggtctcctctctccctcgcctacccgccttgcccagcctgggctcttggtgggggttcccggaatggtgaaggggctacatgaagctcaccagctctatggcaggctgccatggtcccaagtcctggcctttgcagcagctgtggcccaagatggcttcaacgtgactcatgatctagcccgtgccctggctgaacagctgcacccaacatgtccgagcgcttccgggagacgttcctgccatcgggccgcccgccactacctggctcgttgctgcatcggcccgacctggctgaggtgctggatgtacttggcacctccggcccggctgccttctacgcaggtggcaacctcacactggagatggtggccgaggctcagcacgcagggggtgtcataaccgaagaggacttcagcaattacagcgcccttgtggagaagcctgtgtgtggcgtgtacagaggtgacctctcccccggctcccagggtcccccctcaggagaagcctcccagtccatggccacatcgttttggcctagagactcctctccatttcacaggagagaaactaaggcagtgagctacctgggcagtcaactgttgaagcaaaccagagtcagcccaccttctgaaaagtagctgtggggtcagttaccccaagtatttaggatattggggggtggacctggtcaaagggtccaacctggaagttggggttctggccataggttttcttgatttgggctctgtgttgcctctgccctttccccagcagcgctgtcactgccctgtacttcctaagaatttttaagacaaagtccatccaagcttcacagtagaatgaacctttcaagacagtcatagacccagctcctcatagtgccaaaaagaaattgaggcccgaggagggaatataacaactggccaaactcaagaaaaccaacagggaacccagaaaaccaagcttatgacatgggtggggtccatgtttactgaacccaaggtggtaggtgctggatttctcagaagattctcaggttctttcccttctaggagagccagatcacatcaagccccaggaaagggtttctctgagttcaactttccaggcctcaatctccaacctgattcctctgccagaggcagtggaatatgaagcaatggaaagagcctatcagctgggtgcagtggctcaggcctataaccccagcacattgggaggctgaggcaggaggatcacttgagcccaggagttcatgaccagcctgggcaacatagtgagacaccgtctctataaaaaatttaaaaattacccaggcgtggtggtgtacctatagtcctagctactcaggaggttgagatgggaggattgcttgagcctgggaggtcaaggctgcagtaagcatgattgtgccactgcactacagcctgggtgacagagtgagaccattatcacacacacacacacacacacacacagaaaagaaaaaagaacaagcgtagcgttggagctaggaagacctgggtttgagtaccaactgtgccatttaccttgaacaagctacttcccactctgagccttggttccctccttaaaatggaaataataatagtgcctacatcttaggatgcccataaggatttgatgagatgatgtaggaagttgccctgatcagagcatgcactgaatatagattttccatttccccttcccagcctgggttgtctcaacaatgctagtaccttgagtgctctggattccccttgtctctctgtaccacagtttctggacctatcaaatatgtgtgataacagtagccacagtgaggactaaatgagttaatgttagtgttatgcatcagctattattcctttgatgtccaaacatctagtaacagaataggaagagaaggttgctgctgccaagaagtttggggctggatgagaccatcaggagtcatggataatatcctggcctatgggagagctaaaaggagacacatgacaggccaggaatatgaacatctggtcacctgtttctgctgtgctctgctgatagcctgcagtgtgactctgggcaagccacagccctcttgagccttagttttctcaaatggcagaggaaactgaagaccagtgttctgagttcaagtcctggccctgcccttgacttgccatgtgaacttgaatgagtctctttgcctctcaatgtttcagtttccccatctggtgagggagttcagcgcagtggtctcagtgtgtgatggtggaatgtggagatgggatgtgggatgtgaaggtgccttgacccctaccctgccatcagtcacttcctgtcctttcaggccacctggttcttagtcccccacctccgcacacgggccctgccctcatcagtgctctcaacatcctggagggcttcaatctcaccagcctggtatcccgagaacaggctcttcactgggtggcagagaccctgaagattgcattagccctggccagcagactgggagatcccgtctatgattctaccatcactgagagcatggatgacatgctcagcaaggtggaggccgcctacctccggggccatatcaatgactcccaggcagcccctgccccactcctgcctgtctatgaactagacggagctcccacggctgcccaggtgctgatcatgggacctgatgacttcattgtggccatggttagctccctgaaccagccctttggcagcggccttatcaccccctcggggatcctgctcaacagccagatgctggacttctcctggcccaaccggacagctaaccactctgcacccagcctggagaattcagtgcagccagggaagcggccactctctttcctgctgcccacagtggtccgacccgcggaggggctctgtggaacctacctcgctctgggggccaatggagctgcgcggggcctcagcggcctgacacagcatctgaatagacaaccagccctctttagggtgggatttgaaaggaagggcctgcttttctccagaacacctcagaatggctccatgaatgtcttgagaacctgatatatatgccaggcacctattttggcaggtggtgagttaacgatcttaagttctggaatcagacactcctgggttccggcccaagtgctaccaatttgtaactgtgtgatgctggagcattcacttaacagctctgaacctcagtctcttcatctttaaaatggaaataataacaatagctaacatttaaagagttcgtactaagtgctgggcactgtgttatgtgtgttaaccattttaaccttcccagttctggagagaatccttatttctattttatagataaggaaaccgaagcccagagaggttaagactttaggtcaagtaccttcagctagaaagagcagggaggcagtttggttccagagcctacgcacactcctaaccactaagttaaaagcacccacattgtgccctagaccactcctagctattaaccttgccctatccagagagaaaagaagggagccccgggctagattaaagagacttggttctagtggtgtatcttccctggcttcctctaaactctggagtaagtcattttccttgctggacttcactttccctctctgtgaaatggaaacagtcatcacaggcctgcctgtcttccagggctgttaggaggctcagatgacacccggtgtaagaattctcaagactaaggagcctggaccaagggtgagagctgaggaatcctggaccatcacccctgggacagccctgatttttctgtaccttggctaccacaggttctgctgaatgtcctgaccttgaaccggaacctgagtgacagcctggcccgcggccgcctacacccggacctgcagtccaacctcctgcaggtggacagtgagttcacagaggaagagattgagttcctggaagccaggggtcaccacgtggagaaagtagatgtcttatcctgggtccatggcagccgaaggaccaacaacttcatcatcgctgttaaggaccctcggagcccagatgcagctggagccaccatcctgtagagcagcggggtggggcggggtctctgctcccccactttgcatgttcccagagtccctccttctcccaggtttggtctcagggggaccccagggatgccccagatcaggggccagaggggatgcttagcaaacccaatcccagagtaactggaaaattctccatcaggaggcctgtggtggtggtggtggtggtggtggtggtggtggtggtggtgagtgtcagcatctacagtacagccaggcaggcaggaccttgaggaatcagactatctgtctgtgtgtcacctctcctccttcagccatgctggccccgagcttagggatgtgcttgcaaacccttctcaagggtctcacaaccccaacatcttcagactggcctgacctgggccttgtcttccagttcctttctcccattcccagcctcatttcttaaatgactaggaattttttaatggaccatcatagggagggggtgctcctcttttcccaccaggttgaggtgggggccttgcatcgggggtccccagggtatggggtaggggtgggggtgggcaccagctcaggggcttccatttgcaaagggaaattaaagaaagaatgttgcttaaacatg

SEQ ID NO: 336899 - DNA, 3733 bp, Homo sapiens
tcgctgcgctgctggggggcgcgggcgaggatggcggcggagaacgaggccagccaggagagcgccctgggcgcctactcgccagtggactacatgagcatcaccagcttcccgcggctgcccgaggacgagccggcgcccgcggccccgctgaggggccgcaaggacgaggacgcctttctgggagaccccgacaccgacccggactccttcctgaagtctgcacggctgcagcggctgccatcgtcgtcgtcggagatgggcagccaagacgggtcgccgctacgcgagacgcgcaaagacccgttctccgccgcagcggccgagtgctcctgccgccaggatgggctcacggtcatcgtcacggcctgtctcaccttcgctaccggtgtcaccgtggcgctggtcatgcagatctacttcggggacccccagatcttccagcagggtgccgtggtgaccgatgctgcccgctgcacttcactgggcatcgaggtgctcagtaaacagggatcttctgtggacgcagcggtggcagcagccttgtgtttgggtatcgtggctccacacagttctggcctgggcggtgggggcgtgatgctggtacatgacatccgacgaaatgagagccacctaattgatttccgggagtccgcaccaggggccctcagggaagagaccctgcaaagatcctgggagaccaagcctgggctcttggtgggggttcccggaatggtgaaggggctacatgaagctcaccagctctatggcaggctgccatggtcccaagtcctggcctttgcagcagctgtggcccaagatggcttcaacgtgactcatgatctagcccgtgccctggctgaacagctgcacccaacatgtccgagcgcttccgggagacgttcctgccatcgggccgcccgccactacctggctcgttgctgcatcggcccgacctggctgaggtgctggatgtacttggcacctccggcccggctgccttctacgcaggtggcaacctcacactggagatggtggccgaggctcagcacgcagggggtgtcataaccgaagaggacttcagcaattacagcgcccttgtggagaagcctgtgtgtggcgtgtacagaggtgacctctcccccggctcccagggtcccccctcaggagaagcctcccagtccatggccacatcgttttggcctagagactcctctccatttcacaggagagaaactaaggcagtgagctacctgggcagtcaactgttgaagcaaaccagagtcagcccaccttctgaaaagtagctgtggggtcagttaccccaagtatttaggatattggggggtggacctggtcaaagggtccaacctggaagttggggttctggccataggttttcttgatttgggctctgtgttgcctctgccctttccccagcagcgctgtcactgccctgtacttcctaagaatttttaagacaaagtccatccaagcttcacagtagaatgaacctttcaagacagtcatagacccagctcctcatagtgccaaaaagaaattgaggcccgaggagggaatataacaactggccaaactcaagaaaaccaacagggaacccagaaaaccaagcttatgacatgggtggggtccatgtttactgaacccaaggtggtaggtgctggatttctcagaagattctcaggttctttcccttctaggagagccagatcacatcaagccccaggaaagggtttctctgagttcaactttccaggcctcaatctccaacctgattcctctgccagaggcagtggaatatgaagcaatggaaagagcctatcagctgggtgcagtggctcaggcctataaccccagcacattgggaggctgaggcaggaggatcacttgagcccaggagttcatgaccagcctgggcaacatagtgagacaccgtctctataaaaaatttaaaaattacccaggcgtggtggtgtacctatagtcctagctactcaggaggttgagatgggaggattgcttgagcctgggaggtcaaggctgcagtaagcatgattgtgccactgcactacagcctgggtgacagagtgagaccattatcacacacacacacacacacacacacagaaaagaaaaaagaacaagcgtagcgttggagctaggaagacctgggtttgagtaccaactgtgccatttaccttgaacaagctacttcccactctgagccttggttccctccttaaaatggaaataataatagtgcctacatcttaggatgcccataaggatttgatgagatgatgtaggaagttgccctgatcagagcatgcactgaatatagattttccatttccccttcccagcctgggttgtctcaacaatgctagtaccttgagtgctctggattccccttgtctctctgtaccacagtttctggacctatcaaatatgtgtgataacagtagccacagtgaggactaaatgagttaatgttagtgttatgcatcagctattattcctttgatgtccaaacatctagtaacagaataggaagagaaggttgctgctgccaagaagtttggggctggatgagaccatcaggagtcatggataatatcctggcctatgggagagctaaaaggagacacatgacaggccaggaatatgaacatctggtcacctgtttctgctgtgctctgctgatagcctgcagtgtgactctgggcaagccacagccctcttgagccttagttttctcaaatggcagaggaaactgaagaccagtgttctgagttcaagtcctggccctgcccttgacttgccatgtgaacttgaatgagtctctttgcctctcaatgtttcagtttccccatctggtgagggagttcagcgcagtggtctcagtgtgtgatggtggaatgtggagatgggatgtgggatgtgaaggtgccttgacccctaccctgccatcagtcacttcctgtcctttcaggccacctggttcttagtcccccacctccgcacacgggccctgccctcatcagtgctctcaacatcctggagggcttcaatctcaccagcctggtatcccgagaacaggctcttcactgggtggcagagaccctgaagattgcattagccctggccagcagactgggagatcccgtctatgattctaccatcactgagagcatggatgacatgctcagcaaggtggaggccgcctacctccggggccatatcaatgactcccaggcagcccctgccccactcctgcctgtctatgaactagacggagctcccacggctgcccaggtgctgatcatgggacctgatgacttcattgtggccatggttagctccctgaaccagccctttggcagcggccttatcaccccctcggggatcctgctcaacagccagatgctggacttctcctggcccaaccggacagctaaccactctgcacccagcctggtaggatttgcttccctgctttcctggggaccctgaggcctataggtaggaggtgcaatggcatggctgcccctttctccctactttctccagaatcttctagtataaggaagcctaaagaagaggttcacctcatccctagccctgctaagtctgggacatggagcctggtgggtctgaagaacccttgtcccattctgtcactgtcttactgtgtgaccttgtgaagatcttg

SEQ ID NO: 336900 - DNA, 3519 bp, Homo sapiens
tcgctgcgctgctggggggcgcgggcgaggatggcggcggagaacgaggccagccaggagagcgccctgggcgcctactcgccagtggactacatgagcatcaccagcttcccgcggctgcccgaggacgagccggcgcccgcggccccgctgaggggccgcaaggacgaggacgcctttctgggagaccccgacaccgacccggactccttcctgaagtctgcacggctgcagcggctgccatcgtcgtcgtcggagatgggcagccaagacgggtcgccgctacgcgagacgcgcaaagacccgttctccgccgcagcggccgagtgctcctgccgccaggatgggctcacggtcatcgtcacggcctgtctcaccttcgctaccggtgtcaccgtggcgctggtcatgcagatctacttcggggacccccagatcttccagcagggtgccgtggtgaccgatgctgcccgctgcacttcactgggcatcgaggtgctcagtaaacagggatcttctgtggacgcagcggtggcagcagccttgtgtttgggtatcgtggctccacacagttctggcctgggcggtgggggcgtgatgctggtacatgacatccgacgaaatgagagccacctaattgatttccgggagtccgcaccaggggccctcagggaagagaccctgcaaagatcctgggagaccaagcctgggctcttggtgggggttcccggaatggtgaaggggctacatgaagctcaccagctctatggcaggctgccatggtcccaagtcctggcctttgcagcagctgtggcccaagatggcttcaacgtgactcatgatctagcccgtgccctggctgaacagctgcacccaacatgtccgagcgcttccgggagacgttcctgccatcgggccgcccgccactacctggctcgttgctgcatcggcccgacctggctgaggtgctggatgtacttggcacctccggcccggctgccttctacgcaggtggcaacctcacactggagatggtggccgaggctcagcacgcagggggtgtcataaccgaagaggacttcagcaattacagcgcccttgtggagaagcctgtgtgtggcgtgtacagaggtgacctctcccccggctcccagggtcccccctcaggagaagcctcccagtccatggccacatcgttttggcctagagactcctctccatttcacaggagagaaactaaggcagtgagctacctgggcagtcaactgttgaagcaaaccagagtcagcccaccttctgaaaagtagctgtggggtcagttaccccaagtatttaggatattggggggtggacctggtcaaagggtccaacctggaagttggggttctggccataggttttcttgatttgggctctgtgttgcctctgccctttccccagcagcgctgtcactgccctgtacttcctaagaatttttaagacaaagtccatccaagcttcacagtagaatgaacctttcaagacagtcatagacccagctcctcatagtgccaaaaagaaattgaggcccgaggagggaatataacaactggccaaactcaagaaaaccaacagggaacccagaaaaccaagcttatgacatgggtggggtccatgtttactgaacccaaggtggtaggtgctggatttctcagaagattctcaggttctttcccttctaggagagccagatcacatcaagccccaggaaagggtttctctgagttcaactttccaggcctcaatctccaacctgattcctctgccagaggcagtggaatatgaagcaatggaaagagcctatcagctgggtgcagtggctcaggcctataaccccagcacattgggaggctgaggcaggaggatcacttgagcccaggagttcatgaccagcctgggcaacatagtgagacaccgtctctataaaaaatttaaaaattacccaggcgtggtggtgtacctatagtcctagctactcaggaggttgagatgggaggattgcttgagcctgggaggtcaaggctgcagtaagcatgattgtgccactgcactacagcctgggtgacagagtgagaccattatcacacacacacacacacacacacacagaaaagaaaaaagaacaagcgtagcgttggagctaggaagacctgggtttgagtaccaactgtgccatttaccttgaacaagctacttcccactctgagccttggttccctccttaaaatggaaataataatagtgcctacatcttaggatgcccataaggatttgatgagatgatgtaggaagttgccctgatcagagcatgcactgaatatagattttccatttccccttcccagcctgggttgtctcaacaatgctagtaccttgagtgctctggattccccttgtctctctgtaccacagtttctggacctatcaaatatgtgtgataacagtagccacagtgaggactaaatgagttaatgttagtgttatgcatcagctattattcctttgatgtccaaacatctagtaacagaataggaagagaaggttgctgctgccaagaagtttggggctggatgagaccatcaggagtcatggataatatcctggcctatgggagagctaaaaggagacacatgacaggccaggaatatgaacatctggtcacctgtttctgctgtgctctgctgatagcctgcagtgtgactctgggcaagccacagccctcttgagccttagttttctcaaatggcagaggaaactgaagaccagtgttctgagttcaagtcctggccctgcccttgacttgccatgtgaacttgaatgagtctctttgcctctcaatgtttcagtttccccatctggtgagggagttcagcgcagtggtctcagtgtgtgatggtggaatgtggagatgggatgtgggatgtgaaggtgccttgacccctaccctgccatcagtcacttcctgtcctttcaggccacctggttcttagtcccccacctccgcacacgggccctgccctcatcagtgctctcaacatcctggagggcttcaatctcaccagcctggtatcccgagaacaggctcttcactgggtggcagagaccctgaagattgcattagccctggccagcagactgggagatcccgtctatgattctaccatcactgagagcatggatgacatgctcagcaaggtggaggccgcctacctccggggccatatcaatgactcccaggcagcccctgccccactcctgcctgtctatgaactagacggagctcccacggctgcccaggtgctgatcatgggacctgatgacttcattgtggccatggttagctccctgaaccagccctttggcagcggccttatcacccccgacttccagcaggaccggggggaccatttggaccagctgggccagcagctccaacggggcctgtgggaccaaccccgaaggtcatccgggtcggagctc

SEQ ID NO: 336901 - DNA, 2350 bp, Homo sapiens
  misc_feature (6)..(6): n is a, c, g, or t
atcggntaaccgttcgtacgagaatcgctgtcctctccttgctcgagatccattgtgctctaaaggcttcaatctcaccagcctggtatcccgagaacaggctcttcactgggtggcagagaccctgaagattgcattagccctggccagcagactgggagatcccgtctatgattctaccatcactgagagcatggatgacatgctcagcaaggtggaggccgcctacctccggggccatatcaatgactcccaggcagcccctgccccactcctgcctgtctatgaactagacggagctcccacggctgcccaggtgctgatcatgggacctgatgacttcattgtggccatggttagctccctgaaccagccctttggcagcggccttatcaccccctcggggatcctgctcaacagccagatgctggacttctcctggcccaaccggacagctaaccactctgcacccagcctggagaattcagtgcagccagggaagcggccactctctttcctgctgcccacagtggtccgacccgcggaggggctctgtggaacctacctcgctctgggggccaatggagctgcgcggggcctcagcggcctgacacagcatctgaatagacaaccagccctctttagggtgggatttgaaaggaagggcctgcttttctccagaacacctcagaatggctccatgaatgtcttgagaacctgatatatatgccaggcacctattttggcaggtggtgagttaacgatcttaagttctggaatcagacactcctgggttccggcccaagtgctaccaatttgtaactgtgtgatgctggagcattcacttaacagctctgaacctcagtctcttcatctttaaaatggaaataataacaatagctaacatttaaagagttcgtactaagtgctgggcactgtgttatgtgtgttaaccattttaaccttcccagttctggagagaatccttatttctattttatagataaggaaaccgaagcccagagaggttaagactttaggtcaagtaccttcagctagaaagagcagggaggcagtttggttccagagcctacgcacactcctaaccactaagttaaaagcacccacattgtgccctagaccactcctagctattaaccttgccctatccagagagaaaagaagggagccccgggctagattaaagagacttggttctagtggtgtatcttccctggcttcctctaaactctggagtaagtcattttccttgctggacttcactttccctctctgtgaaatggaaacagtcatcacaggcctgcctgtcttccagggctgttaggaggctcagatgacacccggtgtaagaattctcaagactaaggagcctggaccaagggtgagagctgaggaatcctggaccatcacccctgggacagccctgatttttctgtaccttggctaccacaggttctgctgaatgtcctgaccttgaaccggaacctgagtgacagcctggcccgcggccgcctacacccggacctgcagtccaacctcctgcaggtggacagtgagttcacagaggaagagattgagttcctggaagccaggggtcaccacgtggagaaagtagatgtcttatcctgggtccatggcagccgaaggaccaacaacttcatcatcgctgttaaggaccctcggagcccagatgcagctggagccaccatcctgtagagcagcggggtggggcggggtctctgctcccccactttgcatgttcccagagtccctccttctcccaggtttggtctcagggggaccccagggatgccccagatcaggggccagaggggatgcttagcaaacccaatcccagagtaactggaaaattctccatcaggaggcctgtggtggtggtggtggtggtggtggtggtggtggtggtggtgagtgtcagcatctacagtacagccaggcaggcaggaccttgaggaatcagactatctgtctgtgtgtcacctctcctccttcagccatgctggccccgagcttagggatgtgcttgcaaacccttctcaagggtctcacaaccccaacatcttcagactggcctgacctgggccttgtcttccagttcctttctcccattcccagcctcatttcttaaatgactaggaattttttaatggaccatcatagggagggggtgctcctcttttcccaccaggttgaggtgggggccttgcatcgggggtccccagggtatggggtaggggtgggggtgggcaccagctcaggggcttccatttgcaaagggaaattaaagaaagaatgttgcttaaacatg

SEQ ID NO: 336902 - DNA, 2173 bp, Homo sapiens
tcgctgcgctgctggggggcgcgggcgaggatggcggcggagaacgaggccagccaggagagcgccctgggcgcctactcgccagtggactacatgagcatcaccagcttcccgcggctgcccgaggacgagccggcgcccgcggccccgctgaggggccgcaaggacgaggacgcctttctgggagaccccgacaccgacccggactccttcctgaagtctgcacggctgcagcggctgccatcgtcgtcgtcggagatgggcagccaagacgggtcgccgctacgcgagacgcgcaaagacccgttctccgccgcagcggccgagtgctcctgccgccaggatgggctcacggtcatcgtcacggcctgtctcaccttcgctaccggtgtcaccgtggcgctggtcatgcagatctacttcggggacccccagatcttccagcagggtgccgtggtgaccgatgctgcccgctgcacttcactgggcatcgaggtgctcagtaaacagggatcttctgtggacgcagcggtggcagcagccttgtgtttgggtatcgtggctccacacagttctggcctgggcggtgggggcgtgatgctggtacatgacatccgacgaaatgagagccacctaattgatttccgggagtccgcaccaggggccctcagggaagagaccctgcaaagatcctgggagaccaagcctgggctcttggtgggggttcccggaatggtgaaggggctacatgaagctcaccagctctatggcaggctgccatggtcccaagtcctggcctttgcagcagctgtggcccaagatggcttcaacgtgactcatgatctagcccgtgccctggctgaacagctgcacccaacatgtccgagcgcttccgggagacgttcctgccatcgggccgcccgccactacctggctcgttgctgcatcggcccgacctggctgaggtgctggatgtacttggcacctccggcccggctgccttctacgcaggtggcaacctcacactggagatggtggccgaggctcagcacgcagggggtgtcataaccgaagaggacttcagcaattacagcgcccttgtggagaagcctgtgtgtggcgtgtacagaggtgacctctcccccggctcccagggtcccccctcaggagaagcctcccagtccatggccacatcgttttggcctagagactcctctccatttcacaggagagaaactaaggcagtgagctacctgggcagtcaactgttgaagcaaaccagagtcagcccaccttctgaaaagtagctgtggggtcagttaccccaagtatttaggatattggggggtggacctggtcaaagggtccaacctggaagttggggttctggccataggttttcttgatttgggctctgtgttgcctctgccctttccccagcagcgctgtcactgccctgtacttcctaagaatttttaagacaaagtccatccaagcttcacagtagaatgaacctttcaagacagtcatagacccagctcctcatagtgccaaaaagaaattgaggcccgaggagggaatataacaactggccaaactcaagaaaaccaacagggaacccagaaaaccaagcttatgacatgggtggggtccatgtttactgaacccaaggtggtaggtgctggatttctcagaagattctcaggttctttcccttctaggagagccagatcacatcaagccccaggaaagggtttctctgagttcaactttccaggcctcaatctccaacctgattcctctgccagaggcagtggaatatgaagcaatggaaagagcctatcagctgggtgcagtggctcaggcctataaccccagcacattgggaggctgaggcaggaggatcacttgagcccaggagttcatgaccagcctgggcaacatagtgagacaccgtctctataaaaaatttaaaaattacccaggcgtggtggtgtacctatagtcctagctactcaggaggttgagatgggaggattgcttgagcctgggaggtcaaggctgcagtaagcatgattgtgccactgcactacagcctgggtgacagagtgagaccattatcacacacacacacacacacacacacacacacacacacacacacacacacaca

SEQ ID NO: 336903 - DNA, 1904 bp, Homo sapiens
ggcaatgtggacatgggctgcgctgagtttcttagtgaaaatggagccctgatgctccctgtctttcccggttgcaggggaaatggcagggtcagtagattgaaaagtggggttagcatctgggtggcctgggttctgttaacctcaagtcccattatacctctacccagcatctgaatagacaaccagccctctttagggtgggatttgaaaggaagggcctgcttttctccagaacacctcagaatggctccatgaatgtcttgagaacctgatatatatgccaggcacctattttggcaggtggtgagttaacgatcttaagttctggaatcagacactcctgggttccggcccaagtgctaccaatttgtaactgtgtgatgctggagcattcacttaacagctctgaacctcagtctcttcatctttaaaatggaaataataacaatagctaacatttaaagagttcgtactaagtgctgggcactgtgttatgtgtgttaaccattttaaccttcccagttctggagagaatccttatttctattttatagataaggaaaccgaagcccagagaggttaagactttaggtcaagtaccttcagctagaaagagcagggaggcagtttggttccagagcctacgcacactcctaaccactaagttaaaagcacccacattgtgccctagaccactcctagctattaaccttgccctatccagagagaaaagaagggagccccgggctagattaaagagacttggttctagtggtgtatcttccctggcttcctctaaactctggagtaagtcattttccttgctggacttcactttccctctctgtgaaatggaaacagtcatcacaggcctgcctgtcttccagggctgttaggaggctcagatgacacccggtgtaagaattctcaagactaaggagcctggaccaagggtgagagctgaggaatcctggaccatcacccctgggacagccctgatttttctgtaccttggctaccacaggttctgctgaatgtcctgaccttgaaccggaacctgagtgacagcctggcccgcggccgcctacacccggacctgcagtccaacctcctgcaggtggacagtgagttcacagaggaagagattgagttcctggaagccaggggtcaccacgtggagaaagtagatgtcttatcctgggtccatggcagccgaaggaccaacaacttcatcatcgctgttaaggaccctcggagcccagatgcagctggagccaccatcctgtagagcagcggggtggggcggggtctctgctcccccactttgcatgttcccagagtccctccttctcccaggtttggtctcagggggaccccagggatgccccagatcaggggccagaggggatgcttagcaaacccaatcccagagtaactggaaaattctccatcaggaggcctgtggtggtggtggtggtggtggtggtggtggtggtggtggtgagtgtcagcatctacagtacagccaggcaggcaggaccttgaggaatcagactatctgtctgtgtgtcacctctcctccttcagccatgctggccccgagcttagggatgtgcttgcaaacccttctcaagggtctcacaaccccaacatcttcagactggcctgacctgggccttgtcttccagttcctttctcccattcccagcctcatttcttaaatgactaggaattttttaatggaccatcatagggagggggtgctcctcttttcccaccaggttgaggtgggggccttgcatcgggggtccccagggtatggggtaggggtgggggtgggcaccagctcaggggcttccatttgcaaagggaaattaaagaaagaatgttgcttaaacatg

SEQ ID NO: 336904 - DNA, 1487 bp, Homo sapiens
tcgctgcgctgctggggggcgcgggcgaggatggcggcggagaacgaggccagccaggagagcgccctgggcgcctactcgccagtggactacatgagcatcaccagcttcccgcggctgcccgaggacgagccggcgcccgcggccccgctgaggggccgcaaggacgaggacgcctttctgggagaccccgacaccgacccggactccttcctgaagtctgcacggctgcagcggctgccatcgtcgtcgtcggagatgggcagccaagacgggtcgccgctacgcgagacgcgcaaagacccgttctccgccgcagcggccgagtgctcctgccgccaggatgggctcacggtcatcgtcacggcctgtctcaccttcgctaccggtgtcaccgtggcgctggtcatgcagatctacttcggggacccccagatcttccagcagggtgccgtggtgaccgatgctgcccgctgcacttcactgggcatcgaggtgctcagtaaacagggatcttctgtggacgcagcggtggcagcagccttgtgtttgggtatcgtggctccacacagttctggcctgggcggtgggggcgtgatgctggtacatgacatccgacgaaatgagagccacctaattgatttccgggagtccgcaccaggggccctcagggaagagaccctgcaaagatcctgggagaccaaggtggggaccctggtgagaagagagagttcaggggagtctctcttcattgcccttctgctaacccaagcattaatttgctaagtatttaccaggggagtgggaaaaagagttgagcaggattctcttaggctatgagagagtcaggcagcccccaagataaaataatgaactagaaaatctggaaccttacttctctgggaatcttacctatctggcacgtgggaaggaagaaaaaaggctactgagtaccctgaaatgtcacgaagttgatgcaatgaaactcacacatctcactctgagccagttgactataactttcccagcccttgatatattggaagattagaggggaattgccagaagtaaaccaactgtctgctgaaagaaaaagaagatatcgaataacttggaaaaatgggtacttagtgcggtggcaaaagccaaacacacccctgagtcttcagagctcagagtaatggtggggtgaaactgaataggttaaatgaaggtcctttgtccaccgttttaaaaggtagggttgcctgggcacagtggctcacacctgtaatcccaacactctgggaagccaaggcaggaggattgcttgaggccaggagtttgagaccagcctgagtgacatagtgagactttgtctctacaaaaaatgctttgaaattagccaggcacagtagcatgcaccaaggatcgcttgacttgagcccaggagttggaggccacagtgagctatgactatgccactgtactccagcctgggtaacagg

SEQ ID NO: 336905 - DNA, 324 bp, Homo sapiens
gcggccgcctacacccggacctgcagtccaacctcctgcaggtggacagtgagtgcagagcagagacctcgtggggcgggcacagggacaggtagagaaaggactcctcccaagggtgcccatgcctcaaccagcaccaactgccagtgaagtttggttttatttggcaaatttctattggagcagtgaacgatctggggattggaaccagtcttgccatttcctggttgtgtggccttgggaaatccatgtctcaactctgagcctcagttttctcatttgtaaaataagacacagttgttcattcttcaaactttcatttac

SEQ ID NO: 336906 - DNA, 4516 bp, Homo sapiens
tcgctgcgctgctggggggcgcgggcgaggatggcggcggagaacgaggccagccaggagagcgccctgggcgcctactcgccagtggactacatgagcatcaccagcttcccgcggctgcccgaggacgagccggcgcccgcggccccgctgaggggccgcaaggacgaggacgcctttctgggagaccccgacaccgacccggactccttcctgaagtctgcacggctgcagcggctgccatcgtcgtcgtcggagatgggcagccaagacgggtcgccgctacgcgagacgcgcaaagacccgttctccgccgcagcggccgagtgctcctgccgccaggatgggctcacggtcatcgtcacggcctgtctcaccttcgctaccggtgtcaccgtggcgctggtcatgcagatctacttcggggacccccagatcttccagcagggtgccgtggtgaccgatgctgcccgctgcacttcactgggcatcgaggtgctcagtaaacagggatcttctgtggacgcagcggtggcagcagccttgtgtttgggtatcgtggctccacacagttctggcctgggcggtgggggcgtgatgctggtacatgacatccgacgaaatgagagccacctaattgatttccgggagtccgcaccaggggccctcagggaagagaccctgcaaagatcctgggagaccaagcctgggctcttggtgggggttcccggaatggtgaaggggctacatgaagctcaccagctctatggcaggctgccatggtcccaagtcctggcctttgcagcagctgtggcccaagatggcttcaacgtgactcatgatctagcccgtgccctggctgaacagctgcacccaacatgtccgagcgcttccgggagacgttcctgccatcgggccgcccgccactacctggctcgttgctgcatcggcccgacctggctgaggtgctggatgtacttggcacctccggcccggctgccttctacgcaggtggcaacctcacactggagatggtggccgaggctcagcacgcagggggtgtcataaccgaagaggacttcagcaattacagcgcccttgtggagaagcctgtgtgtggcgtgtacagaggtgacctctcccccggctcccagggtcccccctcaggagaagcctcccagtccatggccacatcgttttggcctagagactcctctccatttcacaggagagaaactaaggcagtgagctacctgggcagtcaactgttgaagcaaaccagagtcagcccaccttctgaaaagtagctgtggggtcagttaccccaagtatttaggatattggggggtggacctggtcaaagggtccaacctggaagttggggttctggccataggttttcttgatttgggctctgtgttgcctctgccctttccccagcagcgctgtcactgccctgtacttcctaagaatttttaagacaaagtccatccaagcttcacagtagaatgaacctttcaagacagtcatagacccagctcctcatagtgccaaaaagaaattgaggcccgaggagggaatataacaactggccaaactcaagaaaaccaacagggaacccagaaaaccaagcttatgacatgggtggggtccatgtttactgaacccaaggtggtaggtgctggatttctcagaagattctcaggttctttcccttctaggagagccagatcacatcaagccccaggaaagggtttctctgagttcaactttccaggcctcaatctccaacctgattcctctgccagaggcagtggaatatgaagcaatggaaagagcctatcagctgggtgcagtggctcaggcctataaccccagcacattgggaggctgaggcaggaggatcacttgagcccaggagttcatgaccagcctgggcaacatagtgagacaccgtctctataaaaaatttaaaaattacccaggcgtggtggtgtacctatagtcctagctactcaggaggttgagatgggaggattgcttgagcctgggaggtcaaggctgcagtaagcatgattgtgccactgcactacagcctgggtgacagagtgagaccattatcacacacacacacacacacacacacagaaaagaaaaaagaacaagcgtagcgttggagctaggaagacctgggtttgagtaccaactgtgccatttaccttgaacaagctacttcccactctgagccttggttccctccttaaaatggaaataataatagtgcctacatcttaggatgcccataaggatttgatgagatgatgtaggaagttgccctgatcagagcatgcactgaatatagattttccatttccccttcccagcctgggttgtctcaacaatgctagtaccttgagtgctctggattccccttgtctctctgtaccacagtttctggacctatcaaatatgtgtgataacagtagccacagtgaggactaaatgagttaatgttagtgttatgcatcagctattattcctttgatgtccaaacatctagtaacagaataggaagagaaggttgctgctgccaagaagtttggggctggatgagaccatcaggagtcatggataatatcctggcctatgggagagctaaaaggagacacatgacaggccaggaatatgaacatctggtcacctgtttctgctgtgctctgctgatagcctgcagtgtgactctgggcaagccacagccctcttgagccttagttttctcaaatggcagaggaaactgaagaccagtgttctgagttcaagtcctggccctgcccttgacttgccatgtgaacttgaatgagtctctttgcctctcaatgtttcagtttccccatctggtgagggagttcagcgcagtggtctcagtgtgtgatggtggaatgtggagatgggatgtgggatgtgaaggtgccttgacccctaccctgccatcagtcacttcctgtcctttcaggccacctggttcttagtcccccacctccgcacacgggccctgccctcatcagtgctctcaacatcctggagggcttcaatctcaccagcctggtatcccgagaacaggctcttcactgggtggcagagaccctgaagattgcattagccctggccagcagactgggagatcccgtctatgattctaccatcactgagagcatggatgacatgctcagcaaggtggaggccgcctacctccggggccatatcaatgactcccaggcagcccctgccccactcctgcctgtctatgaactagacggagctcccacggctgcccaggtgctgatcatgggacctgatgacttcattgtggccatggttagctccctgaaccagccctttggcagcggccttatcaccccctcggggatcctgctcaacagccagatgctggacttctcctggcccaaccggacagctaaccactctgcacccagcctggagaattcagtgcagccagggaagcggccactctctttcctgctgcccacagtggtccgacccgcggaggggctctgtggaacctacctcgctctgggggccaatggagctgcgcggggcctcagcggcctgacacagcaggttctgctgaatgtcctgaccttgaaccggaacctgagtgacagcctggcccgcggccgcctacacccggacctgcagtccaacctcctgcaggtggacagtgagttcacagaggaagagattgagttcctggaagccaggggtcaccacgtggagaaagtagatgtcttatcctgggtccatggcagccgaaggaccaacaacttcatcatcgctgttaaggaccctcggagcccagatgcagctggagccaccatcctgtagagcagcggggtggggcggggtctctgctcccccactttgcatgttcccagagtccctccttctcccaggtttggtctcagggggaccccagggatgccccagatcaggggccagaggggatgcttagcaaacccaatcccagagtaactggaaaattctccatcaggaggcctgtggtggtggtggtggtggtggtggtggtggtggtggtggtgagtgtcagcatctacagtacagccaggcaggcaggaccttgaggaatcagactatctgtctgtgtgtcacctctcctccttcagccatgctggccccgagcttagggatgtgcttgcaaacccttctcaagggtctcacaaccccaacatcttcagactggcctgacctgggccttgtcttccagttcctttctcccattcccagcctcatttcttaaatgactaggaattttttaatggaccatcatagggagggggtgctcctcttttcccaccaggttgaggtgggggccttgcatcgggggtccccagggtatggggtaggggtgggggtgggcaccagctcaggggcttccatttgcaaagggaaattaaagaaagaatgttgcttaaacatg

SEQ ID NO: 336907 - DNA, 4652 bp, Homo sapiens
tcgctgcgctgctggggggcgcgggcgaggatggcggcggagaacgaggccagccaggagagcgccctgggcgcctactcgccagtggactacatgagcatcaccagcttcccgcggctgcccgaggacgagccggcgcccgcggccccgctgaggggccgcaaggacgaggacgcctttctgggagaccccgacaccgacccggactccttcctgaagtctgcacggctgcagcggctgccatcgtcgtcgtcggagatgggcagccaagacgggtcgccgctacgcgagacgcgcaaagacccgttctccgccgcagcggccgagtgctcctgccgccaggatgggctcacggtcatcgtcacggcctgtctcaccttcgctaccggtgtcaccgtggcgctggtcatgcagatctacttcggggacccccagatcttccagcagggtgccgtggtgaccgatgctgcccgctgcacttcactgggcatcgaggtgctcagtaaacagggatcttctgtggacgcagcggtggcagcagccttgtgtttgggtatcgtggctccacacagttctggcctgggcggtgggggcgtgatgctggtacatgacatccgacgaaatgagagccacctaattgatttccgggagtccgcaccaggggccctcagggaagagaccctgcaaagatcctgggagaccaagcctgggctcttggtgggggttcccggaatggtgaaggggctacatgaagctcaccagctctatggcaggctgccatggtcccaagtcctggcctttgcagcagctgtggcccaagatggcttcaacgtgactcatgatctagcccgtgccctggctgaacagctgcacccaacatgtccgagcgcttccgggagacgttcctgccatcgggccgcccgccactacctggctcgttgctgcatcggcccgacctggctgaggtgctggatgtacttggcacctccggcccggctgccttctacgcaggtggcaacctcacactggagatggtggccgaggctcagcacgcagggggtgtcataaccgaagaggacttcagcaattacagcgcccttgtggagaagcctgtgtgtggcgtgtacagaggtgacctctcccccggctcccagggtcccccctcaggagaagcctcccagtccatggccacatcgttttggcctagagactcctctccatttcacaggagagaaactaaggcagtgagctacctgggcagtcaactgttgaagcaaaccagagtcagcccaccttctgaaaagtagctgtggggtcagttaccccaagtatttaggatattggggggtggacctggtcaaagggtccaacctggaagttggggttctggccataggttttcttgatttgggctctgtgttgcctctgccctttccccagcagcgctgtcactgccctgtacttcctaagaatttttaagacaaagtccatccaagcttcacagtagaatgaacctttcaagacagtcatagacccagctcctcatagtgccaaaaagaaattgaggcccgaggagggaatataacaactggccaaactcaagaaaaccaacagggaacccagaaaaccaagcttatgacatgggtggggtccatgtttactgaacccaaggtggtaggtgctggatttctcagaagattctcaggttctttcccttctaggagagccagatcacatcaagccccaggaaagggtttctctgagttcaactttccaggcctcaatctccaacctgattcctctgccagaggcagtggaatatgaagcaatggaaagagcctatcagctgggtgcagtggctcaggcctataaccccagcacattgggaggctgaggcaggaggatcacttgagcccaggagttcatgaccagcctgggcaacatagtgagacaccgtctctataaaaaatttaaaaattacccaggcgtggtggtgtacctatagtcctagctactcaggaggttgagatgggaggattgcttgagcctgggaggtcaaggctgcagtaagcatgattgtgccactgcactacagcctgggtgacagagtgagaccattatcacacacacacacacacacacacacagaaaagaaaaaagaacaagcgtagcgttggagctaggaagacctgggtttgagtaccaactgtgccatttaccttgaacaagctacttcccactctgagccttggttccctccttaaaatggaaataataatagtgcctacatcttaggatgcccataaggatttgatgagatgatgtaggaagttgccctgatcagagcatgcactgaatatagattttccatttccccttcccagcctgggttgtctcaacaatgctagtaccttgagtgctctggattccccttgtctctctgtaccacagtttctggacctatcaaatatgtgtgataacagtagccacagtgaggactaaatgagttaatgttagtgttatgcatcagctattattcctttgatgtccaaacatctagtaacagaataggaagagaaggttgctgctgccaagaagtttggggctggatgagaccatcaggagtcatggataatatcctggcctatgggagagctaaaaggagacacatgacaggccaggaatatgaacatctggtcacctgtttctgctgtgctctgctgatagcctgcagtgtgactctgggcaagccacagccctcttgagccttagttttctcaaatggcagaggaaactgaagaccagtgttctgagttcaagtcctggccctgcccttgacttgccatgtgaacttgaatgagtctctttgcctctcaatgtttcagtttccccatctggtgagggagttcagcgcagtggtctcagtgtgtgatggtggaatgtggagatgggatgtgggatgtgaaggtgccttgacccctaccctgccatcagtcacttcctgtcctttcaggccacctggttcttagtcccccacctccgcacacgggccctgccctcatcagtgctctcaacatcctggagggcttcaatctcaccagcctggtatcccgagaacaggctcttcactgggtggcagagaccctgaagattgcattagccctggccagcagactgggagatcccgtctatgattctaccatcactgagagcatggatgacatgctcagcaaggtggaggccgcctacctccggggccatatcaatgactcccaggcagcccctgccccactcctgcctgtctatgaactagacggagctcccacggctgcccaggtgctgatcatgggacctgatgacttcattgtggccatggttagctccctgaaccagccctttggcagcggccttatcaccccctcggggatcctgctcaacagccagatgctggacttctcctggcccaaccggacagctaaccactctgcacccagcctggagaattcagtgcagccagggaagcggccactctctttcctgctgcccacagtggtccgacccgcggaggggctctgtggaacctacctcgctctgggggccaatggagctgcgcggggcctcagcggcctgacacagcatctgaatagacaaccagccctctttagggtgggatttgaaaggaagggcctgcttttctccagaacacctcagaatggctccatgaatgtcttgagaacctgatatatatgccaggcacctattttggcaggtgcaggttctgctgaatgtcctgaccttgaaccggaacctgagtgacagcctggcccgcggccgcctacacccggacctgcagtccaacctcctgcaggtggacagtgagttcacagaggaagagattgagttcctggaagccaggggtcaccacgtggagaaagtagatgtcttatcctgggtccatggcagccgaaggaccaacaacttcatcatcgctgttaaggaccctcggagcccagatgcagctggagccaccatcctgtagagcagcggggtggggcggggtctctgctcccccactttgcatgttcccagagtccctccttctcccaggtttggtctcagggggaccccagggatgccccagatcaggggccagaggggatgcttagcaaacccaatcccagagtaactggaaaattctccatcaggaggcctgtggtggtggtggtggtggtggtggtggtggtggtggtggtgagtgtcagcatctacagtacagccaggcaggcaggaccttgaggaatcagactatctgtctgtgtgtcacctctcctccttcagccatgctggccccgagcttagggatgtgcttgcaaacccttctcaagggtctcacaaccccaacatcttcagactggcctgacctgggccttgtcttccagttcctttctcccattcccagcctcatttcttaaatgactaggaattttttaatggaccatcatagggagggggtgctcctcttttcccaccaggttgaggtgggggccttgcatcgggggtccccagggtatggggtaggggtgggggtgggcaccagctcaggggcttccatttgcaaagggaaattaaagaaagaatgttgcttaaacatg

SEQ ID NO: 336908 - DNA, 5062 bp, Homo sapiens
tcgctgcgctgctggggggcgcgggcgaggatggcggcggagaacgaggccagccaggagagcgccctgggcgcctactcgccagtggactacatgagcatcaccagcttcccgcggctgcccgaggacgagccggcgcccgcggccccgctgaggggccgcaaggacgaggacgcctttctgggagaccccgacaccgacccggactccttcctgaagtctgcacggctgcagcggctgccatcgtcgtcgtcggagatgggcagccaagacgggtcgccgctacgcgagacgcgcaaagacccgttctccgccgcagcggccgagtgctcctgccgccaggatgggctcacggtcatcgtcacggcctgtctcaccttcgctaccggtgtcaccgtggcgctggtcatgcagatctacttcggggacccccagatcttccagcagggtgccgtggtgaccgatgctgcccgctgcacttcactgggcatcgaggtgctcagtaaacagggatcttctgtggacgcagcggtggcagcagccttgtgtttgggtatcgtggctccacacagttctggcctgggcggtgggggcgtgatgctggtacatgacatccgacgaaatgagagccacctaattgatttccgggagtccgcaccaggggccctcagggaagagaccctgcaaagatcctgggagaccaagcctgggctcttggtgggggttcccggaatggtgaaggggctacatgaagctcaccagctctatggcaggctgccatggtcccaagtcctggcctttgcagcagctgtggcccaagatggcttcaacgtgactcatgatctagcccgtgccctggctgaacagctgcacccaacatgtccgagcgcttccgggagacgttcctgccatcgggccgcccgccactacctggctcgttgctgcatcggcccgacctggctgaggtgctggatgtacttggcacctccggcccggctgccttctacgcaggtggcaacctcacactggagatggtggccgaggctcagcacgcagggggtgtcataaccgaagaggacttcagcaattacagcgcccttgtggagaagcctgtgtgtggcgtgtacagaggtgacctctcccccggctcccagggtcccccctcaggagaagcctcccagtccatggccacatcgttttggcctagagactcctctccatttcacaggagagaaactaaggcagtgagctacctgggcagtcaactgttgaagcaaaccagagtcagcccaccttctgaaaagtagctgtggggtcagttaccccaagtatttaggatattggggggtggacctggtcaaagggtccaacctggaagttggggttctggccataggttttcttgatttgggctctgtgttgcctctgccctttccccagcagcgctgtcactgccctgtacttcctaagaatttttaagacaaagtccatccaagcttcacagtagaatgaacctttcaagacagtcatagacccagctcctcatagtgccaaaaagaaattgaggcccgaggagggaatataacaactggccaaactcaagaaaaccaacagggaacccagaaaaccaagcttatgacatgggtggggtccatgtttactgaacccaaggtggtaggtgctggatttctcagaagattctcaggttctttcccttctaggagagccagatcacatcaagccccaggaaagggtttctctgagttcaactttccaggcctcaatctccaacctgattcctctgccagaggcagtggaatatgaagcaatggaaagagcctatcagctgggtgcagtggctcaggcctataaccccagcacattgggaggctgaggcaggaggatcacttgagcccaggagttcatgaccagcctgggcaacatagtgagacaccgtctctataaaaaatttaaaaattacccaggcgtggtggtgtacctatagtcctagctactcaggaggttgagatgggaggattgcttgagcctgggaggtcaaggctgcagtaagcatgattgtgccactgcactacagcctgggtgacagagtgagaccattatcacacacacacacacacacacacacagaaaagaaaaaagaacaagcgtagcgttggagctaggaagacctgggtttgagtaccaactgtgccatttaccttgaacaagctacttcccactctgagccttggttccctccttaaaatggaaataataatagtgcctacatcttaggatgcccataaggatttgatgagatgatgtaggaagttgccctgatcagagcatgcactgaatatagattttccatttccccttcccagcctgggttgtctcaacaatgctagtaccttgagtgctctggattccccttgtctctctgtaccacagtttctggacctatcaaatatgtgtgataacagtagccacagtgaggactaaatgagttaatgttagtgttatgcatcagctattattcctttgatgtccaaacatctagtaacagaataggaagagaaggttgctgctgccaagaagtttggggctggatgagaccatcaggagtcatggataatatcctggcctatgggagagctaaaaggagacacatgacaggccaggaatatgaacatctggtcacctgtttctgctgtgctctgctgatagcctgcagtgtgactctgggcaagccacagccctcttgagccttagttttctcaaatggcagaggaaactgaagaccagtgttctgagttcaagtcctggccctgcccttgacttgccatgtgaacttgaatgagtctctttgcctctcaatgtttcagtttccccatctggtgagggagttcagcgcagtggtctcagtgtgtgatggtggaatgtggagatgggatgtgggatgtgaaggtgccttgacccctaccctgccatcagtcacttcctgtcctttcaggccacctggttcttagtcccccacctccgcacacgggccctgccctcatcagtgctctcaacatcctggagggcttcaatctcaccagcctggtatcccgagaacaggctcttcactgggtggcagagaccctgaagattgcattagccctggccagcagactgggagatcccgtctatgattctaccatcactgagagcatggatgacatgctcagcaaggtggaggccgcctacctccggggccatatcaatgactcccaggcagcccctgccccactcctgcctgtctatgaactagacggagctcccacggctgcccaggtgctgatcatgggacctgatgacttcattgtggccatggttagctccctgaaccagccctttggcagcggccttatcaccccctcggggatcctgctcaacagccagatgctggacttctcctggcccaaccggacagctaaccactctgcacccagcctggagaattcagtgcagccagggaagcggccactctctttcctgctgcccacagtggtccgacccgcggaggggctctgtggaacctacctcgctctgggggccaatggagctgcgcggggcctcagcggcctgacacagcatctgaatagacaaccagccctctttagggtgggatttgaaaggaagggcctgcttttctccagaacacctcagaatggctccatgaatgtcttgagaacctgatatatatgccaggcacctattttggcaggtggtgagttaacgatcttaagttctggaatcagacactcctgggttccggcccaagtgctaccaatttgtaactgtgtgatgctggagcattcacttaacagctctgaacctcagtctcttcatctttaaaatggaaataataacaatagctaacatttaaagagttcgtactaagtgctgggcactgtgttatgtgtgttaaccattttaaccttcccagttctggagagaatccttatttctattttatagataaggaaaccgaagcccagagaggttaagactttaggtcaagtaccttcagctagaaagagcagggaggcagtttggttccagagcctacgcacactcctaaccactaagttaaaagcacccacattgtgccctagaccactcctagctattaaccttcaggttctgctgaatgtcctgaccttgaaccggaacctgagtgacagcctggcccgcggccgcctacacccggacctgcagtccaacctcctgcaggtggacagtgagttcacagaggaagagattgagttcctggaagccaggggtcaccacgtggagaaagtagatgtcttatcctgggtccatggcagccgaaggaccaacaacttcatcatcgctgttaaggaccctcggagcccagatgcagctggagccaccatcctgtagagcagcggggtggggcggggtctctgctcccccactttgcatgttcccagagtccctccttctcccaggtttggtctcagggggaccccagggatgccccagatcaggggccagaggggatgcttagcaaacccaatcccagagtaactggaaaattctccatcaggaggcctgtggtggtggtggtggtggtggtggtggtggtggtggtggtgagtgtcagcatctacagtacagccaggcaggcaggaccttgaggaatcagactatctgtctgtgtgtcacctctcctccttcagccatgctggccccgagcttagggatgtgcttgcaaacccttctcaagggtctcacaaccccaacatcttcagactggcctgacctgggccttgtcttccagttcctttctcccattcccagcctcatttcttaaatgactaggaattttttaatggaccatcatagggagggggtgctcctcttttcccaccaggttgaggtgggggccttgcatcgggggtccccagggtatggggtaggggtgggggtgggcaccagctcaggggcttccatttgcaaagggaaattaaagaaagaatgttgcttaaacatg

SEQ ID NO: 336909 - DNA, 5298 bp, Homo sapiens
tcgctgcgctgctggggggcgcgggcgaggatggcggcggagaacgaggccagccaggagagcgccctgggcgcctactcgccagtggactacatgagcatcaccagcttcccgcggctgcccgaggacgagccggcgcccgcggccccgctgaggggccgcaaggacgaggacgcctttctgggagaccccgacaccgacccggactccttcctgaagtctgcacggctgcagcggctgccatcgtcgtcgtcggagatgggcagccaagacgggtcgccgctacgcgagacgcgcaaagacccgttctccgccgcagcggccgagtgctcctgccgccaggatgggctcacggtcatcgtcacggcctgtctcaccttcgctaccggtgtcaccgtggcgctggtcatgcagatctacttcggggacccccagatcttccagcagggtgccgtggtgaccgatgctgcccgctgcacttcactgggcatcgaggtgctcagtaaacagggatcttctgtggacgcagcggtggcagcagccttgtgtttgggtatcgtggctccacacagttctggcctgggcggtgggggcgtgatgctggtacatgacatccgacgaaatgagagccacctaattgatttccgggagtccgcaccaggggccctcagggaagagaccctgcaaagatcctgggagaccaagcctgggctcttggtgggggttcccggaatggtgaaggggctacatgaagctcaccagctctatggcaggctgccatggtcccaagtcctggcctttgcagcagctgtggcccaagatggcttcaacgtgactcatgatctagcccgtgccctggctgaacagctgcacccaacatgtccgagcgcttccgggagacgttcctgccatcgggccgcccgccactacctggctcgttgctgcatcggcccgacctggctgaggtgctggatgtacttggcacctccggcccggctgccttctacgcaggtggcaacctcacactggagatggtggccgaggctcagcacgcagggggtgtcataaccgaagaggacttcagcaattacagcgcccttgtggagaagcctgtgtgtggcgtgtacagaggtgacctctcccccggctcccagggtcccccctcaggagaagcctcccagtccatggccacatcgttttggcctagagactcctctccatttcacaggagagaaactaaggcagtgagctacctgggcagtcaactgttgaagcaaaccagagtcagcccaccttctgaaaagtagctgtggggtcagttaccccaagtatttaggatattggggggtggacctggtcaaagggtccaacctggaagttggggttctggccataggttttcttgatttgggctctgtgttgcctctgccctttccccagcagcgctgtcactgccctgtacttcctaagaatttttaagacaaagtccatccaagcttcacagtagaatgaacctttcaagacagtcatagacccagctcctcatagtgccaaaaagaaattgaggcccgaggagggaatataacaactggccaaactcaagaaaaccaacagggaacccagaaaaccaagcttatgacatgggtggggtccatgtttactgaacccaaggtggtaggtgctggatttctcagaagattctcaggttctttcccttctaggagagccagatcacatcaagccccaggaaagggtttctctgagttcaactttccaggcctcaatctccaacctgattcctctgccagaggcagtggaatatgaagcaatggaaagagcctatcagctgggtgcagtggctcaggcctataaccccagcacattgggaggctgaggcaggaggatcacttgagcccaggagttcatgaccagcctgggcaacatagtgagacaccgtctctataaaaaatttaaaaattacccaggcgtggtggtgtacctatagtcctagctactcaggaggttgagatgggaggattgcttgagcctgggaggtcaaggctgcagtaagcatgattgtgccactgcactacagcctgggtgacagagtgagaccattatcacacacacacacacacacacacacagaaaagaaaaaagaacaagcgtagcgttggagctaggaagacctgggtttgagtaccaactgtgccatttaccttgaacaagctacttcccactctgagccttggttccctccttaaaatggaaataataatagtgcctacatcttaggatgcccataaggatttgatgagatgatgtaggaagttgccctgatcagagcatgcactgaatatagattttccatttccccttcccagcctgggttgtctcaacaatgctagtaccttgagtgctctggattccccttgtctctctgtaccacagtttctggacctatcaaatatgtgtgataacagtagccacagtgaggactaaatgagttaatgttagtgttatgcatcagctattattcctttgatgtccaaacatctagtaacagaataggaagagaaggttgctgctgccaagaagtttggggctggatgagaccatcaggagtcatggataatatcctggcctatgggagagctaaaaggagacacatgacaggccaggaatatgaacatctggtcacctgtttctgctgtgctctgctgatagcctgcagtgtgactctgggcaagccacagccctcttgagccttagttttctcaaatggcagaggaaactgaagaccagtgttctgagttcaagtcctggccctgcccttgacttgccatgtgaacttgaatgagtctctttgcctctcaatgtttcagtttccccatctggtgagggagttcagcgcagtggtctcagtgtgtgatggtggaatgtggagatgggatgtgggatgtgaaggtgccttgacccctaccctgccatcagtcacttcctgtcctttcaggccacctggttcttagtcccccacctccgcacacgggccctgccctcatcagtgctctcaacatcctggagggcttcaatctcaccagcctggtatcccgagaacaggctcttcactgggtggcagagaccctgaagattgcattagccctggccagcagactgggagatcccgtctatgattctaccatcactgagagcatggatgacatgctcagcaaggtggaggccgcctacctccggggccatatcaatgactcccaggcagcccctgccccactcctgcctgtctatgaactagacggagctcccacggctgcccaggtgctgatcatgggacctgatgacttcattgtggccatggttagctccctgaaccagccctttggcagcggccttatcaccccctcggggatcctgctcaacagccagatgctggacttctcctggcccaaccggacagctaaccactctgcacccagcctggagaattcagtgcagccagggaagcggccactctctttcctgctgcccacagtggtccgacccgcggaggggctctgtggaacctacctcgctctgggggccaatggagctgcgcggggcctcagcggcctgacacagcatctgaatagacaaccagccctctttagggtgggatttgaaaggaagggcctgcttttctccagaacacctcagaatggctccatgaatgtcttgagaacctgatatatatgccaggcacctattttggcaggtggtgagttaacgatcttaagttctggaatcagacactcctgggttccggcccaagtgctaccaatttgtaactgtgtgatgctggagcattcacttaacagctctgaacctcagtctcttcatctttaaaatggaaataataacaatagctaacatttaaagagttcgtactaagtgctgggcactgtgttatgtgtgttaaccattttaaccttcccagttctggagagaatccttatttctattttatagataaggaaaccgaagcccagagaggttaagactttaggtcaagtaccttcagctagaaagagcagggaggcagtttggttccagagcctacgcacactcctaaccactaagttaaaagcacccacattgtgccctagaccactcctagctattaaccttctggcttcctctaaactctggagtaagtcattttccttgctggacttcactttccctctctgtgaaatggaaacagtcatcacaggcctgcctgtcttccagggctgttaggaggctcagatgacacccggtgtaagaattctcaagactaaggagcctggaccaagggtgagagctgaggaatcctggaccatcacccctgggacagccctgatttttctgtaccttggctaccacaggttctgctgaatgtcctgaccttgaaccggaacctgagtgacagcctggcccgcggccgcctacacccggacctgcagtccaacctcctgcaggtggacagtgagttcacagaggaagagattgagttcctggaagccaggggtcaccacgtggagaaagtagatgtcttatcctgggtccatggcagccgaaggaccaacaacttcatcatcgctgttaaggaccctcggagcccagatgcagctggagccaccatcctgtagagcagcggggtggggcggggtctctgctcccccactttgcatgttcccagagtccctccttctcccaggtttggtctcagggggaccccagggatgccccagatcaggggccagaggggatgcttagcaaacccaatcccagagtaactggaaaattctccatcaggaggcctgtggtggtggtggtggtggtggtggtggtggtggtggtggtgagtgtcagcatctacagtacagccaggcaggcaggaccttgaggaatcagactatctgtctgtgtgtcacctctcctccttcagccatgctggccccgagcttagggatgtgcttgcaaacccttctcaagggtctcacaaccccaacatcttcagactggcctgacctgggccttgtcttccagttcctttctcccattcccagcctcatttcttaaatgactaggaattttttaatggaccatcatagggagggggtgctcctcttttcccaccaggttgaggtgggggccttgcatcgggggtccccagggtatggggtaggggtgggggtgggcaccagctcaggggcttccatttgcaaagggaaattaaagaaagaatgttgcttaaacatg

SEQ ID NO: 336910 - DNA, 4650 bp, Homo sapiens
tcgctgcgctgctggggggcgcgggcgaggatggcggcggagaacgaggccagccaggagagcgccctgggcgcctactcgccagtggactacatgagcatcaccagcttcccgcggctgcccgaggacgagccggcgcccgcggccccgctgaggggccgcaaggacgaggacgcctttctgggagaccccgacaccgacccggactccttcctgaagtctgcacggctgcagcggctgccatcgtcgtcgtcggagatgggcagccaagacgggtcgccgctacgcgagacgcgcaaagacccgttctccgccgcagcggccgagtgctcctgccgccaggatgggctcacggtcatcgtcacggcctgtctcaccttcgctaccggtgtcaccgtggcgctggtcatgcagatctacttcggggacccccagatcttccagcagggtgccgtggtgaccgatgctgcccgctgcacttcactgggcatcgaggtgctcagtaaacagggatcttctgtggacgcagcggtggcagcagccttgtgtttgggtatcgtggctccacacagttctggcctgggcggtgggggcgtgatgctggtacatgacatccgacgaaatgagagccacctaattgatttccgggagtccgcaccaggggccctcagggaagagaccctgcaaagatcctgggagaccaagcctgggctcttggtgggggttcccggaatggtgaaggggctacatgaagctcaccagctctatggcaggctgccatggtcccaagtcctggcctttgcagcagctgtggcccaagatggcttcaacgtgactcatgatctagcccgtgccctggctgaacagctgcacccaacatgtccgagcgcttccgggagacgttcctgccatcgggccgcccgccactacctggctcgttgctgcatcggcccgacctggctgaggtgctggatgtacttggcacctccggcccggctgccttctacgcaggtggcaacctcacactggagatggtggccgaggctcagcacgcagggggtgtcataaccgaagaggacttcagcaattacagcgcccttgtggagaagcctgtgtgtggcgtgtacagaggtgacctctcccccggctcccagggtcccccctcaggagaagcctcccagtccatggccacatcgttttggcctagagactcctctccatttcacaggagagaaactaaggcagtgagctacctgggcagtcaactgttgaagcaaaccagagtcagcccaccttctgaaaagtagctgtggggtcagttaccccaagtatttaggatattggggggtggacctggtcaaagggtccaacctggaagttggggttctggccataggttttcttgatttgggctctgtgttgcctctgccctttccccagcagcgctgtcactgccctgtacttcctaagaatttttaagacaaagtccatccaagcttcacagtagaatgaacctttcaagacagtcatagacccagctcctcatagtgccaaaaagaaattgaggcccgaggagggaatataacaactggccaaactcaagaaaaccaacagggaacccagaaaaccaagcttatgacatgggtggggtccatgtttactgaacccaaggtggtaggtgctggatttctcagaagattctcaggttctttcccttctaggagagccagatcacatcaagccccaggaaagggtttctctgagttcaactttccaggcctcaatctccaacctgattcctctgccagaggcagtggaatatgaagcaatggaaagagcctatcagctgggtgcagtggctcaggcctataaccccagcacattgggaggctgaggcaggaggatcacttgagcccaggagttcatgaccagcctgggcaacatagtgagacaccgtctctataaaaaatttaaaaattacccaggcgtggtggtgtacctatagtcctagctactcaggaggttgagatgggaggattgcttgagcctgggaggtcaaggctgcagtaagcatgattgtgccactgcactacagcctgggtgacagagtgagaccattatcacacacacacacacacacacacacagaaaagaaaaaagaacaagcgtagcgttggagctaggaagacctgggtttgagtaccaactgtgccatttaccttgaacaagctacttcccactctgagccttggttccctccttaaaatggaaataataatagtgcctacatcttaggatgcccataaggatttgatgagatgatgtaggaagttgccctgatcagagcatgcactgaatatagattttccatttccccttcccagcctgggttgtctcaacaatgctagtaccttgagtgctctggattccccttgtctctctgtaccacagtttctggacctatcaaatatgtgtgataacagtagccacagtgaggactaaatgagttaatgttagtgttatgcatcagctattattcctttgatgtccaaacatctagtaacagaataggaagagaaggttgctgctgccaagaagtttggggctggatgagaccatcaggagtcatggataatatcctggcctatgggagagctaaaaggagacacatgacaggccaggaatatgaacatctggtcacctgtttctgctgtgctctgctgatagcctgcagtgtgactctgggcaagccacagccctcttgagccttagttttctcaaatggcagaggaaactgaagaccagtgttctgagttcaagtcctggccctgcccttgacttgccatgtgaacttgaatgagtctctttgcctctcaatgtttcagtttccccatctggtgagggagttcagcgcagtggtctcagtgtgtgatggtggaatgtggagatgggatgtgggatgtgaaggtgccttgacccctaccctgccatcagtcacttcctgtcctttcaggccacctggttcttagtcccccacctccgcacacgggccctgccctcatcagtgctctcaacatcctggagggcttcaatctcaccagcctggtatcccgagaacaggctcttcactgggtggcagagaccctgaagattgcattagccctggccagcagactgggagatcccgtctatgattctaccatcactgagagcatggatgacatgctcagcaaggtggaggccgcctacctccggggccatatcaatgactcccaggcagcccctgccccactcctgcctgtctatgaactagacggagctcccacggctgcccaggtgctgatcatgggacctgatgacttcattgtggccatggttagctccctgaaccagccctttggcagcggccttatcaccccctcggggatcctgctcaacagccagatgctggacttctcctggcccaaccggacagctaaccactctgcacccagcctggagaattcagtgcagccagggaagcggccactctctttcctgctgcccacagtggtccgacccgcggaggggctctgtggaacctacctcgctctgggggccaatggagctgcgcggggcctcagcggcctgacacagggctgttaggaggctcagatgacacccggtgtaagaattctcaagactaaggagcctggaccaagggtgagagctgaggaatcctggaccatcacccctgggacagccctgatttttctgtaccttggctaccacaggttctgctgaatgtcctgaccttgaaccggaacctgagtgacagcctggcccgcggccgcctacacccggacctgcagtccaacctcctgcaggtggacagtgagttcacagaggaagagattgagttcctggaagccaggggtcaccacgtggagaaagtagatgtcttatcctgggtccatggcagccgaaggaccaacaacttcatcatcgctgttaaggaccctcggagcccagatgcagctggagccaccatcctgtagagcagcggggtggggcggggtctctgctcccccactttgcatgttcccagagtccctccttctcccaggtttggtctcagggggaccccagggatgccccagatcaggggccagaggggatgcttagcaaacccaatcccagagtaactggaaaattctccatcaggaggcctgtggtggtggtggtggtggtggtggtggtggtggtggtggtgagtgtcagcatctacagtacagccaggcaggcaggaccttgaggaatcagactatctgtctgtgtgtcacctctcctccttcagccatgctggccccgagcttagggatgtgcttgcaaacccttctcaagggtctcacaaccccaacatcttcagactggcctgacctgggccttgtcttccagttcctttctcccattcccagcctcatttcttaaatgactaggaattttttaatggaccatcatagggagggggtgctcctcttttcccaccaggttgaggtgggggccttgcatcgggggtccccagggtatggggtaggggtgggggtgggcaccagctcaggggcttccatttgcaaagggaaattaaagaaagaatgttgcttaaacatg

SEQ ID NO: 336911 - DNA, 4582 bp, Homo sapiens
tcgctgcgctgctggggggcgcgggcgaggatggcggcggagaacgaggccagccaggagagcgccctgggcgcctactcgccagtggactacatgagcatcaccagcttcccgcggctgcccgaggacgagccggcgcccgcggccccgctgaggggccgcaaggacgaggacgcctttctgggagaccccgacaccgacccggactccttcctgaagtctgcacggctgcagcggctgccatcgtcgtcgtcggagatgggcagccaagacgggtcgccgctacgcgagacgcgcaaagacccgttctccgccgcagcggccgagtgctcctgccgccaggatgggctcacggtcatcgtcacggcctgtctcaccttcgctaccggtgtcaccgtggcgctggtcatgcagatctacttcggggacccccagatcttccagcagggtgccgtggtgaccgatgctgcccgctgcacttcactgggcatcgaggtgctcagtaaacagggatcttctgtggacgcagcggtggcagcagccttgtgtttgggtatcgtggctccacacagttctggcctgggcggtgggggcgtgatgctggtacatgacatccgacgaaatgagagccacctaattgatttccgggagtccgcaccaggggccctcagggaagagaccctgcaaagatcctgggagaccaagcctgggctcttggtgggggttcccggaatggtgaaggggctacatgaagctcaccagctctatggcaggctgccatggtcccaagtcctggcctttgcagcagctgtggcccaagatggcttcaacgtgactcatgatctagcccgtgccctggctgaacagctgcacccaacatgtccgagcgcttccgggagacgttcctgccatcgggccgcccgccactacctggctcgttgctgcatcggcccgacctggctgaggtgctggatgtacttggcacctccggcccggctgccttctacgcaggtggcaacctcacactggagatggtggccgaggctcagcacgcagggggtgtcataaccgaagaggacttcagcaattacagcgcccttgtggagaagcctgtgtgtggcgtgtacagaggtgacctctcccccggctcccagggtcccccctcaggagaagcctcccagtccatggccacatcgttttggcctagagactcctctccatttcacaggagagaaactaaggcagtgagctacctgggcagtcaactgttgaagcaaaccagagtcagcccaccttctgaaaagtagctgtggggtcagttaccccaagtatttaggatattggggggtggacctggtcaaagggtccaacctggaagttggggttctggccataggttttcttgatttgggctctgtgttgcctctgccctttccccagcagcgctgtcactgccctgtacttcctaagaatttttaagacaaagtccatccaagcttcacagtagaatgaacctttcaagacagtcatagacccagctcctcatagtgccaaaaagaaattgaggcccgaggagggaatataacaactggccaaactcaagaaaaccaacagggaacccagaaaaccaagcttatgacatgggtggggtccatgtttactgaacccaaggtggtaggtgctggatttctcagaagattctcaggttctttcccttctaggagagccagatcacatcaagccccaggaaagggtttctctgagttcaactttccaggcctcaatctccaacctgattcctctgccagaggcagtggaatatgaagcaatggaaagagcctatcagctgggtgcagtggctcaggcctataaccccagcacattgggaggctgaggcaggaggatcacttgagcccaggagttcatgaccagcctgggcaacatagtgagacaccgtctctataaaaaatttaaaaattacccaggcgtggtggtgtacctatagtcctagctactcaggaggttgagatgggaggattgcttgagcctgggaggtcaaggctgcagtaagcatgattgtgccactgcactacagcctgggtgacagagtgagaccattatcacacacacacacacacacacacacagaaaagaaaaaagaacaagcgtagcgttggagctaggaagacctgggtttgagtaccaactgtgccatttaccttgaacaagctacttcccactctgagccttggttccctccttaaaatggaaataataatagtgcctacatcttaggatgcccataaggatttgatgagatgatgtaggaagttgccctgatcagagcatgcactgaatatagattttccatttccccttcccagcctgggttgtctcaacaatgctagtaccttgagtgctctggattccccttgtctctctgtaccacagtttctggacctatcaaatatgtgtgataacagtagccacagtgaggactaaatgagttaatgttagtgttatgcatcagctattattcctttgatgtccaaacatctagtaacagaataggaagagaaggttgctgctgccaagaagtttggggctggatgagaccatcaggagtcatggataatatcctggcctatgggagagctaaaaggagacacatgacaggccaggaatatgaacatctggtcacctgtttctgctgtgctctgctgatagcctgcagtgtgactctgggcaagccacagccctcttgagccttagttttctcaaatggcagaggaaactgaagaccagtgttctgagttcaagtcctggccctgcccttgacttgccatgtgaacttgaatgagtctctttgcctctcaatgtttcagtttccccatctggtgagggagttcagcgcagtggtctcagtgtgtgatggtggaatgtggagatgggatgtgggatgtgaaggtgccttgacccctaccctgccatcagtcacttcctgtcctttcaggccacctggttcttagtcccccacctccgcacacgggccctgccctcatcagtgctctcaacatcctggagggcttcaatctcaccagcctggtatcccgagaacaggctcttcactgggtggcagagaccctgaagattgcattagccctggccagcagactgggagatcccgtctatgattctaccatcactgagagcatggatgacatgctcagcaaggtggaggccgcctacctccggggccatatcaatgactcccaggcagcccctgccccactcctgcctgtctatgaactagacggagctcccacggctgcccaggtgctgatcatgggacctgatgacttcattgtggccatggttagctccctgaaccagccctttggcagcggccttatcaccccctcggggatcctgctcaacagccagatgctggacttctcctggcccaaccggacagctaaccactctgcacccagcctggagaattcagtgcagccagggaagcggccactctctttcctgctgcccacagtggtccgacccgcggaggggctctgtggaacctacctcgctctgggggccaatggagctgcgcggggcctcagcggcctgacacagggctgttaggaggctcagatgacacccggtgtaagaattctcaagactaaggagcctggaccaaggcaggttctgctgaatgtcctgaccttgaaccggaacctgagtgacagcctggcccgcggccgcctacacccggacctgcagtccaacctcctgcaggtggacagtgagttcacagaggaagagattgagttcctggaagccaggggtcaccacgtggagaaagtagatgtcttatcctgggtccatggcagccgaaggaccaacaacttcatcatcgctgttaaggaccctcggagcccagatgcagctggagccaccatcctgtagagcagcggggtggggcggggtctctgctcccccactttgcatgttcccagagtccctccttctcccaggtttggtctcagggggaccccagggatgccccagatcaggggccagaggggatgcttagcaaacccaatcccagagtaactggaaaattctccatcaggaggcctgtggtggtggtggtggtggtggtggtggtggtggtggtggtgagtgtcagcatctacagtacagccaggcaggcaggaccttgaggaatcagactatctgtctgtgtgtcacctctcctccttcagccatgctggccccgagcttagggatgtgcttgcaaacccttctcaagggtctcacaaccccaacatcttcagactggcctgacctgggccttgtcttccagttcctttctcccattcccagcctcatttcttaaatgactaggaattttttaatggaccatcatagggagggggtgctcctcttttcccaccaggttgaggtgggggccttgcatcgggggtccccagggtatggggtaggggtgggggtgggcaccagctcaggggcttccatttgcaaagggaaattaaagaaagaatgttgcttaaacatg

SEQ ID NO: 336912 - DNA, 5412 bp, Homo sapiens
tcgctgcgctgctggggggcgcgggcgaggatggcggcggagaacgaggccagccaggagagcgccctgggcgcctactcgccagtggactacatgagcatcaccagcttcccgcggctgcccgaggacgagccggcgcccgcggccccgctgaggggccgcaaggacgaggacgcctttctgggagaccccgacaccgacccggactccttcctgaagtctgcacggctgcagcggctgccatcgtcgtcgtcggagatgggcagccaagacgggtcgccgctacgcgagacgcgcaaagacccgttctccgccgcagcggccgagtgctcctgccgccaggatgggctcacggtcatcgtcacggcctgtctcaccttcgctaccggtgtcaccgtggcgctggtcatgcagatctacttcggggacccccagatcttccagcagggtgccgtggtgaccgatgctgcccgctgcacttcactgggcatcgaggtgctcagtaaacagggatcttctgtggacgcagcggtggcagcagccttgtgtttgggtatcgtggctccacacagttctggcctgggcggtgggggcgtgatgctggtacatgacatccgacgaaatgagagccacctaattgatttccgggagtccgcaccaggggccctcagggaagagaccctgcaaagatcctgggagaccaagtgacctggtctcctctctccctcgcctacccgccttgcccagcctgggctcttggtgggggttcccggaatggtgaaggggctacatgaagctcaccagctctatggcaggctgccatggtcccaagtcctggcctttgcagcagctgtggcccaagatggcttcaacgtgactcatgatctagcccgtgccctggctgaacagctgcacccaacatgtccgagcgcttccgggagacgttcctgccatcgggccgcccgccactacctggctcgttgctgcatcggcccgacctggctgaggtgctggatgtacttggcacctccggcccggctgccttctacgcaggtggcaacctcacactggagatggtggccgaggctcagcacgcagggggtgtcataaccgaagaggacttcagcaattacagcgcccttgtggagaagcctgtgtgtggcgtgtacagaggtgacctctcccccggctcccagggtcccccctcaggagaagcctcccagtccatggccacatcgttttggcctagagactcctctccatttcacaggagagaaactaaggcagtgagctacctgggcagtcaactgttgaagcaaaccagagtcagcccaccttctgaaaagtagctgtggggtcagttaccccaagtatttaggatattggggggtggacctggtcaaagggtccaacctggaagttggggttctggccataggttttcttgatttgggctctgtgttgcctctgccctttccccagcagcgctgtcactgccctgtacttcctaagaatttttaagacaaagtccatccaagcttcacagtagaatgaacctttcaagacagtcatagacccagctcctcatagtgccaaaaagaaattgaggcccgaggagggaatataacaactggccaaactcaagaaaaccaacagggaacccagaaaaccaagcttatgacatgggtggggtccatgtttactgaacccaaggtggtaggtgctggatttctcagaagattctcaggttctttcccttctaggagagccagatcacatcaagccccaggaaagggtttctctgagttcaactttccaggcctcaatctccaacctgattcctctgccagaggcagtggaatatgaagcaatggaaagagcctatcagctgggtgcagtggctcaggcctataaccccagcacattgggaggctgaggcaggaggatcacttgagcccaggagttcatgaccagcctgggcaacatagtgagacaccgtctctataaaaaatttaaaaattacccaggcgtggtggtgtacctatagtcctagctactcaggaggttgagatgggaggattgcttgagcctgggaggtcaaggctgcagtaagcatgattgtgccactgcactacagcctgggtgacagagtgagaccattatcacacacacacacacacacacacacagaaaagaaaaaagaacaagcgtagcgttggagctaggaagacctgggtttgagtaccaactgtgccatttaccttgaacaagctacttcccactctgagccttggttccctccttaaaatggaaataataatagtgcctacatcttaggatgcccataaggatttgatgagatgatgtaggaagttgccctgatcagagcatgcactgaatatagattttccatttccccttcccagcctgggttgtctcaacaatgctagtaccttgagtgctctggattccccttgtctctctgtaccacagtttctggacctatcaaatatgtgtgataacagtagccacagtgaggactaaatgagttaatgttagtgttatgcatcagctattattcctttgatgtccaaacatctagtaacagaataggaagagaaggttgctgctgccaagaagtttggggctggatgagaccatcaggagtcatggataatatcctggcctatgggagagctaaaaggagacacatgacaggccaggaatatgaacatctggtcacctgtttctgctgtgctctgctgatagcctgcagtgtgactctgggcaagccacagccctcttgagccttagttttctcaaatggcagaggaaactgaagaccagtgttctgagttcaagtcctggccctgcccttgacttgccatgtgaacttgaatgagtctctttgcctctcaatgtttcagtttccccatctggtgagggagttcagcgcagtggtctcagtgtgtgatggtggaatgtggagatgggatgtgggatgtgaaggtgccttgacccctaccctgccatcagtcacttcctgtcctttcaggccacctggttcttagtcccccacctccgcacacgggccctgccctcatcagtgctctcaacatcctggagggcttcaatctcaccagcctggtatcccgagaacaggctcttcactgggtggcagagaccctgaagattgcattagccctggccagcagactgggagatcccgtctatgattctaccatcactgagagcatggatgacatgctcagcaaggtggaggccgcctacctccggggccatatcaatgactcccaggcagcccctgccccactcctgcctgtctatgaactagacggagctcccacggctgcccaggtgctgatcatgggacctgatgacttcattgtggccatggttagctccctgaaccagccctttggcagcggccttatcaccccctcggggatcctgctcaacagccagatgctggacttctcctggcccaaccggacagctaaccactctgcacccagcctggagaattcagtgcagccagggaagcggccactctctttcctgctgcccacagtggtccgacccgcggaggggctctgtggaacctacctcgctctgggggccaatggagctgcgcggggcctcagcggcctgacacagcatctgaatagacaaccagccctctttagggtgggatttgaaaggaagggcctgcttttctccagaacacctcagaatggctccatgaatgtcttgagaacctgatatatatgccaggcacctattttggcaggtggtgagttaacgatcttaagttctggaatcagacactcctgggttccggcccaagtgctaccaatttgtaactgtgtgatgctggagcattcacttaacagctctgaacctcagtctcttcatctttaaaatggaaataataacaatagctaacatttaaagagttcgtactaagtgctgggcactgtgttatgtgtgttaaccattttaaccttcccagttctggagagaatccttatttctattttatagataaggaaaccgaagcccagagaggttaagactttaggtcaagtaccttcagctagaaagagcagggaggcagtttggttccagagcctacgcacactcctaaccactaagttaaaagcacccacattgtgccctagaccactcctagctattaaccttgccctatccagagagaaaagaagggagccccgggctagattaaagagacttggttctagtggtgtatcttccctggcttcctctaaactctggagtaagtcattttccttgctggacttcactttccctctctgtgaaatggaaacagtcatcacaggcctgcctgtcttccagggctgttaggaggctcagatgacacccggtgtaagaattctcaagactaaggagcctggaccaagggtgagagctgaggaatcctggaccatcacccctgggacagccctgatttttctgtaccttggctaccacaggttctgctgaatgtcctgaccttgaaccggaacctgagtgacagcctggcccgcggccgcctacacccggacctgcagtccaacctcctgcaggtggacagtgagttcacagaggaagagattgagttcctggaagccaggggtcaccacgtggagaaagtagatgtcttatcctgggtccatggcagccgaaggaccaacaacttcatcatcgctgttaaggaccctcggagcccagatgcagctggagccaccatcctgtagagcagcggggtggggcggggtctctgctcccccactttgcatgttcccagagtccctccttctcccaggtttggtctcagggggaccccagggatgccccagatcaggggccagaggggatgcttagcaaacccaatcccagagtaactggaaaattctccatcaggaggcctgtggtggtggtggtggtggtggtggtggtggtggtggtggtgagtgtcagcatctacagtacagccaggcaggcaggaccttgaggaatcagactatctgtctgtgtgtcacctctcctccttcagccatgctggccccgagcttagggatgtgcttgcaaacccttctcaagggtctcacaaccccaacatcttcagactggcctgacctgggccttgtcttccagttcctttctcccattcccagcctcatttcttaaatgactaggaattttttaatggaccatcatagggagggggtgctcctcttttcccaccaggttgaggtgggggccttgcatcgggggtccccagggtatggggtaggggtgggggtgggcaccagctcaggggcttccatttgcaaagggaaattaaagaaagaatgttgcttaaacatg

SEQ ID NO: 336913 - DNA, 5805 bp, Homo sapiens
taactagaaaaagaaatttgtaaaccataaattaagatgcacaggtggaggtatactgtcatcaattaaggcagagatatttcaacttctaggatcataaatccctatgggtctgatgaaaagccttgcaccctctgtcctccaaaaatacaccctgcactaagaactcttagaagttacaagctggccacccatgggcaacacccagcacacagactggtttggtttagacactgaactgtcttaaaattttgtttgcttttgttaaaaagttgagaattttcataaaaatccagatttccaacatctcttgaacaatcgggaaatccgataacaacttgggcccgcattctcacatggctgaagttacctggcgtggaatagaagctgcttcccatgatgggcatgcactgtccagtttgccgtagtttctaccacttcctcttctctgtcctgcttgccttagtttgtcatttggctgtgggcatttaagtttgcagcccccatcttagacgtaaataagctacagaaaaggaacaagctgacaaagttcctatcttggctcctgtaagaccagctctccaagccgtaccaaagaaattcctcttttggttttgcatgttctatccttacataatccagtcctgggggaggggcaagggacataccaagtagacaggtgcaggaagctggcaggggtccagctctggtccagggtgggggcatggggcagaacatcctgttctgccagtctctgggcttttcctaatcagggattaaagtctccagtgacaggatagaagaggtccatggaccctgggtctccaaccctcttggttttgctcccatcctcttagggtggctgagtctgtgaatccatgctggggagggagctcagacacctgaccccaaatgaaaaactgagcctacagctctcaccactgggggtggaggggcagcagattcattgtacagaggggtagcatgttatcatcacacttccccttctgtgtctctcccagtgggggcgtgatgctggtacatgacatccgacgaaatgagagccacctaattgatttccgggagtccgcaccaggggccctcagggaagagaccctgcaaagatcctgggagaccaagcctgggctcttggtgggggttcccggaatggtgaaggggctacatgaagctcaccagctctatggcaggctgccatggtcccaagtcctggcctttgcagcagctgtggcccaagatggcttcaacgtgactcatgatctagcccgtgccctggctgaacagctgcacccaacatgtccgagcgcttccgggagacgttcctgccatcgggccgcccgccactacctggctcgttgctgcatcggcccgacctggctgaggtgctggatgtacttggcacctccggcccggctgccttctacgcaggtggcaacctcacactggagatggtggccgaggctcagcacgcagggggtgtcataaccgaagaggacttcagcaattacagcgcccttgtggagaagcctgtgtgtggcgtgtacagaggtgacctctcccccggctcccagggtcccccctcaggagaagcctcccagtccatggccacatcgttttggcctagagactcctctccatttcacaggagagaaactaaggcagtgagctacctgggcagtcaactgttgaagcaaaccagagtcagcccaccttctgaaaagtagctgtggggtcagttaccccaagtatttaggatattggggggtggacctggtcaaagggtccaacctggaagttggggttctggccataggttttcttgatttgggctctgtgttgcctctgccctttccccagcagcgctgtcactgccctgtacttcctaagaatttttaagacaaagtccatccaagcttcacagtagaatgaacctttcaagacagtcatagacccagctcctcatagtgccaaaaagaaattgaggcccgaggagggaatataacaactggccaaactcaagaaaaccaacagggaacccagaaaaccaagcttatgacatgggtggggtccatgtttactgaacccaaggtggtaggtgctggatttctcagaagattctcaggttctttcccttctaggagagccagatcacatcaagccccaggaaagggtttctctgagttcaactttccaggcctcaatctccaacctgattcctctgccagaggcagtggaatatgaagcaatggaaagagcctatcagctgggtgcagtggctcaggcctataaccccagcacattgggaggctgaggcaggaggatcacttgagcccaggagttcatgaccagcctgggcaacatagtgagacaccgtctctataaaaaatttaaaaattacccaggcgtggtggtgtacctatagtcctagctactcaggaggttgagatgggaggattgcttgagcctgggaggtcaaggctgcagtaagcatgattgtgccactgcactacagcctgggtgacagagtgagaccattatcacacacacacacacacacacacacagaaaagaaaaaagaacaagcgtagcgttggagctaggaagacctgggtttgagtaccaactgtgccatttaccttgaacaagctacttcccactctgagccttggttccctccttaaaatggaaataataatagtgcctacatcttaggatgcccataaggatttgatgagatgatgtaggaagttgccctgatcagagcatgcactgaatatagattttccatttccccttcccagcctgggttgtctcaacaatgctagtaccttgagtgctctggattccccttgtctctctgtaccacagtttctggacctatcaaatatgtgtgataacagtagccacagtgaggactaaatgagttaatgttagtgttatgcatcagctattattcctttgatgtccaaacatctagtaacagaataggaagagaaggttgctgctgccaagaagtttggggctggatgagaccatcaggagtcatggataatatcctggcctatgggagagctaaaaggagacacatgacaggccaggaatatgaacatctggtcacctgtttctgctgtgctctgctgatagcctgcagtgtgactctgggcaagccacagccctcttgagccttagttttctcaaatggcagaggaaactgaagaccagtgttctgagttcaagtcctggccctgcccttgacttgccatgtgaacttgaatgagtctctttgcctctcaatgtttcagtttccccatctggtgagggagttcagcgcagtggtctcagtgtgtgatggtggaatgtggagatgggatgtgggatgtgaaggtgccttgacccctaccctgccatcagtcacttcctgtcctttcaggccacctggttcttagtcccccacctccgcacacgggccctgccctcatcagtgctctcaacatcctggagggcttcaatctcaccagcctggtatcccgagaacaggctcttcactgggtggcagagaccctgaagattgcattagccctggccagcagactgggagatcccgtctatgattctaccatcactgagagcatggatgacatgctcagcaaggtggaggccgcctacctccggggccatatcaatgactcccaggcagcccctgccccactcctgcctgtctatgaactagacggagctcccacggctgcccaggtgctgatcatgggacctgatgacttcattgtggccatggttagctccctgaaccagccctttggcagcggccttatcaccccctcggggatcctgctcaacagccagatgctggacttctcctggcccaaccggacagctaaccactctgcacccagcctggagaattcagtgcagccagggaagcggccactctctttcctgctgcccacagtggtccgacccgcggaggggctctgtggaacctacctcgctctgggggccaatggagctgcgcggggcctcagcggcctgacacagcatctgaatagacaaccagccctctttagggtgggatttgaaaggaagggcctgcttttctccagaacacctcagaatggctccatgaatgtcttgagaacctgatatatatgccaggcacctattttggcaggtggtgagttaacgatcttaagttctggaatcagacactcctgggttccggcccaagtgctaccaatttgtaactgtgtgatgctggagcattcacttaacagctctgaacctcagtctcttcatctttaaaatggaaataataacaatagctaacatttaaagagttcgtactaagtgctgggcactgtgttatgtgtgttaaccattttaaccttcccagttctggagagaatccttatttctattttatagataaggaaaccgaagcccagagaggttaagactttaggtcaagtaccttcagctagaaagagcagggaggcagtttggttccagagcctacgcacactcctaaccactaagttaaaagcacccacattgtgccctagaccactcctagctattaaccttgccctatccagagagaaaagaagggagccccgggctagattaaagagacttggttctagtggtgtatcttccctggcttcctctaaactctggagtaagtcattttccttgctggacttcactttccctctctgtgaaatggaaacagtcatcacaggcctgcctgtcttccagggctgttaggaggctcagatgacacccggtgtaagaattctcaagactaaggagcctggaccaagggtgagagctgaggaatcctggaccatcacccctgggacagccctgatttttctgtaccttggctaccacaggttctgctgaatgtcctgaccttgaaccggaacctgagtgacagcctggcccgcggccgcctacacccggacctgcagtccaacctcctgcaggtggacagtgagttcacagaggaagagattgagttcctggaagccaggggtcaccacgtggagaaagtagatgtcttatcctgggtccatggcagccgaaggaccaacaacttcatcatcgctgttaaggaccctcggagcccagatgcagctggagccaccatcctgtagagcagcggggtggggcggggtctctgctcccccactttgcatgttcccagagtccctccttctcccaggtttggtctcagggggaccccagggatgccccagatcaggggccagaggggatgcttagcaaacccaatcccagagtaactggaaaattctccatcaggaggcctgtggtggtggtggtggtggtggtggtggtggtggtggtggtgagtgtcagcatctacagtacagccaggcaggcaggaccttgaggaatcagactatctgtctgtgtgtcacctctcctccttcagccatgctggccccgagcttagggatgtgcttgcaaacccttctcaagggtctcacaaccccaacatcttcagactggcctgacctgggccttgtcttccagttcctttctcccattcccagcctcatttcttaaatgactaggaattttttaatggaccatcatagggagggggtgctcctcttttcccaccaggttgaggtgggggccttgcatcgggggtccccagggtatggggtaggggtgggggtgggcaccagctcaggggcttccatttgcaaagggaaattaaagaaagaatgttgcttaaacatg

SEQ ID NO: 336914 - DNA, 3882 bp, Homo sapiens
ttgtgttctggcttaaacaaaaggattccatacaaccattgacattggagttaagtatgcagaaaaacaaacaagacgttttgatgaaggaatataacaactggccaaactcaagaaaaccaacagggaacccagaaaaccaagcttatgacatgggtggggtccatgtttactgaacccaaggtggtaggtgctggatttctcagaagattctcaggttctttcccttctaggagagccagatcacatcaagccccaggaaagggtttctctgagttcaactttccaggcctcaatctccaacctgattcctctgccagaggcagtggaatatgaagcaatggaaagagcctatcagctgggtgcagtggctcaggcctataaccccagcacattgggaggctgaggcaggaggatcacttgagcccaggagttcatgaccagcctgggcaacatagtgagacaccgtctctataaaaaatttaaaaattacccaggcgtggtggtgtacctatagtcctagctactcaggaggttgagatgggaggattgcttgagcctgggaggtcaaggctgcagtaagcatgattgtgccactgcactacagcctgggtgacagagtgagaccattatcacacacacacacacacacacacacagaaaagaaaaaagaacaagcgtagcgttggagctaggaagacctgggtttgagtaccaactgtgccatttaccttgaacaagctacttcccactctgagccttggttccctccttaaaatggaaataataatagtgcctacatcttaggatgcccataaggatttgatgagatgatgtaggaagttgccctgatcagagcatgcactgaatatagattttccatttccccttcccagcctgggttgtctcaacaatgctagtaccttgagtgctctggattccccttgtctctctgtaccacagtttctggacctatcaaatatgtgtgataacagtagccacagtgaggactaaatgagttaatgttagtgttatgcatcagctattattcctttgatgtccaaacatctagtaacagaataggaagagaaggttgctgctgccaagaagtttggggctggatgagaccatcaggagtcatggataatatcctggcctatgggagagctaaaaggagacacatgacaggccaggaatatgaacatctggtcacctgtttctgctgtgctctgctgatagcctgcagtgtgactctgggcaagccacagccctcttgagccttagttttctcaaatggcagaggaaactgaagaccagtgttctgagttcaagtcctggccctgcccttgacttgccatgtgaacttgaatgagtctctttgcctctcaatgtttcagtttccccatctggtgagggagttcagcgcagtggtctcagtgtgtgatggtggaatgtggagatgggatgtgggatgtgaaggtgccttgacccctaccctgccatcagtcacttcctgtcctttcaggccacctggttcttagtcccccacctccgcacacgggccctgccctcatcagtgctctcaacatcctggagggcttcaatctcaccagcctggtatcccgagaacaggctcttcactgggtggcagagaccctgaagattgcattagccctggccagcagactgggagatcccgtctatgattctaccatcactgagagcatggatgacatgctcagcaaggtggaggccgcctacctccggggccatatcaatgactcccaggcagcccctgccccactcctgcctgtctatgaactagacggagctcccacggctgcccaggtgctgatcatgggacctgatgacttcattgtggccatggttagctccctgaaccagccctttggcagcggccttatcaccccctcggggatcctgctcaacagccagatgctggacttctcctggcccaaccggacagctaaccactctgcacccagcctggagaattcagtgcagccagggaagcggccactctctttcctgctgcccacagtggtccgacccgcggaggggctctgtggaacctacctcgctctgggggccaatggagctgcgcggggcctcagcggcctgacacagcatctgaatagacaaccagccctctttagggtgggatttgaaaggaagggcctgcttttctccagaacacctcagaatggctccatgaatgtcttgagaacctgatatatatgccaggcacctattttggcaggtggtgagttaacgatcttaagttctggaatcagacactcctgggttccggcccaagtgctaccaatttgtaactgtgtgatgctggagcattcacttaacagctctgaacctcagtctcttcatctttaaaatggaaataataacaatagctaacatttaaagagttcgtactaagtgctgggcactgtgttatgtgtgttaaccattttaaccttcccagttctggagagaatccttatttctattttatagataaggaaaccgaagcccagagaggttaagactttaggtcaagtaccttcagctagaaagagcagggaggcagtttggttccagagcctacgcacactcctaaccactaagttaaaagcacccacattgtgccctagaccactcctagctattaaccttgccctatccagagagaaaagaagggagccccgggctagattaaagagacttggttctagtggtgtatcttccctggcttcctctaaactctggagtaagtcattttccttgctggacttcactttccctctctgtgaaatggaaacagtcatcacaggcctgcctgtcttccagggctgttaggaggctcagatgacacccggtgtaagaattctcaagactaaggagcctggaccaagggtgagagctgaggaatcctggaccatcacccctgggacagccctgatttttctgtaccttggctaccacaggttctgctgaatgtcctgaccttgaaccggaacctgagtgacagcctggcccgcggccgcctacacccggacctgcagtccaacctcctgcaggtggacagtgagttcacagaggaagagattgagttcctggaagccaggggtcaccacgtggagaaagtagatgtcttatcctgggtccatggcagccgaaggaccaacaacttcatcatcgctgttaaggaccctcggagcccagatgcagctggagccaccatcctgtagagcagcggggtggggcggggtctctgctcccccactttgcatgttcccagagtccctccttctcccaggtttggtctcagggggaccccagggatgccccagatcaggggccagaggggatgcttagcaaacccaatcccagagtaactggaaaattctccatcaggaggcctgtggtggtggtggtggtggtggtggtggtggtggtggtggtgagtgtcagcatctacagtacagccaggcaggcaggaccttgaggaatcagactatctgtctgtgtgtcacctctcctccttcagccatgctggccccgagcttagggatgtgcttgcaaacccttctcaagggtctcacaaccccaacatcttcagactggcctgacctgggccttgtcttccagttcctttctcccattcccagcctcatttcttaaatgactaggaattttttaatggaccatcatagggagggggtgctcctcttttcccaccaggttgaggtgggggccttgcatcgggggtccccagggtatggggtaggggtgggggtgggcaccagctcaggggcttccatttgcaaagggaaattaaagaaagaatgttgcttaaacatg

SEQ ID NO: 336915 - DNA, 2449 bp, Homo sapiens
taagcatcccctcatggcccctgatctggggcatccctggggtccccctgagaccaaacctgggagaaggagggactctgggaacatgcaaagtgggggactaagaaccaggtggcctccgcacacgggccctgccctcatcagtgctctcaacatcctggagggcttcaatctcaccagcctggtatcccgagaacaggctcttcactgggtggcagagaccctgaagattgcattagccctggccagcagactgggagatcccgtctatgattctaccatcactgagagcatggatgacatgctcagcaaggtggaggccgcctacctccggggccatatcaatgactcccaggcagcccctgccccactcctgcctgtctatgaactagacggagctcccacggctgcccaggtgctgatcatgggacctgatgacttcattgtggccatggttagctccctgaaccagccctttggcagcggccttatcaccccctcggggatcctgctcaacagccagatgctggacttctcctggcccaaccggacagctaaccactctgcacccagcctggagaattcagtgcagccagggaagcggccactctctttcctgctgcccacagtggtccgacccgcggaggggctctgtggaacctacctcgctctgggggccaatggagctgcgcggggcctcagcggcctgacacagcatctgaatagacaaccagccctctttagggtgggatttgaaaggaagggcctgcttttctccagaacacctcagaatggctccatgaatgtcttgagaacctgatatatatgccaggcacctattttggcaggtggtgagttaacgatcttaagttctggaatcagacactcctgggttccggcccaagtgctaccaatttgtaactgtgtgatgctggagcattcacttaacagctctgaacctcagtctcttcatctttaaaatggaaataataacaatagctaacatttaaagagttcgtactaagtgctgggcactgtgttatgtgtgttaaccattttaaccttcccagttctggagagaatccttatttctattttatagataaggaaaccgaagcccagagaggttaagactttaggtcaagtaccttcagctagaaagagcagggaggcagtttggttccagagcctacgcacactcctaaccactaagttaaaagcacccacattgtgccctagaccactcctagctattaaccttgccctatccagagagaaaagaagggagccccgggctagattaaagagacttggttctagtggtgtatcttccctggcttcctctaaactctggagtaagtcattttccttgctggacttcactttccctctctgtgaaatggaaacagtcatcacaggcctgcctgtcttccagggctgttaggaggctcagatgacacccggtgtaagaattctcaagactaaggagcctggaccaagggtgagagctgaggaatcctggaccatcacccctgggacagccctgatttttctgtaccttggctaccacaggttctgctgaatgtcctgaccttgaaccggaacctgagtgacagcctggcccgcggccgcctacacccggacctgcagtccaacctcctgcaggtggacagtgagttcacagaggaagagattgagttcctggaagccaggggtcaccacgtggagaaagtagatgtcttatcctgggtccatggcagccgaaggaccaacaacttcatcatcgctgttaaggaccctcggagcccagatgcagctggagccaccatcctgtagagcagcggggtggggcggggtctctgctcccccactttgcatgttcccagagtccctccttctcccaggtttggtctcagggggaccccagggatgccccagatcaggggccagaggggatgcttagcaaacccaatcccagagtaactggaaaattctccatcaggaggcctgtggtggtggtggtggtggtggtggtggtggtggtggtggtgagtgtcagcatctacagtacagccaggcaggcaggaccttgaggaatcagactatctgtctgtgtgtcacctctcctccttcagccatgctggccccgagcttagggatgtgcttgcaaacccttctcaagggtctcacaaccccaacatcttcagactggcctgacctgggccttgtcttccagttcctttctcccattcccagcctcatttcttaaatgactaggaattttttaatggaccatcatagggagggggtgctcctcttttcccaccaggttgaggtgggggccttgcatcgggggtccccagggtatggggtaggggtgggggtgggcaccagctcaggggcttccatttgcaaagggaaattaaagaaagaatgttgcttaaacatg

SEQ ID NO: 336916 - DNA, 997 bp, Homo sapiens
cgatgcccgtatatcagggcagaggggatccttagcaaacccaatcccagagtaactggaacctacctcgctctgggggccaatggagctgcgcggggcctcagcggcctgacacagcaggttctgctgaatgtcctgaccttgaaccggaacctgagtgacagcctggcccgcggccgcctacacccggacctgcagtccaacctcctgcaggtggacagtgagttcacagaggaagagattgagttcctggaagccaggggtcaccacgtggagaaagtagatgtcttatcctgggtccatggcagccgaaggaccaacaacttcatcatcgctgttaaggaccctcggagcccagatgcagctggagccaccatcctgtagagcagcggggtggggcggggtctctgctcccccactttgcatgttcccagagtccctccttctcccaggtttggtctcagggggaccccagggatgccccagatcaggggccagaggggatgcttagcaaacccaatcccagagtaactggaaaattctccatcaggaggcctgtggtggtggtggtggtggtggtggtggtggtggtggtggtgagtgtcagcatctacagtacagccaggcaggcaggaccttgaggaatcagactatctgtctgtgtgtcacctctcctccttcagccatgctggccccgagcttagggatgtgcttgcaaacccttctcaagggtctcacaaccccaacatcttcagactggcctgacctgggccttgtcttccagttcctttctcccattcccagcctcatttcttaaatgactaggaattttttaatggaccatcatagggagggggtgctcctcttttcccaccaggttgaggtgggggccttgcatcgggggtccccagggtatggggtaggggtgggggtgggcaccagctcaggggcttccatttgcaaagggaaattaaagaaagaatgttgcttaaacatg

SEQ ID NO: 336917 - DNA, 186 bp, Homo sapiens
ggacaaggtgtttgggttctgataccactagcaaagcttgattgctctgtgtagtcactgcagtcagactggtgtgtatttcctcatcaaagaggaactctgatgctttacaccgtaatttgtataattaatcttctgagtttttttgaaattgcatttttgttgttgttgctgttgttaataaat

SEQ ID NO: 336918 - DNA, 230 bp, Homo sapiens
tctggggggagatgaaaaaccaactcgtccttgttcctgcccagagaagcccagatttttaacttcctggtgtcttaaaagcagtccccattcttcagtctctcttctctctggttaggtaggtgatctacttagaagaatagtgtattcataactctcccctcgcccacccaaccaactcagtaaagcagttttcaaaacgaggcgggatggtggctgggaaggggtgc

SEQ ID NO: 336919 - DNA, 153 bp, Homo sapiens
ttctgtttagttctgaattgctcttggggaagagaagggcccagtttttgcttagggttttgcagaagagctttgctgactcagttatctgtgtatcatgatgactaagtttcagggtagcattttgctatctttgcagaaggaaaaattaca

SEQ ID NO: 336920 - DNA, 128 bp, Homo sapiens
ttctgtgattaaaatgccatgaaggactccagaaaacacatgatatttagtgacttctcagcacatgcaaagttccgtgctaggcaccgtgtttcaggctgccagtagtttttttttttttttttttt

SEQ ID NO: 336921 - DNA, 251 bp, Homo sapiens
gctctgcccaccggcccctcctggcctttccccatcccgcacacacctcagctccaggacactcttcccgggaggaactctgctcacaaagcccaaggaccagacagaacggcccttcctcccctcacccacctgaaccaccccagaaagccctgagcagaggccaggccacccagccctctgccatgtatgaaccacctggtcccacaccttccgggtgtcccaggccccctcacctcacacctcaacac

SEQ ID NO: 336922 - DNA, 485 bp, Homo sapiens
tgttgataaggtcaacagtagtgtgcagtcatgtcctaggccttcacattcgctcaccactcattcactgacccacccagagaaacttcctgccattcaggctccattcacaggaagacccttatacaggtgtactctttttctcatttatgccatatttttactgttttgtttttaatggaaacataattgcacatatttatggagcacaggatgatattttgatacatatacacaatgtgtgatgaacaaatcaaggtaattagtatacccatcatctcaaacaattgccatttctttgtggttaggacattcacattcctcttttcaagctattttgaagctgacaatacattgttgttgactacagttgccctactctgcgtcaggatgtcagaacttatttttcctctctatctggaactttttactggttgactaatatctcctcatcctccatttcctcattctttccagctctggta

SEQ ID NO: 336923 - DNA, 722 bp, Homo sapiens
atctcaccattgcgctccagcctgggcaacaagagtgaaactctgtctcaaaagaaaaaaaaagaaaagaaaagaagaagaagaaggttcatcttcagactcctagtccagagctctcagcaatcctcatcttgtaatgctgtctacagactccaagatctcccaacgtgaattagcaaccgatgcatcaaaggtggcacctcggccgggcacggtggctcacgcctgtaatctcagcactttgggaggccgaggtgttggagcgggccggagagaagtagagtgggctgcgaggagaaggaaacaggcctttcggaggctcctcatccctcggaggtcatcccttactccaggtgatctgaacctgaagtccgaggccccaagagttctaagtaacccaggggtggaggtggggtgggggatcccagctctttccgatctgggagatcagaaagatgctcatctgggagagtgggacctcccctttcagtccgcccacccccgaggaccgcacttggagggccgcacttggaggaccgcgcctccaaggcgggcgcggctgacgcccggggcccaggccatgtggggcgtgcgtgccgggagaagtgtcccagcgcctcaccccgcaagcatgagaacccgggaggcagacgttgcggcgagtcgagatctcaccattgcgctccagcctgggcaacaagagtgaaactctgtctcaaaag

SEQ ID NO: 336924 - DNA, 1116 bp, Homo sapiens
agcgggggggcgtctccgagcggcgggccgagggagggcgcagcagctgctccctgaacactttctgacccagcagtcccccagcgccggacgcgccgcgccctggcggctctagggaccccccccgcgcctgcacttagccccgcgcccgagtccacagacaaacgaatttaaaggagcaaccgaggaggcacctgcgaaagaaagcccacacacaggtgaatttaaaggagcagccctggtgtcacctatcagtaaaagaatgttagaacgactttccaagtttgaagttggagatgctgaaaatgttgcttcatatgattgtataaccattcaccagcttgtgtcaatgctggagaggaagtacggccatagaggaagttaactcaccatggttgtaagctgttggtgtctaaacaaagattggaaacaaagagggcaaatacaagtagttcttcaaattaccctgaatttgccactgaattaaactgtgtgtctgcagattagctatacgttttctgtaatggagctgcccagggctgaaacaaaattagattaagcaaggcaagcatttccttctttcctgactccaaacaaaataaagcaggttttcattttattttatttttaaattacaaagtctcattacgtagatataggaggaatttgcagtagtccctgtgagaaatgctggtgtttcataccagggggatgatactggatttatagtaaaagctggaatcagtgcttggctttggcatatcatatattcattcacctgatactcagcaagtcactaaccctctttaactttcagattattcaaatgtaaactggctataatgcaatctatgtactggatattgtattgtaaaaaattagtaataaaacgaaaataacatgcaaaaatacttcgaaaactctgtagatctgtaaataggttttattctaaaaactgaaaataacgtaagaggtcattaaaggaaaatcagaaaatacaatcaacaaatctacccacatatagtcattcttaagctttgatgcatgcacttctaagttcttcaagcatatactttttttgtttacagatatgagaccatacttattcttttgtaa

SEQ ID NO: 336925 - DNA, 703 bp, Homo sapiens
agcgggggggcgtctccgagcggcgggccgagggagggcgcagcagctgctccctgaacactttctgacccagcagtcccccagcgccggacgcgccgcgccctggcggctctagggaccccccccgcgcctgcacttagccccgcgcccgagtccacagacaaacgaatttaaaggagcaaccgaggaggcacctgcgaaagaaagcccacacacaggtgaatttaaaggagcagccctggtgtcacctatcagtaaaagactatttggagttttcctcgtcttactggatgtcactctcgtccttgccgacctaattttcactgacagcaaactttatattcctttggagtatcgttctatttctctagccattgccttattttttctcatggatgttcttcttcgagtatttgtagaagggtaagtttgattatttttataataagaaccactttgggaggctgaggtgggaggatcccaaggtcaggagttcgagacaatcctggccaacatggtgaaaccccgtctctactaaaaatacaaaaattggctgggtgtggtggtggttgcctgtaatcccagctgcttgggaggctgaggcaggagaatcatttgaacctgggaggcagaagttgcattgagccgagatcatgccattgcactctagcctgggtgacagggtgagactccgtctcaaaag

SEQ ID NO: 336926 - DNA, 708 bp, Homo sapiens
tataaaaggccatgataatatcttctgaagtggtttggtgagaattttgtttattaagaactgcttctattgggtgaaaacagtgatttttctgagattctaaggcattacagtttttcctgccactgggcagcttaatactaaataataacattttggtacctgatcagtggcttaaatatagtatagctatagggacaaatgcccctttatctttgcatttatttatttatttatttatttatttatttatttatttattttagactatttggagttttcctcgtcttactggatgtcactctcgtccttgccgacctaattttcactgacagcaaactttatattcctttggagtatcgttctatttctctagccattgccttattttttctcatggatgttcttcttcgagtatttgtagaagggtaagtttgattatttttataataagaaccactttgggaggctgaggtgggaggatcccaaggtcaggagttcgagacaatcctggccaacatggtgaaaccccgtctctactaaaaatacaaaaattggctgggtgtggtggtggttgcctgtaatcccagctgcttgggaggctgaggcaggagaatcatttgaacctgggaggcagaagttgcattgagccgagatcatgccattgcactctagcctgggtgacagggtgagactccgtctcaaaag

SEQ ID NO: 336927 - DNA, 676 bp, Homo sapiens
agcgggggggcgtctccgagcggcgggccgagggagggcgcagcagctgctccctgaacactttctgacccagcagtcccccagcgccggacgcgccgcgccctggcggctctagggaccccccccgcgcctgcacttagccccgcgcccgagtccacagacaaacgaatttaaaggagcaaccgaggaggcacctgcgaaagaaagcccacacacaggtgaatttaaaggagcagccctggtgtcacctatcagtaaaagactatttggagttttcctcgtcttactggatgtcactctcgtccttgccgacctaattttcactgacagcaaactttatattcctttggagtatcgttctatttctctagccattgccttattttttctcatggatgttcttcttcgagtatttgtagaagggttggagtgcaacggcgcgatctcagctcactgcaacctctgcctcccaggttcaagcgattctcatgcctcagcctcctaaatagctaggattacatgtgtgtgccaccacgcccagctcatttttgtatttttagtacagatggggtttcactatgttgaccaggctggtctcgaaatcctgacctcaagtgatccgcccgccttggcctcccaaagtgctgggattacaggcgcgagccactgtgcctgg

SEQ ID NO: 336928 - DNA, 716 bp, Homo sapiens
ccactggatctggggccatgttggggggccagtgaagggggcaccccaggctagtcttccaggagctccctggttggggggacaaggaaggacacaggcagggacaaccagggccacactcagggccattgtgagggacagggatggggctgttgccatcgtagtgacagagctgtggtatgctcctgccaccttgcattccagcccaggctgctcccatctttggcagagggtgggaaaacacatgatcctgccttccagagactgtactggtcagagaaagacatcagcaggagagccagagattcctcctcctctccatcatcaccatcaccattattctcatcaccatcaccgtcaccgtcatcatcatcatcaccatcatggacttcaaagaagttcaaagaatttcctcctctggccagagtgaatcctgttctgtggaagcaggaggctgggtgggaagccctgtggaggctccacccgtgtttgggttctgggcagggatctggggacagggtaggcctaatgcttattgcagaaattctctgcctgggaagtcaggatcactccttggaggaggcagcctgtcctctgagctttcaggaaaggaactggttgtgtggttccctgtaagctctggagatggggcgggcagtaggggggagcacagcagtgtggatgtattaatacttagtgctggccgggtgcggtgg

SEQ ID NO: 336929 - DNA, 988 bp, Homo sapiens
agcgggggggcgtctccgagcggcgggccgagggagggcgcagcagctgctccctgaacactttctgacccagcagtcccccagcgccggacgcgccgcgccctggcggctctagggaccccccccgcgcctgcacttagccccgcgcccgagtccacagacaaacgaatttaaaggagcaaccgaggaggcacctgcgaaagaaagcccacacacaggtgaatttaaaggagcagccctggtgtcacctatcagtaaaagactatttggagttttcctcgtcttactggatgtcactctcgtccttgccgacctaattttcactgacagcaaactttatattcctttggagtatcgttctatttctctagccattgccttattttttctcatggatgttcttcttcgagtatttgtagaagggtcaacgccaccgcctctgcactgccttcctggccatcatcccaggtagagctgccctcttccttctccgcagcttttctcatcctgcaaagcaagggtgttggagcgggccggagagaagtagagtgggctgcgaggagaaggaaacaggcctttcggaggctcctcatccctcggaggtcatcccttactccaggtgatctgaacctgaagtccgaggccccaagagttctaagtaacccaggggtggaggtggggtgggggatcccagctctttccgatctgggagatcagaaagatgctcatctgggagagtgggacctcccctttcagtccgcccacccccgaggaccgcacttggagggccgcacttggaggaccgcgcctccaaggcgggcgcggctgacgcccggggcccaggccatgtggggcgtgcgtgccgggagaagtgtcccagcgcctcaccccgcaagcatgagaacccgggaggcagacgttgcggcgagtcgagatctcaccattgcgctccagcctgggcaacaagagtgaaactctgtctcaaaag

SEQ ID NO: 336930 - DNA, 878 bp, Homo sapiens
agcgggggggcgtctccgagcggcgggccgagggagggcgcagcagctgctccctgaacactttctgacccagcagtcccccagcgccggacgcgccgcgccctggcggctctagggaccccccccgcgcctgcacttagccccgcgcccgagtccacagacaaacgaatttaaaggagcaaccgaggaggcacctgcgaaagaaagcccacacacaggtgaatttaaaggagcagccctggtgtcacctatcagtaaaagactatttggagttttcctcgtcttactggatgtcactctcgtccttgccgacctaattttcactgacagcaaactttatattcctttggagtatcgttctatttctctagccattgccttattttttctcatggatgttcttcttcgagtatttgtagaaggagactgtactggtcagagaaagacatcagcaggagagccagagattcctcctcctctccatcatcaccatcaccattattctcatcaccatcaccgtcaccgtcatcatcatcatcaccatcatggacttcaaagaagttcaaagaatttcctcctctggccagagtgaatcctgttctgtggaagcaggaggctgggtgggaagccctgtggaggctccacccgtgtttgggttctgggcagggatctggggacagggtaggcctaatgcttattgcagaaattctctgcctgggaagtcaggatcactccttggaggaggcagcctgtcctctgagctttcaggaaaggaactggttgtgtggttccctgtaagctctggagatggggcgggcagtaggggggagcacagcagtgtggatgtattaatacttagtgctggccgggtgcggtgg

SEQ ID NO: 336931 - DNA, 121 bp, Homo sapiens
tgctgtgatcataggcatgagccaccatgcctggccttccacatgaaatttaaagtcagcttctcaatttctattgttttggttctaaaatagatgtaagggttttaaagtgagcaacaat

SEQ ID NO: 336932 - DNA, 616 bp, Homo sapiens
tctctcccactccgcatctaatcctcactaaaactggttcttaccttcaaaatgtattcagaatgtgaccatttctcaccacctccaccgtccccatcctagattgctgcgacagtctcctaattggtgccctgcttccctgctgctactcttggagtcactctacctccacccatagtctattctgaacagaggaggaaatctggtgcaatatgaatcagattgtgtcatttctttccttaaatcccttaaaagccttcccagcaaggatgatgccaaaaggacgaatgtgcctaaagcagactcgcgggcctcggggcaggctgggggcaggagagtctccaagccagtgtctccctctccccaacctatttctccactggcagtcctgactgtatcacctatcttctgatttctcaaaaaaggaagctctttaaagggagggaaatgcaatcaatcagcttccttttccagctggataccacaagaagccaacaacactaacacttctgaagaagcaataaggtacatcgagtctgccaacacttaatagtgtttccaaagatgaggctagccctccagagactcattctttatgcccttggtggcagtgggg

SEQ ID NO: 336933 - DNA, 266 bp, Homo sapiens
atctgtatttattaggtaggcaaagaggaacaatgaagtattttgaagttgctggaatacactatctgatccaagtgctaggaagacaactctgttgtgatattccaggtggcgggtaatgtgggtttaggtggagcagtggctatggtggctagaacttctggagccctagaaattagtcaaattatttacatgctgttgggataagggaaaagttaaagatgttcctggatagatagtgctgtcattcataaggtagggaactc

SEQ ID NO: 336934 - DNA, 91 bp, Homo sapiens
tcttacaaagaattatttaaatcagaaattcgtgtctagatgtagtggcttgtgcctgtaatcccagcatactgggaggccaaggtgagag

SEQ ID NO: 336935 - DNA, 433 bp, Homo sapiens
tgttaaggatgcttataaagatcatggctttatgggctacagggaccttgagagctctttgcatctttcttttgcccaccagttaggatggctcctgaggttctcaaactgaggaaggggtgggcagacatatcttccaggctgctagtcagatacatacacttctcttcctactgaaggcctatcttattctctgaagatgttaaatttcacaatttgcctccataatttctttttatatttctcaaccttgaggcaaaattgccaatgttgataatcttagagatggaatcctgacaccaaaagatctttggagtataaaacaaaacaacctcccattttcctgtgcgttatgatgctggggacagtctttgttaatcccccccgccctgcttttttttttttttttttttttttagacagggtctggctg

SEQ ID NO: 336936 - DNA, 185 bp, Homo sapiens
tttgacttaaattataatatttcatatcaaatagcaagtcttaacgagacaatgactacaattccatttgatttcagtggactttgaagatggatcacctctctcattcagatgaaattctttggagagaattttatttccaaagtaaggattttcatcaaaataaaaatctattcagcaatttg

SEQ ID NO: 336937 - DNA, 408 bp, Homo sapiens
tttgacttaaattataatatttcatatcaaatagcaagtcttaacgagacaatgactacaattccatttgatttcagtggactttgaagatggatcacctctctcattcagatgaaattctttggagagaattttatttccaaagtaaggattttcatcaaaataaaaatctattcagcaatttgatttaatgtcatcaaattccatcacttcgactctggtcaagtaatgcactgcctcttcgtcctcctccccaagcagtgcagacacttttggatggttaacaaatgttgttacccaaaaatctgggattttggcaatcaattctgacctcttctgagaaaattatttacggagtttgttatatttctgttctactttcaaaatctcctcactggcttgttcatt

SEQ ID NO: 336938 - DNA, 6256 bp, Homo sapiens
  misc_feature (1642)..(1642): n is a, c, g, or t
gcccggtggcagctgtggggtctagggctcagacgggggccattttgccagaggctgcctcccggagttgggggcggcctggcggcaggctgaagctgttcttttgcctcttctgcagcttggggcttggagaggatctggaagtctgggctccatcgagccctttggagacggcaatggtttcttccaaccaccaccacctgacaaccctgcatggcggctgccccctccgcgctgcttctgctgccgccctttccagtcctctctacctatcggctccagagccgcagtcgtccttccgccccagagaccgatgatagtcgagttgggggcattatgagaggagagaaaaactactacttccgtggagctgcgggggaccacggttcctgccccactacaacttcgcctctggcctcggccctcttgatgccctcggaggcagtctcaagcagctggtctgagtctggaggcggtttgtcagggggagatgaagaggacactcggctccttcaactcctccgcactgcccgggatccttctgaggccttccaggctttgcaagctgctttgccgcggcggggcggtcgacttggcttcccccgacgcaaggaagctttgtatcgggcactgggccgagtgcttgtggaaggaggtagtgatgagaagcggctctgcttgcaacttctctcggacgttctccggggtcagggggaggcaggccagcttgaagaggcctttagcttagcacttttgcctcaactagttgtctcgttacgggaagagaatccagccctgcggaaagatgcgctgcagatccttcatatatgtctgaaacgtagtcctggagaggtgctgagaacgcttatacaacaaggactggaaagtaccgatgcccgacttagagcttccacagcactactgcttcccatcttgcttactactgaggacttgttgcttggtctggatctcaccgaggtgataatatccctagcccgaaagcttggtgatcaggagacagaagaagaatctgagacagctttctccgcacttcaacaaattggggagcgacttggccaagacaggtttcaatcttacatttctcgtctgccctctgccctgaggagacactacaatcgccgcctggagtcccagtttggaagtcaggttccttattatttggaacttgaagcctctggatttcctgaagatccccttccctgtgcagtgactctttccaacagcaatcttaaatttgggattattcctcaggagctgcattcacgattattggatcaggaagactataagaaccggacccaggccgtcgaagaactaaagcaggtgctgggaaaatttaaccctagttctactcctcattctagtcttgttggcttcattagtttgctatataatttgttagacgattctaacttcaaagtggtgcatggcacacttgaagtcctgcatttactggttattcgccttggagagcaggtacagcagttcttgggaccagttatagcagcttctgtcaaagtgctggcggacaacaagttggtgatcaaacaagaatacatgaaaatcttcctcaagctaatgaaggaagtaggacctcagcaggtgctttgtttactcctgnaacatctcaaacataagcattccagagtgagagaggaggtggtgaacatttgcatctgctccctgctgacctatcctagtgaggattttgacttgcccaaactgtcctttgatcttgccccagctcttgtagatagcaaacgcagggtacgccaagcagctttagaagcttttgccgtattggcatcatcaatgggctcaggtaaaaccagcatcctttttaaagctgtggatacagttgaactgcaagataatggagatggagtgatgaatgctgtgcaggccagattggctaggaaaaccttaccaaggctcacagagcagggatttgtggaatatgcagtactgatgccatcttctgccgggggtaggtcaaaccatttggcacatggagcagatacggactggcttttggctggtaacagaactcagagtgcacactgtcactgtggtgaccacgtgagggatagcatgcacatttatggatcttacagcccaactatctgtacccgaagggtattaagtgcaggaaaaggaaaaaataaattaccatgggaaaatgagcaacctggaatcatgggagaaaaccagacctccacttccaaggatatagagcagttttcaacatatgatttcatcccatctgcaaaattaaagctttctcaaggaatgccagtcaatgatgatttatgttttagcagaaaaagagtatcaagaaacttatttcagaatagtcgggattttaacccagattgtcttcctttatgtgctgctggtactactgggactcatcaaacaaatctttctgggaaatgtgcacaacttggattttcacaaatatgtggtaaaactggcagtgtgggttctgacttacaattcctagggacaactagcagtcatcaagaaaaagtgtatgctagcctcaattttggcagtaagacacagcaaacatttggtagtcaaacagagtgtacttcctcaaatggtcaaaatccaagtccaggagcttacatccttccatcctatcctgtctcatcacctcgaactagtccaaagcatacatctcctcttattatatctccaaagaagtctcaagataattctgttaatttctcaaattcctggcctcttaaaagcttcgaaggactatcaaagccaagtccacagaagaagcttgtcagccaaaaatcgtctgatcctacgggtagaaatcatggagaaaattctcaagaaaaacctccagttcagcttacacctgccttggtgagatcgccatcttcccgacgaggtctaaatgggacaaagcctgttcctcccataccaaggggaataagccttttgcctgataaagctgatttaagcacagtgggacacaaaaagaaagagcctgatgatatttggaagtgtgaaaaagatagtcttccaattgatctttcagaattaaatttcaaggataaagatttggatcaagaagagatgcatagctctcttaggtcccttcgtaatagtgcagctaagaaaagagcaaaactgagtggcagtacttcagatcttgaaagccctgattctgcaatgaagctcgacttgacgatggactccccgtctctgtcttcctcaccaaacatcaattcttacagtgaaagtggagtttacagccaagaatcattgacttcttctctgtctacaactccccaggggaagagaataatgtcagacatatttccaacatttgggtcaaaaccttgtccaacaagactttcttctgcaaagaaaaaaatttctcatattgctgaacaaagccccagtgcagggtcatcatcaaatccacagcaaatttccagttttgacttcacaaccacaaaggctttatcagaagactcagtagtagttgttggaaaaggcgtatttggaagtttaagttcagcaccagcaacctgcagccaatcagtgatatcttctgtggaaaatggggatacattttcaattaaacaaagtattgaaccaccatcagggatttatggaagatcagtccagcaaaatatttcatcatatcttgatgttgagaatgaaaaagatgctaaagtttctatttctaaatctacttataacaagatgagacaaaagagaaaagaagagaaagaactgtttcacaataaagattgtgaaaagaaggaaaaaaattcctgggaacgaatgagacatacaggaactgagaaaatggcatctgaaagtgaaacacctactggagctatttcacagtataaagaaaggatgccttctgtcactcatagtccagaaataatggatctgtcagaactacgaccattctctaaaccagaaatagcactgacagaagccctgaggcttttggctgatgaggattgggagaagaaaattgagggactgaattttattagatgcttagctgcttttcattctgagatactgaacacaaagttgcatgaaacaaattttgcagttgttcaagaggtgaaaaatttacgttctggagtttctcgtgctgctgtggtctgtttaagtgatcttttcacttatttgaaaaagagcatggatcaagagctagataccacagtaaaagttttgttgcacaaggctggtgaatcaaatacatttataagagaagatgttgacaaagcattgagagctatggttaataatgtaactcctgcacgtgcagttgtttctcttatcaatggtggacaaaggtattatggtcgaaagatgctgttcttcatgatgtgtcatcctaactttgaaaaaatgcttgaaaagtatgtcccatctaaagatttgccatatattaaggactctgttagaaacttacagcaaaagggtttgggggagataccattagatactccttcagcaaaaggaagacgatctcatactggcagtgttggaaatacaagatcatcatctgtttctagagatgctttcaattcagctgaaagagctgtaactgaagttcgtgaagtcaccagaaaatcagtccctcgtaattccttagaaagtgctgagtaccttaaactcataactggcttattaaatgcaaaagactttcgtgatcgtattaatgggattaagcagcttttatcagatacagaaaataatcaagaccttgttgttggaaacattgtgaagatttttgatgcttttaaatctcgacttcatgattctaatagtaaagtaaatctggtggctctggaaacaatgcacaaaatgattcctctacttagagaccacttatctcctataatcaacatgctaattccagcaatagtggataacaatctgaattccaagaatccaggcatctatgcggctgctacaaatgttgttcaggcactgagtcagcatgtagacaattacttacttctacagccattttgcacaaaagctcagtttttaaatggaaaagcaaaacaggacatgacggaaaagcttgctgatattgttacggaactttatcaaaggaagccgcatgccacagagcagaaagtgttggttgttttatggcatctcttaggaaatatgacaaatagtggctctctgcctggagctggaggaaatatacgaacagccacagctaaattatcaaaagcactctttgcacagatgggtcagaatctgttaaatcaggctgcatctcaaccaccacatatcaaaaagagtttggaggaattactcgatatgacaattttaaatgaattatgaatcttcgataaaatactgtatgatgaacaaaagtgtttacatgatgacaaatggaactttctaaaagttatgttatcagtgcctgcacttcacatccagcaaattaagtcaatggctatttttatttgcagcctatgagtacacatctgtcctatatcaaccttaccacttatattcatcacataaaaacctaaaatattcatgaataattcatgaaatctgagtcacatgggatgaattcaattttaatatttttgagaaaagtcctgctcatttgcactattctatagaaactacaatttgttgccctatatgtaaaattagaattgtaattaaaaatacacattttattatgtaatcatgttctggtatgtctcatttctcagccttattttataacgtggaagtcattgaactatgttatcagaaactaagtttgtatattatttgtgaaaaacatgtatttctgaatcagtccgctaatatgattgtgcagtattagcttgcttttgctgctgtgttaatgtcatatatttgcttaccttttgggttcaattatctacataattgtgaaatttaacaagttataataaagcatgacaaccaaagttttagaaaacattaaacattttaaatgcacgtttaaaaaacgtgttgaatgtaacccccctatttttgtgtgcaaacactaaattttattgctttatgttttgacctttataaaggtgttattctgctgcccagttttgtaattctcaaaaatagtgccaggtcttctatagcttttttcagaattcatgggcttacaagtactgtatgcatctttaaaaagaaaaggaatgttataaaataaaaggatttatttctttaaaaaaaaaaa

SEQ ID NO: 336939 - DNA, 562 bp, Homo sapiens
tagcatagtttgaggggttacgctgctccgtcagatcattgtttttgtcatttgtattctctccttccttgttgccagagtctgctgtaggatggtaaggaacagtaaagggttggggtgaagtagtaagaaaaaaacaattagcatttctcttctggaatgaaaagtactgttggtgtacccgactaaatatggatgtttatctgtatcattatatatttgataaattaaaatttattctaacctgaatttcataattggatctaagttattttgtcatatttattaccaggaagaattaacacaaatttgctaatttatgattctgttcttatagttttcaacatatgatttcatcccatctgcaaaattaaagctttctcaaggaatgccagtcaatgatgatttatgttttagcagaaaaagagtatcaagaaacttatttcagaatagtcgggattttaacccagattgtcttcctttatgtgctgctggtaagtacaagttgctgatgatggtcatgttgaactaacagacttctcttaacttcatagtgcattca

SEQ ID NO: 336940 - DNA, 745 bp, Homo sapiens
gtgaaggaattactttcaagtattccattatcactgaccatgcattccagcctgggcgacagagcgagactccatctcaaaaaaaaaaaaaaaaggaaaggaaggtttaagtgcctagtccattctagtattgcagttacaaacatttataatgacttaatgaacgtgtgaataaattgtaaattctttgtatgaaataaattttcagttttaaaagactatgttacaatatcctaagatactacataataagcaaatatgtttaagtatttgttttgttttttgggggatttacagggtcatcatcaaatccacagcaaatttccagttttgacttcacaaccacaaaggctttatcagaagactcagtagtagttgttggaaaaggtatttcaaagttatttcgcttcttaattatatgtattcatcatatagaagcaaagcctatcaataaggaatagaaaagaatgtgattcaagtgttgagtggaacttctttttaaaaatgtattacattatcttcattaaaataattagaagtgaatacttaccttcacatttctatcttctaatgaaactatagtaaattcatgtcattaattttcagagagatgtattatgtgacagctgcagtttaggtacttctaagactattttaggatagcttacttagttttagcatagtttaaattcaagtagcccttatttatcagcgtaataatcaatataaattaatataattatct

SEQ ID NO: 336941 - DNA, 4334 bp, Homo sapiens
tagcatagtttgaggggttacgctgctccgtcagatcattgtttttgtcatttgtattctctccttccttgttgccagagtctgctgtaggatggtaaggaacagtaaagggttggggtgaagtagtaagaaaaaaacaattagcatttctcttctggaatgaaaagtactgttggtgtacccgactaaatatggatgtttatctgtatcattatatatttgataaattaaaatttattctaacctgaatttcataattggatctaagttattttgtcatatttattaccaggaagaattaacacaaatttgctaatttatgattctgttcttatagttttcaacatatgatttcatcccatctgcaaaattaaagctttctcaaggaatgccagtcaatgatgatttatgttttagcagaaaaagagtatcaagaaacttatttcagaatagtcgggattttaacccagattgtcttcctttatgtgctgctggtactactgggactcatcaaacaaatctttctgggaaatgtgcacaacttggattttcacaaatatgtggtaaaactggcagtgtgggttctgacttacaattcctagggacaactagcagtcatcaagaaaaagtgtatgctagcctcaattttggcagtaagacacagcaaacatttggtagtcaaacagagtgtacttcctcaaatggtcaaaatccaagtccaggagcttacatccttccatcctatcctgtctcatcacctcgaactagtccaaagcatacatctcctcttattatatctccaaagaagtctcaagataattctgttaatttctcaaattcctggcctcttaaaagcttcgaaggactatcaaagccaagtccacagaagaagcttgtcagccaaaaatcgtctgatcctacgggtagaaatcatggagaaaattctcaagaaaaacctccagttcagcttacacctgccttggtgagatcgccatcttcccgacgaggtctaaatgggacaaagcctgttcctcccataccaaggggaataagccttttgcctgataaagctgatttaagcacagtgggacacaaaaagaaagagcctgatgatatttggaagtgtgaaaaagatagtcttccaattgatctttcagaattaaatttcaaggataaagatttggatcaagaagagatgcatagctctcttaggtcccttcgtaatagtgcagctaagaaaagagcaaaactgagtggcagtacttcagatcttgaaagccctgattctgcaatgaagctcgacttgacgatggactccccgtctctgtcttcctcaccaaacatcaattcttacagtgaaagtggagtttacagccaagaatcattgacttcttctctgtctacaactccccaggggaagagaataatgtcagacatatttccaacatttgggtcaaaaccttgtccaacaagactttcttctgcaaagaaaaaaatttctcatattgctgaacaaagccccagtgcagggtcatcatcaaatccacagcaaatttccagttttgacttcacaaccacaaaggctttatcagaagactcagtagtagttgttggaaaaggcgtatttggaagtttaagttcagcaccagcaacctgcagccaatcagtgatatcttctgtggaaaatggggatacattttcaattaaacaaagtattgaaccaccatcagggatttatggaagatcagtccagcaaaatatttcatcatatcttgatgttgagaatgaaaaagatgctaaagtttctatttctaaatctacttataacaagatgagacaaaagagaaaagaagagaaagaactgtttcacaataaagattgtgaaaagaaggaaaaaaattcctgggaacgaatgagacatacaggaactgagaaaatggcatctgaaagtgaaacacctactggagctatttcacagtataaagaaaggatgccttctgtcactcatagtccagaaataatggatctgtcagaactacgaccattctctaaaccagaaatagcactgacagaagccctgaggcttttggctgatgaggattgggagaagaaaattgagggactgaattttattagatgcttagctgcttttcattctgagatactgaacacaaagttgcatgaaacaaattttgcagttgttcaagaggtgaaaaatttacgttctggagtttctcgtgctgctgtggtctgtttaagtgatcttttcacttatttgaaaaagagcatggatcaagagctagataccacagtaaaagttttgttgcacaaggctggtgaatcaaatacatttataagagaagatgttgacaaagcattgagagctatggttaataatgtaactcctgcacgtgcagttgtttctcttatcaatggtggacaaaggtattatggtcgaaagatgctgttcttcatgatgtgtcatcctaactttgaaaaaatgcttgaaaagtatgtcccatctaaagatttgccatatattaaggactctgttagaaacttacagcaaaagggtttgggggagataccattagatactccttcagcaaaaggaagacgatctcatactggcagtgttggaaatacaagatcatcatctgtttctagagatgctttcaattcagctgaaagagctgtaactgaagttcgtgaagtcaccagaaaatcagtccctcgtaattccttagaaagtgctgagtaccttaaactcataactggcttattaaatgcaaaagactttcgtgatcgtattaatgggattaagcagcttttatcagatacagaaaataatcaagaccttgttgttggaaacattgtgaagatttttgatgcttttaaatctcgacttcatgattctaatagtaaagtaaatctggtggctctggaaacaatgcacaaaatgattcctctacttagagaccacttatctcctataatcaacatgctaattccagcaatagtggataacaatctgaattccaagaatccaggcatctatgcggctgctacaaatgttgttcaggcactgagtcagcatgtagacaattacttacttctacagccattttgcacaaaagctcagtttttaaatggaaaagcaaaacaggacatgacggaaaagcttgctgatattgttacggaactttatcaaaggaagccgcatgccacagagcagaaagtgttggttgttttatggcatctcttaggaaatatgacaaatagtggctctctgcctggagctggaggaaatatacgaacagccacagctaaattatcaaaagcactctttgcacagatgggtcagaatctgttaaatcaggctgcatctcaaccaccacatatcaaaaagagtttggaggaattactcgatatgacaattttaaatgaattatgaatcttcgataaaatactgtatgatgaacaaaagtgtttacatgatgacaaatggaactttctaaaagttatgttatcagtgcctgcacttcacatccagcaaattaagtcaatggctatttttatttgcagcctatgagtacacatctgtcctatatcaaccttaccacttatattcatcacataaaaacctaaaatattcatgaataattcatgaaatctgagtcacatgggatgaattcaattttaatatttttgagaaaagtcctgctcatttgcactattctatagaaactacaatttgttgccctatatgtaaaattagaattgtaattaaaaatacacattttattatgtaatcatgttctggtatgtctcatttctcagccttattttataacgtggaagtcattgaactatgttatcagaaactaagtttgtatattatttgtgaaaaacatgtatttctgaatcagtccgctaatatgattgtgcagtattagcttgcttttgctgctgtgttaatgtcatatatttgcttaccttttgggttcaattatctacataattgtgaaatttaacaagttataataaagcatgacaaccaaagttttagaaaacattaaacattttaaatgcacgtttaaaaaacgtgttgaatgtaacccccctatttttgtgtgcaaacactaaattttattgctttatgttttgacctttataaaggtgttattctgctgcccagttttgtaattctcaaaaatagtgccaggtcttctatagcttttttcagaattcatgggcttacaagtactgtatgcatctttaaaaagaaaaggaatgttataaaataaaaggatttatttctttaaaaaaaaaaa

SEQ ID NO: 336942 - DNA, 5950 bp, Homo sapiens
  misc_feature (1642)..(1642): n is a, c, g, or t
gcccggtggcagctgtggggtctagggctcagacgggggccattttgccagaggctgcctcccggagttgggggcggcctggcggcaggctgaagctgttcttttgcctcttctgcagcttggggcttggagaggatctggaagtctgggctccatcgagccctttggagacggcaatggtttcttccaaccaccaccacctgacaaccctgcatggcggctgccccctccgcgctgcttctgctgccgccctttccagtcctctctacctatcggctccagagccgcagtcgtccttccgccccagagaccgatgatagtcgagttgggggcattatgagaggagagaaaaactactacttccgtggagctgcgggggaccacggttcctgccccactacaacttcgcctctggcctcggccctcttgatgccctcggaggcagtctcaagcagctggtctgagtctggaggcggtttgtcagggggagatgaagaggacactcggctccttcaactcctccgcactgcccgggatccttctgaggccttccaggctttgcaagctgctttgccgcggcggggcggtcgacttggcttcccccgacgcaaggaagctttgtatcgggcactgggccgagtgcttgtggaaggaggtagtgatgagaagcggctctgcttgcaacttctctcggacgttctccggggtcagggggaggcaggccagcttgaagaggcctttagcttagcacttttgcctcaactagttgtctcgttacgggaagagaatccagccctgcggaaagatgcgctgcagatccttcatatatgtctgaaacgtagtcctggagaggtgctgagaacgcttatacaacaaggactggaaagtaccgatgcccgacttagagcttccacagcactactgcttcccatcttgcttactactgaggacttgttgcttggtctggatctcaccgaggtgataatatccctagcccgaaagcttggtgatcaggagacagaagaagaatctgagacagctttctccgcacttcaacaaattggggagcgacttggccaagacaggtttcaatcttacatttctcgtctgccctctgccctgaggagacactacaatcgccgcctggagtcccagtttggaagtcaggttccttattatttggaacttgaagcctctggatttcctgaagatccccttccctgtgcagtgactctttccaacagcaatcttaaatttgggattattcctcaggagctgcattcacgattattggatcaggaagactataagaaccggacccaggccgtcgaagaactaaagcaggtgctgggaaaatttaaccctagttctactcctcattctagtcttgttggcttcattagtttgctatataatttgttagacgattctaacttcaaagtggtgcatggcacacttgaagtcctgcatttactggttattcgccttggagagcaggtacagcagttcttgggaccagttatagcagcttctgtcaaagtgctggcggacaacaagttggtgatcaaacaagaatacatgaaaatcttcctcaagctaatgaaggaagtaggacctcagcaggtgctttgtttactcctgnaacatctcaaacataagcattccagagtgagagaggaggtggtgaacatttgcatctgctccctgctgacctatcctagtgaggattttgacttgcccaaactgtcctttgatcttgccccagctcttgtagatagcaaacgcagggtacgccaagcagctttagaagcttttgccgtattggcatcatcaatgggctcaggtaaaaccagcatcctttttaaagctgtggatacagttgaactgcaagataatggagatggagtgatgaatgctgtgcaggccagattggctaggaaaaccttaccaaggctcacagagcagggatttgtggaatatgcagtactgatgccatcttctgccgggggtaggtcaaaccatttggcacatggagcagatacggactggcttttggctggtaacagaactcagagtgcacactgtcactgtggtgaccacgtgagggatagcatgcacatttatggatcttacagcccaactatctgtacccgaagggtattaagtgcaggaaaaggaaaaaataaattaccatgggaaaatgagcaacctggaatcatgggagaaaaccagacctccacttccaaggatatagagcagttttcaacatatgatttcatcccatctgcaaaattaaagctttctcaaggaatgccagtcaatgatgatttatgttttagcagaaaaagagtatcaagaaacttatttcagaatagtcgggattttaacccagattgtcttcctttatgtgctgctggtactactgggactcatcaaacaaatctttctgggaaatgtgcacaacttggattttcacaaatatgtggtaaaactggcagtgtgggttctgacttacaattcctagggacaactagcagtcatcaagaaaaaggagaaaattctcaagaaaaacctccagttcagcttacacctgccttggtgagatcgccatcttcccgacgaggtctaaatgggacaaagcctgttcctcccataccaaggggaataagccttttgcctgataaagctgatttaagcacagtgggacacaaaaagaaagagcctgatgatatttggaagtgtgaaaaagatagtcttccaattgatctttcagaattaaatttcaaggataaagatttggatcaagaagagatgcatagctctcttaggtcccttcgtaatagtgcagctaagaaaagagcaaaactgagtggcagtacttcagatcttgaaagccctgattctgcaatgaagctcgacttgacgatggactccccgtctctgtcttcctcaccaaacatcaattcttacagtgaaagtggagtttacagccaagaatcattgacttcttctctgtctacaactccccaggggaagagaataatgtcagacatatttccaacatttgggtcaaaaccttgtccaacaagactttcttctgcaaagaaaaaaatttctcatattgctgaacaaagccccagtgcagggtcatcatcaaatccacagcaaatttccagttttgacttcacaaccacaaaggctttatcagaagactcagtagtagttgttggaaaaggcgtatttggaagtttaagttcagcaccagcaacctgcagccaatcagtgatatcttctgtggaaaatggggatacattttcaattaaacaaagtattgaaccaccatcagggatttatggaagatcagtccagcaaaatatttcatcatatcttgatgttgagaatgaaaaagatgctaaagtttctatttctaaatctacttataacaagatgagacaaaagagaaaagaagagaaagaactgtttcacaataaagattgtgaaaagaaggaaaaaaattcctgggaacgaatgagacatacaggaactgagaaaatggcatctgaaagtgaaacacctactggagctatttcacagtataaagaaaggatgccttctgtcactcatagtccagaaataatggatctgtcagaactacgaccattctctaaaccagaaatagcactgacagaagccctgaggcttttggctgatgaggattgggagaagaaaattgagggactgaattttattagatgcttagctgcttttcattctgagatactgaacacaaagttgcatgaaacaaattttgcagttgttcaagaggtgaaaaatttacgttctggagtttctcgtgctgctgtggtctgtttaagtgatcttttcacttatttgaaaaagagcatggatcaagagctagataccacagtaaaagttttgttgcacaaggctggtgaatcaaatacatttataagagaagatgttgacaaagcattgagagctatggttaataatgtaactcctgcacgtgcagttgtttctcttatcaatggtggacaaaggtattatggtcgaaagatgctgttcttcatgatgtgtcatcctaactttgaaaaaatgcttgaaaagtatgtcccatctaaagatttgccatatattaaggactctgttagaaacttacagcaaaagggtttgggggagataccattagatactccttcagcaaaaggaagacgatctcatactggcagtgttggaaatacaagatcatcatctgtttctagagatgctttcaattcagctgaaagagctgtaactgaagttcgtgaagtcaccagaaaatcagtccctcgtaattccttagaaagtgctgagtaccttaaactcataactggcttattaaatgcaaaagactttcgtgatcgtattaatgggattaagcagcttttatcagatacagaaaataatcaagaccttgttgttggaaacattgtgaagatttttgatgcttttaaatctcgacttcatgattctaatagtaaagtaaatctggtggctctggaaacaatgcacaaaatgattcctctacttagagaccacttatctcctataatcaacatgctaattccagcaatagtggataacaatctgaattccaagaatccaggcatctatgcggctgctacaaatgttgttcaggcactgagtcagcatgtagacaattacttacttctacagccattttgcacaaaagctcagtttttaaatggaaaagcaaaacaggacatgacggaaaagcttgctgatattgttacggaactttatcaaaggaagccgcatgccacagagcagaaagtgttggttgttttatggcatctcttaggaaatatgacaaatagtggctctctgcctggagctggaggaaatatacgaacagccacagctaaattatcaaaagcactctttgcacagatgggtcagaatctgttaaatcaggctgcatctcaaccaccacatatcaaaaagagtttggaggaattactcgatatgacaattttaaatgaattatgaatcttcgataaaatactgtatgatgaacaaaagtgtttacatgatgacaaatggaactttctaaaagttatgttatcagtgcctgcacttcacatccagcaaattaagtcaatggctatttttatttgcagcctatgagtacacatctgtcctatatcaaccttaccacttatattcatcacataaaaacctaaaatattcatgaataattcatgaaatctgagtcacatgggatgaattcaattttaatatttttgagaaaagtcctgctcatttgcactattctatagaaactacaatttgttgccctatatgtaaaattagaattgtaattaaaaatacacattttattatgtaatcatgttctggtatgtctcatttctcagccttattttataacgtggaagtcattgaactatgttatcagaaactaagtttgtatattatttgtgaaaaacatgtatttctgaatcagtccgctaatatgattgtgcagtattagcttgcttttgctgctgtgttaatgtcatatatttgcttaccttttgggttcaattatctacataattgtgaaatttaacaagttataataaagcatgacaaccaaagttttagaaaacattaaacattttaaatgcacgtttaaaaaacgtgttgaatgtaacccccctatttttgtgtgcaaacactaaattttattgctttatgttttgacctttataaaggtgttattctgctgcccagttttgtaattctcaaaaatagtgccaggtcttctatagcttttttcagaattcatgggcttacaagtactgtatgcatctttaaaaagaaaaggaatgttataaaataaaaggatttatttctttaaaaaaaaaaa

SEQ ID NO: 336943 - DNA, 6023 bp, Homo sapiens
  misc_feature (1642)..(1642): n is a, c, g, or t
gcccggtggcagctgtggggtctagggctcagacgggggccattttgccagaggctgcctcccggagttgggggcggcctggcggcaggctgaagctgttcttttgcctcttctgcagcttggggcttggagaggatctggaagtctgggctccatcgagccctttggagacggcaatggtttcttccaaccaccaccacctgacaaccctgcatggcggctgccccctccgcgctgcttctgctgccgccctttccagtcctctctacctatcggctccagagccgcagtcgtccttccgccccagagaccgatgatagtcgagttgggggcattatgagaggagagaaaaactactacttccgtggagctgcgggggaccacggttcctgccccactacaacttcgcctctggcctcggccctcttgatgccctcggaggcagtctcaagcagctggtctgagtctggaggcggtttgtcagggggagatgaagaggacactcggctccttcaactcctccgcactgcccgggatccttctgaggccttccaggctttgcaagctgctttgccgcggcggggcggtcgacttggcttcccccgacgcaaggaagctttgtatcgggcactgggccgagtgcttgtggaaggaggtagtgatgagaagcggctctgcttgcaacttctctcggacgttctccggggtcagggggaggcaggccagcttgaagaggcctttagcttagcacttttgcctcaactagttgtctcgttacgggaagagaatccagccctgcggaaagatgcgctgcagatccttcatatatgtctgaaacgtagtcctggagaggtgctgagaacgcttatacaacaaggactggaaagtaccgatgcccgacttagagcttccacagcactactgcttcccatcttgcttactactgaggacttgttgcttggtctggatctcaccgaggtgataatatccctagcccgaaagcttggtgatcaggagacagaagaagaatctgagacagctttctccgcacttcaacaaattggggagcgacttggccaagacaggtttcaatcttacatttctcgtctgccctctgccctgaggagacactacaatcgccgcctggagtcccagtttggaagtcaggttccttattatttggaacttgaagcctctggatttcctgaagatccccttccctgtgcagtgactctttccaacagcaatcttaaatttgggattattcctcaggagctgcattcacgattattggatcaggaagactataagaaccggacccaggccgtcgaagaactaaagcaggtgctgggaaaatttaaccctagttctactcctcattctagtcttgttggcttcattagtttgctatataatttgttagacgattctaacttcaaagtggtgcatggcacacttgaagtcctgcatttactggttattcgccttggagagcaggtacagcagttcttgggaccagttatagcagcttctgtcaaagtgctggcggacaacaagttggtgatcaaacaagaatacatgaaaatcttcctcaagctaatgaaggaagtaggacctcagcaggtgctttgtttactcctgnaacatctcaaacataagcattccagagtgagagaggaggtggtgaacatttgcatctgctccctgctgacctatcctagtgaggattttgacttgcccaaactgtcctttgatcttgccccagctcttgtagatagcaaacgcagggtacgccaagcagctttagaagcttttgccgtattggcatcatcaatgggctcaggtaaaaccagcatcctttttaaagctgtggatacagttgaactgcaagataatggagatggagtgatgaatgctgtgcaggccagattggctaggaaaaccttaccaaggctcacagagcagggatttgtggaatatgcagtactgatgccatcttctgccgggggtaggtcaaaccatttggcacatggagcagatacggactggcttttggctggtaacagaactcagagtgcacactgtcactgtggtgaccacgtgagggatagcatgcacatttatggatcttacagcccaactatctgtacccgaagggtattaagtgcaggaaaaggaaaaaataaattaccatgggaaaatgagcaacctggaatcatgggagaaaaccagacctccacttccaaggatatagagcagttttcaacatatgatttcatcccatctgcaaaattaaagctttctcaaggaatgccagtcaatgatgatttatgttttagcagaaaaagagtatcaagaaacttatttcagaatagtcgggattttaacccagattgtcttcctttatgtgctgctggtactactgggactcatcaaacaaatctttctgggaaatgtgcacaacttggattttcacaaatatgtggtaaaactggcagtgtgggttctgacttacaattcctagggacaactagcagtcatcaagaaaaagtgtatgctagcctcaattttggcagtaagacacagcaaacatttggtagtcaaacagagtgtacttcctcaaatggtcaaaatccaagtccaggagcttacatccttccatcctatcctgtctcatcacctcgaactagtccaaagcatacatctcctcttattatatctccaaagaagtctcaagataattctgttaatttctcaaattcctggcctcttaaaagcttcgaaggactatcaaagccaagtccacagaagaagcttgtcagccaaaaatcgtctgatcctacgggtagaaatcatggagaaaattctcaagaaaaacctccagttcagcttacacctgccttggtgagatcgccatcttcccgacgaggtctaaatgggacaaagcctgttcctcccataccaaggggaataagccttttgcctgataaagctgatttaagcacagtgggacacaaaaagaaagagcctgatgatatttggaagtgtgaaaaagatagtcttccaattgatctttcagaattaaatttcaaggataaagatttggatcaagaagaggtcagacatatttccaacatttgggtcaaaaccttgtccaacaagactttcttctgcaaagaaaaaaatttctcatattgctgaacaaagccccagtgcagggtcatcatcaaatccacagcaaatttccagttttgacttcacaaccacaaaggctttatcagaagactcagtagtagttgttggaaaaggcgtatttggaagtttaagttcagcaccagcaacctgcagccaatcagtgatatcttctgtggaaaatggggatacattttcaattaaacaaagtattgaaccaccatcagggatttatggaagatcagtccagcaaaatatttcatcatatcttgatgttgagaatgaaaaagatgctaaagtttctatttctaaatctacttataacaagatgagacaaaagagaaaagaagagaaagaactgtttcacaataaagattgtgaaaagaaggaaaaaaattcctgggaacgaatgagacatacaggaactgagaaaatggcatctgaaagtgaaacacctactggagctatttcacagtataaagaaaggatgccttctgtcactcatagtccagaaataatggatctgtcagaactacgaccattctctaaaccagaaatagcactgacagaagccctgaggcttttggctgatgaggattgggagaagaaaattgagggactgaattttattagatgcttagctgcttttcattctgagatactgaacacaaagttgcatgaaacaaattttgcagttgttcaagaggtgaaaaatttacgttctggagtttctcgtgctgctgtggtctgtttaagtgatcttttcacttatttgaaaaagagcatggatcaagagctagataccacagtaaaagttttgttgcacaaggctggtgaatcaaatacatttataagagaagatgttgacaaagcattgagagctatggttaataatgtaactcctgcacgtgcagttgtttctcttatcaatggtggacaaaggtattatggtcgaaagatgctgttcttcatgatgtgtcatcctaactttgaaaaaatgcttgaaaagtatgtcccatctaaagatttgccatatattaaggactctgttagaaacttacagcaaaagggtttgggggagataccattagatactccttcagcaaaaggaagacgatctcatactggcagtgttggaaatacaagatcatcatctgtttctagagatgctttcaattcagctgaaagagctgtaactgaagttcgtgaagtcaccagaaaatcagtccctcgtaattccttagaaagtgctgagtaccttaaactcataactggcttattaaatgcaaaagactttcgtgatcgtattaatgggattaagcagcttttatcagatacagaaaataatcaagaccttgttgttggaaacattgtgaagatttttgatgcttttaaatctcgacttcatgattctaatagtaaagtaaatctggtggctctggaaacaatgcacaaaatgattcctctacttagagaccacttatctcctataatcaacatgctaattccagcaatagtggataacaatctgaattccaagaatccaggcatctatgcggctgctacaaatgttgttcaggcactgagtcagcatgtagacaattacttacttctacagccattttgcacaaaagctcagtttttaaatggaaaagcaaaacaggacatgacggaaaagcttgctgatattgttacggaactttatcaaaggaagccgcatgccacagagcagaaagtgttggttgttttatggcatctcttaggaaatatgacaaatagtggctctctgcctggagctggaggaaatatacgaacagccacagctaaattatcaaaagcactctttgcacagatgggtcagaatctgttaaatcaggctgcatctcaaccaccacatatcaaaaagagtttggaggaattactcgatatgacaattttaaatgaattatgaatcttcgataaaatactgtatgatgaacaaaagtgtttacatgatgacaaatggaactttctaaaagttatgttatcagtgcctgcacttcacatccagcaaattaagtcaatggctatttttatttgcagcctatgagtacacatctgtcctatatcaaccttaccacttatattcatcacataaaaacctaaaatattcatgaataattcatgaaatctgagtcacatgggatgaattcaattttaatatttttgagaaaagtcctgctcatttgcactattctatagaaactacaatttgttgccctatatgtaaaattagaattgtaattaaaaatacacattttattatgtaatcatgttctggtatgtctcatttctcagccttattttataacgtggaagtcattgaactatgttatcagaaactaagtttgtatattatttgtgaaaaacatgtatttctgaatcagtccgctaatatgattgtgcagtattagcttgcttttgctgctgtgttaatgtcatatatttgcttaccttttgggttcaattatctacataattgtgaaatttaacaagttataataaagcatgacaaccaaagttttagaaaacattaaacattttaaatgcacgtttaaaaaacgtgttgaatgtaacccccctatttttgtgtgcaaacactaaattttattgctttatgttttgacctttataaaggtgttattctgctgcccagttttgtaattctcaaaaatagtgccaggtcttctatagcttttttcagaattcatgggcttacaagtactgtatgcatctttaaaaagaaaaggaatgttataaaataaaaggatttatttctttaaaaaaaaaaa

SEQ ID NO: 336944 - DNA, 4186 bp, Homo sapiens
tgggtaatgcgtatactacaaatactgggaagaaagcaagccaggtctggagaaacgttccatgctgagagaaagagtgtaggaagaaactgcttttgcagatattcttcaacatacctgtcttttccctgttctttactagtctgtcttctgtcctttaattcctgccactaatctgattttctagtatcaaaagctgtatccctttcttgcctgcctacctcactgtacttaaacacttatatttatttccacctaaattacaccaacatttatgaaataaaatgtattcatgaaataaagttaacttttgcttttatgttttctcccttcctttcttcaaaaggtactactgggactcatcaaacaaatctttctgggaaatgtgcacaacttggattttcacaaatatgtggtaaaactggcagtgtgggttctgacttacaattcctagggacaactagcagtcatcaagaaaaagtgtatgctagcctcaattttggcagtaagacacagcaaacatttggtagtcaaacagagtgtacttcctcaaatggtcaaaatccaagtccaggagcttacatccttccatcctatcctgtctcatcacctcgaactagtccaaagcatacatctcctcttattatatctccaaagaagtctcaagataattctgttaatttctcaaattcctggcctcttaaaagcttcgaaggactatcaaagccaagtccacagaagaagcttgtcagccaaaaatcgtctgatcctacgggtagaaatcatggagaaaattctcaagaaaaacctccagttcagcttacacctgccttggtgagatcgccatcttcccgacgaggtctaaatgggacaaagcctgttcctcccataccaaggggaataagccttttgcctgataaagctgatttaagcacagtgggacacaaaaagaaagagcctgatgatatttggaagtgtgaaaaagatagtcttccaattgatctttcagaattaaatttcaaggataaagatttggatcaagaagagatgcatagctctcttaggtcccttcgtaatagtgcagctaagaaaagagcaaaactgagtggcagtacttcagatcttgaaagccctgattctgcaatgaagctcgacttgacgatggactccccgtctctgtcttcctcaccaaacatcaattcttacagtgaaagtggagtttacagccaagaatcattgacttcttctctgtctacaactccccaggggaagagaataatgtcagacatatttccaacatttgggtcaaaaccttgtccaacaagactttcttctgcaaagaaaaaaatttctcatattgctgaacaaagccccagtgcagggtcatcatcaaatccacagcaaatttccagttttgacttcacaaccacaaaggctttatcagaagactcagtagtagttgttggaaaaggcgtatttggaagtttaagttcagcaccagcaacctgcagccaatcagtgatatcttctgtggaaaatggggatacattttcaattaaacaaagtattgaaccaccatcagggatttatggaagatcagtccagcaaaatatttcatcatatcttgatgttgagaatgaaaaagatgctaaagtttctatttctaaatctacttataacaagatgagacaaaagagaaaagaagagaaagaactgtttcacaataaagattgtgaaaagaaggaaaaaaattcctgggaacgaatgagacatacaggaactgagaaaatggcatctgaaagtgaaacacctactggagctatttcacagtataaagaaaggatgccttctgtcactcatagtccagaaataatggatctgtcagaactacgaccattctctaaaccagaaatagcactgacagaagccctgaggcttttggctgatgaggattgggagaagaaaattgagggactgaattttattagatgcttagctgcttttcattctgagatactgaacacaaagttgcatgaaacaaattttgcagttgttcaagaggtgaaaaatttacgttctggagtttctcgtgctgctgtggtctgtttaagtgatcttttcacttatttgaaaaagagcatggatcaagagctagataccacagtaaaagttttgttgcacaaggctggtgaatcaaatacatttataagagaagatgttgacaaagcattgagagctatggttaataatgtaactcctgcacgtgcagttgtttctcttatcaatggtggacaaaggtattatggtcgaaagatgctgttcttcatgatgtgtcatcctaactttgaaaaaatgcttgaaaagtatgtcccatctaaagatttgccatatattaaggactctgttagaaacttacagcaaaagggtttgggggagataccattagatactccttcagcaaaaggaagacgatctcatactggcagtgttggaaatacaagatcatcatctgtttctagagatgctttcaattcagctgaaagagctgtaactgaagttcgtgaagtcaccagaaaatcagtccctcgtaattccttagaaagtgctgagtaccttaaactcataactggcttattaaatgcaaaagactttcgtgatcgtattaatgggattaagcagcttttatcagatacagaaaataatcaagaccttgttgttggaaacattgtgaagatttttgatgcttttaaatctcgacttcatgattctaatagtaaagtaaatctggtggctctggaaacaatgcacaaaatgattcctctacttagagaccacttatctcctataatcaacatgctaattccagcaatagtggataacaatctgaattccaagaatccaggcatctatgcggctgctacaaatgttgttcaggcactgagtcagcatgtagacaattacttacttctacagccattttgcacaaaagctcagtttttaaatggaaaagcaaaacaggacatgacggaaaagcttgctgatattgttacggaactttatcaaaggaagccgcatgccacagagcagaaagtgttggttgttttatggcatctcttaggaaatatgacaaatagtggctctctgcctggagctggaggaaatatacgaacagccacagctaaattatcaaaagcactctttgcacagatgggtcagaatctgttaaatcaggctgcatctcaaccaccacatatcaaaaagagtttggaggaattactcgatatgacaattttaaatgaattatgaatcttcgataaaatactgtatgatgaacaaaagtgtttacatgatgacaaatggaactttctaaaagttatgttatcagtgcctgcacttcacatccagcaaattaagtcaatggctatttttatttgcagcctatgagtacacatctgtcctatatcaaccttaccacttatattcatcacataaaaacctaaaatattcatgaataattcatgaaatctgagtcacatgggatgaattcaattttaatatttttgagaaaagtcctgctcatttgcactattctatagaaactacaatttgttgccctatatgtaaaattagaattgtaattaaaaatacacattttattatgtaatcatgttctggtatgtctcatttctcagccttattttataacgtggaagtcattgaactatgttatcagaaactaagtttgtatattatttgtgaaaaacatgtatttctgaatcagtccgctaatatgattgtgcagtattagcttgcttttgctgctgtgttaatgtcatatatttgcttaccttttgggttcaattatctacataattgtgaaatttaacaagttataataaagcatgacaaccaaagttttagaaaacattaaacattttaaatgcacgtttaaaaaacgtgttgaatgtaacccccctatttttgtgtgcaaacactaaattttattgctttatgttttgacctttataaaggtgttattctgctgcccagttttgtaattctcaaaaatagtgccaggtcttctatagcttttttcagaattcatgggcttacaagtactgtatgcatctttaaaaagaaaaggaatgttataaaataaaaggatttatttctttaaaaaaaaaaa

SEQ ID NO: 336945 - DNA, 6169 bp, Homo sapiens
  misc_feature (1642)..(1642): n is a, c, g, or t
gcccggtggcagctgtggggtctagggctcagacgggggccattttgccagaggctgcctcccggagttgggggcggcctggcggcaggctgaagctgttcttttgcctcttctgcagcttggggcttggagaggatctggaagtctgggctccatcgagccctttggagacggcaatggtttcttccaaccaccaccacctgacaaccctgcatggcggctgccccctccgcgctgcttctgctgccgccctttccagtcctctctacctatcggctccagagccgcagtcgtccttccgccccagagaccgatgatagtcgagttgggggcattatgagaggagagaaaaactactacttccgtggagctgcgggggaccacggttcctgccccactacaacttcgcctctggcctcggccctcttgatgccctcggaggcagtctcaagcagctggtctgagtctggaggcggtttgtcagggggagatgaagaggacactcggctccttcaactcctccgcactgcccgggatccttctgaggccttccaggctttgcaagctgctttgccgcggcggggcggtcgacttggcttcccccgacgcaaggaagctttgtatcgggcactgggccgagtgcttgtggaaggaggtagtgatgagaagcggctctgcttgcaacttctctcggacgttctccggggtcagggggaggcaggccagcttgaagaggcctttagcttagcacttttgcctcaactagttgtctcgttacgggaagagaatccagccctgcggaaagatgcgctgcagatccttcatatatgtctgaaacgtagtcctggagaggtgctgagaacgcttatacaacaaggactggaaagtaccgatgcccgacttagagcttccacagcactactgcttcccatcttgcttactactgaggacttgttgcttggtctggatctcaccgaggtgataatatccctagcccgaaagcttggtgatcaggagacagaagaagaatctgagacagctttctccgcacttcaacaaattggggagcgacttggccaagacaggtttcaatcttacatttctcgtctgccctctgccctgaggagacactacaatcgccgcctggagtcccagtttggaagtcaggttccttattatttggaacttgaagcctctggatttcctgaagatccccttccctgtgcagtgactctttccaacagcaatcttaaatttgggattattcctcaggagctgcattcacgattattggatcaggaagactataagaaccggacccaggccgtcgaagaactaaagcaggtgctgggaaaatttaaccctagttctactcctcattctagtcttgttggcttcattagtttgctatataatttgttagacgattctaacttcaaagtggtgcatggcacacttgaagtcctgcatttactggttattcgccttggagagcaggtacagcagttcttgggaccagttatagcagcttctgtcaaagtgctggcggacaacaagttggtgatcaaacaagaatacatgaaaatcttcctcaagctaatgaaggaagtaggacctcagcaggtgctttgtttactcctgnaacatctcaaacataagcattccagagtgagagaggaggtggtgaacatttgcatctgctccctgctgacctatcctagtgaggattttgacttgcccaaactgtcctttgatcttgccccagctcttgtagatagcaaacgcagggtacgccaagcagctttagaagcttttgccgtattggcatcatcaatgggctcaggtaaaaccagcatcctttttaaagctgtggatacagttgaactgcaagataatggagatggagtgatgaatgctgtgcaggccagattggctaggaaaaccttaccaaggctcacagagcagggatttgtggaatatgcagtactgatgccatcttctgccgggggtaggtcaaaccatttggcacatggagcagatacggactggcttttggctggtaacagaactcagagtgcacactgtcactgtggtgaccacgtgagggatagcatgcacatttatggatcttacagcccaactatctgtacccgaagggtattaagtgcaggaaaaggaaaaaataaattaccatgggaaaatgagcaacctggaatcatgggagaaaaccagacctccacttccaaggatatagagcagttttcaacatatgatttcatcccatctgcaaaattaaagctttctcaaggaatgccagtcaatgatgatttatgttttagcagaaaaagagtatcaagaaacttatttcagaatagtcgggattttaacccagattgtcttcctttatgtgctgctggtactactgggactcatcaaacaaatctttctgggaaatgtgcacaacttggattttcacaaatatgtggtaaaactggcagtgtgggttctgacttacaattcctagggacaactagcagtcatcaagaaaaagtgtatgctagcctcaattttggcagtaagacacagcaaacatttggtagtcaaacagagtgtacttcctcaaatggtcaaaatccaagtccaggagcttacatccttccatcctatcctgtctcatcacctcgaactagtccaaagcatacatctcctcttattatatctccaaagaagtctcaagataattctgttaatttctcaaattcctggcctcttaaaagcttcgaaggactatcaaagccaagtccacagaagaagcttgtcagccaaaaatcgtctgatcctacgggtagaaatcatggagaaaattctcaagaaaaacctccagttcagcttacacctgccttggtgagatcgccatcttcccgacgaggtctaaatgggacaaagcctgttcctcccataccaaggggaataagccttttgcctgataaagctgatttaagcacagtgggacacaaaaagaaagagcctgatgatatttggaagtgtgaaaaagatagtcttccaattgatctttcagaattaaatttcaaggataaagatttggatcaagaagagatgcatagctctcttaggtcccttcgtaatagtgcagctaagaaaagagcaaaactgagtggcagtacttcagatcttgaaagccctgattctgcaatgaagctcgacttgacgatggactccccgtctctgtcttcctcaccaaacatcaattcttacagtgaaagtggagtttacagccaagaatcattgacttcttctctgtctacaactccccaggggaagagaataatgtcagacatatttccaacatttgggtcaaaaccttgtccaacaagactttcttctgcaaagaaaaaaatttctcatattgctgaacaaagccccagtgcagggtcatcatcaaatccacagcaaatttccagttttgacttcacaaccacaaaggctttatcagaagactcagtagtagttgttggaaaaggcgtatttggaagtttaagttcagcaccagcaacctgcagccaatcagtgatatcttctgtggaaaatggggatacattttcaattaaacaaagtattgaaccaccatcagggatttatggaagatcagtccagcaaaatatttcatcatatcttgatgttgagaatgaaaaagatgctaaagtttctatttctaaatctacttataacaagatgagacaaaagagaaaagaagagaaagaactgtttcacaataaagattgtgaaaagaaggaaaaaaattcctgggaacgaatgagacatacaggaactgagaaaatggcatctgaaagtgaaacacctactggagctatttcacagtataaagaaaggatgccttctgtcactcatagtccagaaataatggatctgtcagaactacgaccattctctaaaccagaaatagcactgacagaagccctgaggcttttggctgatgaggattgggagaagaaaattgagggactgaattttattagatgcttagctgcttttcattctgagatactgaacacaaagttgcatgaaacaaattttgcagttgttcaagaggtgaaaaatttacgttctggagtttctcgtgctgctgtggtctgtttaagtgatcttttcacttatttgaaaaagagcatggatcaagagctagataccacagtaaaagttttgttgcacaaggctggtgaatcaaatacatttataagagaagatgttgacaaagcattgagagctatggttaataatgtaactcctgcacgtgcagttgtttctcttatcaatggtggacaaaggtattatggtcgaaagatgctgttcttcatgatgtgtcatcctaactttgaaaaaatgcttgaaaagtatgtcccatctaaagatttgccatatattaaggactctgttagaaacttacagcaaaagggtttgggggagataccattagatactccttcagcaaaaggaagacgatctcatactggcagtgttggaaatacaagatcatcatctgtttctagagatgctttcaattcagctgaaagagctgtaactgaagttcgtgaagtcaccagaaaatcagtccctcgtaattccttagaaagtgctgagtaccttaaactcataactggcttattaaatgcaaaagactttcgtgatcgtattaatgggattaagcagcttttatcagatacagaaaataatcaagaccttgttgttggaaacattgtgaagatttttgatgcttttaaatctcgacttcatgattctaatagtaaagtaaatctggtggctctggaaacaatgcacaaaatgattcctctacttagagaccacttatctcctataatcaacatgctaattccagcaatagtggataacaatctgaattccaagaatccaggcatctatgcggctgctacaaatgttgttcaggcactgagtcagcatgtagatattgttacggaactttatcaaaggaagccgcatgccacagagcagaaagtgttggttgttttatggcatctcttaggaaatatgacaaatagtggctctctgcctggagctggaggaaatatacgaacagccacagctaaattatcaaaagcactctttgcacagatgggtcagaatctgttaaatcaggctgcatctcaaccaccacatatcaaaaagagtttggaggaattactcgatatgacaattttaaatgaattatgaatcttcgataaaatactgtatgatgaacaaaagtgtttacatgatgacaaatggaactttctaaaagttatgttatcagtgcctgcacttcacatccagcaaattaagtcaatggctatttttatttgcagcctatgagtacacatctgtcctatatcaaccttaccacttatattcatcacataaaaacctaaaatattcatgaataattcatgaaatctgagtcacatgggatgaattcaattttaatatttttgagaaaagtcctgctcatttgcactattctatagaaactacaatttgttgccctatatgtaaaattagaattgtaattaaaaatacacattttattatgtaatcatgttctggtatgtctcatttctcagccttattttataacgtggaagtcattgaactatgttatcagaaactaagtttgtatattatttgtgaaaaacatgtatttctgaatcagtccgctaatatgattgtgcagtattagcttgcttttgctgctgtgttaatgtcatatatttgcttaccttttgggttcaattatctacataattgtgaaatttaacaagttataataaagcatgacaaccaaagttttagaaaacattaaacattttaaatgcacgtttaaaaaacgtgttgaatgtaacccccctatttttgtgtgcaaacactaaattttattgctttatgttttgacctttataaaggtgttattctgctgcccagttttgtaattctcaaaaatagtgccaggtcttctatagcttttttcagaattcatgggcttacaagtactgtatgcatctttaaaaagaaaaggaatgttataaaataaaaggatttatttctttaaaaaaaaaaa

SEQ ID NO: 336946 - DNA, 400 bp, Homo sapiens
gtaaggttatttgctaattattagaataaatttaagcttacagtatgtcattgttttgtgtatatcagatgtggggtggtgaaagtatttcaattaaaatttaaaaaatcttagtacagttgaaattttgagccttggcaatgtggcaaagccctgtctctaggaaaaatacaaaaattagccaggaaaaatacaaaaattagcccgagaaagtagagagcctattttctctaggaaaaatacaaaaatgtagctacagccatgcgtgcctatgggcccagctacttgggaggctgaggtaggaggatcacttgagctcggacggtcggacttgagctgcagtaaaccgtgattacgccactgtactccagcctgggcaatacagtgaaactgtctcaag

SEQ ID NO: 336947 - DNA, 104 bp, Homo sapiens
atgtaactcctgcacgtgcagttgtttctcttatcaatggtggacaaaggtaatgttcaaaataaccttgaaatgtctttaaacaaaaaatgaaatgttgcaat

SEQ ID NO: 336948 - DNA, 401 bp, Homo sapiens
caaaaagaaagagcctgatgatatttggaagtgtgaaaaagatagtcttccaattgatctttcagaattaaatttcaaggataaagatttggatcaagaagaggttagaaccaaatatttttaatgacttaaaaatatttgcaattttctataatatagttgctatttaaggaaaaatcaagttctttttatcctataatatcttatttctaaaaatatgttcattatagaaaatgtggaaaataccatgaattagtaggaagggaatttatcacgccagttcccactaccagaataatttactgttaacactctactgtattttcttcaagtattttttctatgcatacattattcctttttaaattaaaagtatgaataataatatagcaatacactca

SEQ ID NO: 336949 - DNA, 218 bp, Homo sapiens
gcattttatgcattttggaaaatgaatgcataatgagatttttaaattatgtttgtataatagtttttataggaaagtacaaatgaaattaccttcacctttctttcactttagagctgtaactgaagttcgtgaagtcaccagaaaatcagtccctcgtaattccttagaaagtgctgagtaccttaaactcataactggcttattaaatgcaaaag

SEQ ID NO: 336950 - DNA, 469 bp, Homo sapiens
caagaccagcttgaccaacatgatgaaaccctgtctctactaaaaatacaaaaattagctgggcattgtggtgcgcacctgtagtccccagctacttgcgaggttgaggcaggagaattgcttgaagcagggaagtggaggttgcagtgagctaagatcgtactactgcaccctagcctgggcaacacagcgagactccatctcaaaaagataaaaattttttttaaaaaggttctctcatagtttatttaatgtattttgttttaggtgaaacacctactggagctatttcacagtataaagaaaggatgccttctgtcactcatagtccagaaataatggatctgtcagaactacgaccattctctaaaccagaaatagcactgacagaagccctgaggcttttggctgatgaggattggtaagttcaccatccttaacttaaaactaagcagagttcaaaagcttt

SEQ ID NO: 336951 - DNA, 255 bp, Homo sapiens
tgaaggttctagtcaggaaaattaagcaagaaaaagaaataaaaggcacacagatcagaaaggaagaggtaaaactatatgcacagatgacatgatattgtatacagaaataataaaaaatccacaaaagctatcagagctaataagcacattcagcaaggttgcagagtacaagattcatatacaaaaatcaattgtatttctatactccagcaataaacattcaaaaagaaagttagcataataattccattg

SEQ ID NO: 336952 - DNA, 395 bp, Homo sapiens
atcaaaagcatatttctgactggtaataattcctatcctcaaccaacaaaataggcagtaagtaaagatacctcataaccaggtggctttaaaatataaaccaaaaatcactctaactagctggataaattggtattctatttgaacttttaacagaatctcaatctaaatatcagagcaaggattcacctttagcaaggattcaactttaaatgaaaatgttttggggtgttgagaattcaaacttctcagaattgtaaggttctatcatggcaatgagtggtgaaaagaagtatgaggaggaagaaaataaatatgtaatttagagtttgttcagaatccaagagttaactcccctcattcaagaaagttgagtcatgggcaaaccacaggtg

SEQ ID NO: 336953 - DNA, 550 bp, Homo sapiens
tgtgtgtgggaaacctgagatgttggtacatgactgagcttgactcagctccaaagtgagaccacacactgccagctaggtggcagttgtaggtgagtgaaagggtgtttaggtgcccatctgggactgtgtccatcttccacaatggtcaagggcacagactagggccagactccccggagttacattgcagccttgccacttactagctgtgtgtccttgctttaattgcttaacattcctgtgccccagtttcttatagagcagggaaaattatggtgtctgcctaatggggttattttgaagaacaactgaattactatttctagagtatgtataacaatgcctgggcaagctataagtaagcagtaagggtttatggtagtggtgacgggtgaaggggagagaggactagaactctttggatataggagagagaaggagaggctgcctagagcacgaagcccagttcagcctgacgggacacagggcttgggttgggaggcgggtgttgcctccagctctttcactcaccaagctgggtcatcct

SEQ ID NO: 336954 - DNA, 304 bp, Homo sapiens
aaagctattatcacgttatatttgtaatatatctattctatactggaaagttttctttatagcatttttattttacattttgttgcatgaaagttaaaaaatttaaatctgctcaattaatcacccctgcttccggtaacaacctttgttttctgcagtgattagaaatgcatgttctccaggttgggcaacatagtgagactgtgtctccacaaacaattaaaaaattagcaaggcatggtgacgcatgcctgtagtcacagctacttgggaggatgagatgggaggattgcttgaccccggg

SEQ ID NO: 336955 - DNA, 433 bp, Homo sapiens
ctcattgcccaaatccctttctcatcactaccattttgtctttggcttatgtcatccatttttttgcctaaattttctgttccattttcccatataatataataataataatgaatatttattgaggcataattgtaaactcttagaacagatgtacatttttctcccaacttcatcaggtgaaaactattatttgcatttctgcagatggagagcctgaaacacagagagggcacatgtcttgcttgaggtcaccagcttgcaaatggcacaaccactatcctccttccttcactaagttctagccaagctggtctatttcatcagttccttgcagagaccatgctttaagtgcactcagatactttgcacatgctgttccttctgcctggactgctcttcccactactttttttttttttttttttttttt

SEQ ID NO: 336956 - DNA, 343 bp, Homo sapiens
ctcctttggtagcagctggtttggctttgttgtcattacacagaaagtctgcatttgttagttgtgaaaataaataatggcccgtacatatgcagagattcaaaaggaatataaagacaggccaagcagttgcctgagagaaagccaatataatattgcaggtctctccttttgtcacctcttttccgtcagtattttctggtggtcacttcagatcaaatctctttcctgagtttcctgaatgtccacctgcccctgtccatcaagacttgactctctcacactcgtcaagatggatgtgccccagacagaactgacgactgtcttctttcctcgccagtct

SEQ ID NO: 336957 - DNA, 344 bp, Homo sapiens
gtagccaccacaaactcctcccaagccagagtctggcagaggtcctgctattccagagacctggaggaaggcatctatttacagccatgtaggcaggcctgcataccttggcctttaccatggtccctgaaacagttcactgactcagtttccgttacacgagccacagttcatggtcagtcctgcctatatagaaacccacacagttacctgaggaaatgctctctggtactcactgaaagccacactcatccacatcctgatttaaggcccagcatctgcagacctgactgcaaaaacatgccctagtgtctgccctacagagcaaagtcccgaaggatatg

SEQ ID NO: 336958 - DNA, 440 bp, Homo sapiens
cagactgatcagttatgattcaaaatagtcaagccagaaagggcaagcgacctcagtaatgcaataatgatggagagatgaaagagtgatatttagagaataaatataatgacgagtaagaggagagcgtgaaatggagggagaggaagagacagttccaaggattctggtctggatgactgcattcatagtgggaaatatacagagaataactagtagaaaatcatagttcacagtttaggcatattgaattgaaagtgtctttagcgcttcttggtgaaattatggaatgaatagatcaccagaaagcaagaatcaaattagtaaaaaagcccctgtggatagcccccaaaaatttctaaagcaaatggtaggcaagaaagaggcggcagcaaaaaagaacaggatgatgaatccaaagaaaggaaatggagcaacgc

SEQ ID NO: 336959 - DNA, 1305 bp, Homo sapiens
gcaaaacggacactttgaagtgaccttccctgtttaactcatccgctcctcccttcagtgagtacatactactgtgtgcggtgtgctcttccagatgctgggatgcagtagtgaatggagacaaagcccctgtcctcatgggcttagactccagcttatgacttgttgtttataataaataatgaacattgtgaggttattcacaggaagggatgaataatggatggatcttcaaaacgtgattctggttaactacagacatcctgaagttccaggtataaaaagccttctttaaagcatactatagcagtcagaatgaatgagtagttaataaagctctttgctgaaataaaagcaaatatgttcacacttccaaaaaataaatacccaagtgggagttgtatggttctgatgtcaaacatgttatgagaccatcagaggtatatggaaatttggggaggaagacagtaattatataaaagtgcatgcaagcctgggcaatatagggagaccctgtcagcctgcaaaaaaataatgataataaaaaatcgtagctgaaggtggtggcatatacctgtgggtcccagctgcttgggaggctaaggtagaatcactaaggagaatcacttggggcagggaagtggtggctgcagtgagctatgattgtgctattgcactccagcctgggcgacagaacgagaccttgtctcacgcacacgaaaagcaattactgaattagagatgtgatgtgggaaacgctcccatctaagtaatgaccaagaatattccgtgatagagatgaagtcttagcaggacttccctctcaggttattagtggtgatgatcctgctttgttttattaccttattactattatgctctctgaggtatgaagtgatattaatctgtttgcagtgagaaataacactttatagcattgctatcatttaaacatattaaaatatgttgtaatgcagaaaaacaccctggggagagaggtgaaaacttaggagtttaatttgaaatgcagttgggaaattatttggacagcagagaaagctttagggcaaaatttcagtaataaagtatattattttctaaattattcatcagggagttgagtttgtttttcatgtacctggacttaatcacgattacaaaaaaatgcttagctaattgtagtcattcatctatactaatccaaaaacaaaaatgaggagttattgatggtttttatttaggtaaaacaatttatttgactgtgagtggttacatatgataaccatatattcagttatttctaac

SEQ ID NO: 336960 - DNA, 425 bp, Homo sapiens
ctcctgctcccttcttcagagctcccagccaccagcgggactcctcgggggctgcccctgacctcttgcctgctctcctgagcggggccacctgctgcctccccaccttctgaccggccatttcctccctccccgggcagctcctccatcacgaacggcagctggtctccacttagctgcgcctcctctccccgaggctgggcctccaggtcctcgtagttgctttgctttctggtatggaggttggttaggggaaccaggtatatgaagaaggattatttgatagaaaacgaggagttacccagtccttgagaaggaaggtgcatgtacgtacctatgtgcatacacttattttatatgttagaaatgacgtgttttaatgagaggcctccccgttttattctttgaggagtggggaagggaaa

SEQ ID NO: 336961 - DNA, 406 bp, Homo sapiens
ggaaaatttaataaaagaattattaacaaaaagtagatactgctaagagagcgttctgtgttttctgagattctgtattcatctatttggcatccattagtctaatcacagggtcaaactcacgcacagccaaagctgtttccgtctcccctgccacccagagcccattctctgaaccacctccttatctaactctcacacacagagccaatatttctcctaccctaaatcacccagagctaggaaccagacaacgagggacggccctctgccccagggccccccagaattatccaaaatagccaatcctcagatgtttccctggccctgtctggcctttcccacagaagcccaacaaaggctctggcctgggcgttcccccagctcctttctgccctgtggatgg

SEQ ID NO: 336962 - DNA, 116 bp, Homo sapiens
acacaaaaaaatttgattcaaaactcagaggtttagctgggcatggtggtataggcctgtaattgtagccagctgggaggctggagcaggagggtctcaggagtgtaggagttcga

SEQ ID NO: 336963 - DNA, 266 bp, Homo sapiens
cttagatggagtaattcatggccaagcaatgctgcaggtgtggtcagcacatgtagttgataggcagactcctattattttaaacaaacaaaccaaaaaagttttttaaaaaatgagacccaccttcatcttgaatatgtcaaccccgcaccaccgttgtattaatctgtcatgtttttctcatataacaaaagaatggattttctttcttttaatctaaacattgtatatacaagtatagtgtttaggtcgacgcggccgcgaat

SEQ ID NO: 336964 - DNA, 397 bp, Homo sapiens
cttagatggagtaattcatggccaagcaatgctgcaggtgtggtcagcacatgtagttgataggcagactcctattattttaaacaaacaaaccaaaaaagttttttaaaaaatgagacccaccttcatcttgaatatgtcaaccccgcaccaccgttgtattaatctgtcatgtttttctcatataacaaaagaatggattttctttcttttaatctaaacactatacttgtatatacaatgtttatttatataggacctaagcaaaagtttttatagatgtgttcatgtcatcacaattcaggtaatgtgaaggctcaacttccgtcttctctctttgtaaatctcactgaagcattagatctcaagtaaatacatttgtaaaatatccatgtca

SEQ ID NO: 336965 - DNA, 401 bp, Homo sapiens
tacatcagggtacagaggccgagtgtgggtacatctggggtacagaggccgagtgtgggtacatctggggtacagaggccgagtgcgggtgcacctggggtgaggggctgctggggggctggagagcagacacacctgcaatgcagaaatgaagggagaggcccttccattccctggtgcttactgaacaggcgccaggtggactagcagatgtctgaaaggaaagactctccaggaaacaagtatttgtggaaactcaaaagagccgtcaatgagtgccaccttcacctcctctcctccctctctcccccttgaatccacaccgacaactccatcagccacatgggccggggcagagagggcaggtgtgctaggaacagacatcgcagccacgctgcccg

SEQ ID NO: 336966 - DNA, 429 bp, Homo sapiens
ctgctggggggctggagagcagacacacctgcaatgcagaaatgaagggagaggcccttccattccctggtgcttactgaacaggcgccaggtggactagcagatgtctgaaaggaaagactctccaggaaacaagtatttgtggaaactcaaaagagccgtcaatgagtgccaccttcacctcctctcctccctctctcccccttgaatccacaccgacaactccatcagccacatgggccggggcagagagggcaggtgtgctaggaacagacatcgcagccacgctgcccgggctcaaacccccacctccgagatccagagccagggacctaactgcaccctgcctccatttcccccatctgtaggatggggataatcgtagtgcctgctggctgggcacagtggctcacacctgtaatcccagca

SEQ ID NO: 336967 - DNA, 640 bp, Homo sapiens
tcttgtatattagttattttttacacttttaagaacagcatctttgaatcttttcaagtacagtatgccttaaatgtataggaccactgagttcaggaagaaaagcataggtattctgtaggtgaattacactaacaaaatcacaactgcagaatgtgatctgatacttttgttggacagtaaagctaatacattttatatacacagtcataccttttttttttgtaatgtgtttcgttaacgtaagcacacagtcatcacagactgagacaggactttgttagaccagatcttgtgagctaaatatttaagagcttaacatatataaatgattttaattggtattgggcgaaggaaacctaaaaatgcttaaattgacagatcttacaatttgcttactgaaaattcagaaagcttttatgaaaactttgtattttaaaatattttttgctcattctgaattagaagttagatcccttttaaagagggtctcactctatacaaatatagcctatgaagaatcaatagtgaaataatagtgtttatattgaaccccaggatgggacattattttttgaccatttacatgaggtctttctctaattaccaaagttaaccttaagagtagttaaagactcag

SEQ ID NO: 336968 - DNA, 291 bp, Homo sapiens
actacctttctctgaggatgaggtacaatttcctagtgctaagattatttacattgcaacctgaattaatctgagggaagatgacattacaaagttccatacccatctggcaaagtatttggatagctgaattttaagccatgggaaatacaaagaatcacacaaaacaaggactaacacaagcatttaggaatgacatggtgcctctatgtatgtaagcttcttcaccattttaaatgtccatgacaggccaggtgcagtcactcatgccaataatcccagcactttggg

SEQ ID NO: 336969 - DNA, 1389 bp, Homo sapiens
atcattctattttcaaagaggtcttggcgttttcctacatcttttgtttagagggggaaaaaagtttcatttgctgccatttcagaaaggttatgctatcctgttttatccaagcagttgtgagtcaggaactgcctgggcagtgtgcatcaactttgtggccgaaccattacagctgtcatatccttggctgatcgtctctcccagggactactgccctccacttagtgtctgagggtaagcctagaagggtgctgctattgggtctatggaagcttatctatcaaaggagcaaacatccagaaaagtgtttataaagcaaatgtattgcctctgtttagagatttgcccagctgttccagttttaaacattaaaaaataaactcagttgccatggcaaaaatagaatgcacagcttacttataattttccatgcagtatagcataaggatttttgacttgaaacaaccaaagaactcctccttaacgagacagttcaaattcctgaattagtatttcttgactatcaacttaaagaatggacttcctagtacaatgttgcacttatttttttttctgaaataattctgcctgcatgtatgtgttgtgttttagcttctccccttaccccaccccaaagatcttttcttcctaatggttaatgtctcaactcggttactgtttactatcagatggtttttcattagtgaatttagacctctttgagaaagcttgtatataaaaagttaacagatatattttatggaaaaacccatcttattttcaaatatatttaactgctgttatattttattagaggaaggttgtaaatattttctaggagttctattgtaaagaaaagtatttttgaaaaaaattaatgtaataaaaaggaaaacatttttaaatagtggttgtgattgcttcctgttctggcttcgttatgttctattctcagcagatgaattgcatgccttccatatcaggatgtaatttattcaggtttgcactattataagttgacatcataatatctagtgtgcttaactgtattttcccggaatgcaagtcccttggtccatattaaagcactatgtatagcatattcataatttttcttttgtaacgtgtgtatttttaataaggattttatgtaacattttggcaacaagaggaccgtattttctagtgaattttataataacattttgctaaaaatgtttcttcctaggtcagtttttgttaaggtgaaccaaaagtcttattttaccaggggtttaaaaaaagtttgaagcttgaaagcaaagttatatttaaacatcatatgtaacaaataaataaagatgttttatagacttgtcctaaaaggtgcattccttaaaaaaaaaa

SEQ ID NO: 336970 - DNA, 349 bp, Homo sapiens
tatgtaaaaccaagtataaactgacttggagcaaaatttaggtaacccccaatgtgcagtattaaataagttttgttatcctactaattattttcagatggaatttcagcaatgacaaaaaaaattacatgtttttgtttgttttgagacagggtctcttgccctggcgggagtacagtggcacaatctgggctcactgcagcctcgacctcccgggctcaagcaatcctcctacctcagcctcccaagcagctaggactagaggcctgcaccaccacacccaactagtttttttcatttttagtagagacaggattctgccatattgcccaggctggtcttgagctcc

SEQ ID NO: 336971 - DNA, 189 bp, Homo sapiens
gtggcaggggactgatgggggtgacgggtgggattggggacccagagttagccagtctttcatctgttcatttgttcattcattaattcaaagtattgagcacctagtgtgtgccaagcatcgggacacagcagtgacccaaacggacaaagtccttgtgcttgtggagctgacattggagggggcagg

SEQ ID NO: 336972 - DNA, 511 bp, Homo sapiens
tgttccaggcatgcaacatgggtagcagagctcagccctctcaagaaaatcctccctttgcatcctatttttaggtttggtaattgcaccaatgttgaataaagttgtcatcgttatgacagttttgttctcctacataagagatgaatgcagccagcaaaatgctttgacaacaattaattgcactcacgctgtgtcgttacacagatccatttccataaccctttctcttcctggacttgggctgttctgttttcatctgtgctctggcaaatgactgtttgggcagagccttctccaggcctcggagctgccggtccaagctggacatcttggggctgcctctgttcctgaggctcaggcagaaggcactactcactgtgggcgtttgagggggcatcctgggacatgccctgtgatttggctcatcccaggcaaaggagaggaggagctgaccaagggagtaagccttcaggacacaaccacacattctagggaaaggtgggggcaa

SEQ ID NO: 336973 - DNA, 430 bp, Homo sapiens
cactgggggtgaacaagagaggctggacaaaagaacgcactacccctcagtgttttgaaataaaagagattctattatttggtggtgcaaaaggagatattttcccattaatatcttgattcatcaggttgagaagtgataaggataattcccattttatagatttcccatctataaaatcccttcaaacctcagggaggatgaagacacgtggaatcatctattgtgttggacgtaatatgcatctcatcaacagagtattgtctttggaagataaatgtccatcatctgacggtaatacaaatcaatgggcttctactgacatcatcaagccactaacaaacaggaagtgtaagaaaagccagtgtctctggttctcatgattctggagagaaaggtaaagtgattcgtgcacgtgaattctctccat

SEQ ID NO: 336974 - DNA, 275 bp, Homo sapiens
tagatatgggggtctcagtatgttgcccaggctggtctcaaactcctgccctcaagcaatcctcccaccttggcctccctagtagctgggactacaggctcaaaccattgtgcccagcaccctagtcattttaacatggagatgtaaattatcaaagtccaaagttggttaatattgttaccttcatcccaagaattacaaaaacctagaatattttaacttggatcctttatctaattcttaattgttttagttatattctatttcacaaaaag

SEQ ID NO: 336975 - DNA, 425 bp, Homo sapiens
ctttttgagcaccccctcacatgttgtcctgaagccagtgcctcgtttgcccctgctagtatcccagccctgatgacacagctcttgttgaggccctggtgacctcctggttgccacatccaaaaacttggaagtcctctttcatctgactgctcaactccagctgacactgctaattcatccctccttgaaactcttctcccttggctgagctcacaccactatattctacacagacccttctctaactttcttctactcctcagcatactctttctgcacctgtcccttaaatgctggtgcctaccatccgtctctcatccaaactcattcccctagccattctgttccccctgctttagacctcaccctctccaaatctaccttccatctaagtgaaatttctaaagttcatgcctgaactg

SEQ ID NO: 336976 - DNA, 242 bp, Homo sapiens
actttcctcccatttaacactatatcatgaacatattcctatgaaaatgagtttttttgtgaattgtctatttatgaatttttcgtttttttctattgacttttttaaaattaaaatttgtagttactctattagctccagtctttgactttacaagcccttacacatacatctcgtatcagaaagagaaaaaagaaaaatcttactgcctttccttacttgctagtaggaaaacatactca

SEQ ID NO: 336977 - DNA, 253 bp, Homo sapiens
ttttcaactcacccagggtcaccaagatgccaagtggcagggccagggctgcccccaggctgctgtggatcaaagcaggacactttccacatctctgacccttttgagtcaaagtgcccagggtggggccttgcctccctccttcccctggcctgaggccagcgccatccccagggtgaaccaagtcagtcccacagagcagaatcccaggcagaaggagcctccagctgcagctcttctcccggactcacct

SEQ ID NO: 336978 - DNA, 359 bp, Homo sapiens
ttctacctatcagaaaattggctatggctcacgtaagaataagaatcaggaaaaaaatcatttgcctaatttttccatctctgagtgtataccagcagggatgaatggcacacatattcggctgtgtctgctcttctactttcctggggcctctgtagctctaagttcaaatattaataatgagggaagcttgcagcatgcctgtagcaccagactagaaatcagatcttgtgtgacattaagacattatgcttctttgcaagtataacctttagtgaattttgaatgcttggcatatttgtttgagacataatggcttcttaatttttaaactataataaagaccatttatgagggct

SEQ ID NO: 336979 - DNA, 397 bp, Homo sapiens
aagctgggaataagaaacagttttattttcaagcctagcaattgcaggcttctttatgtttcctctaaattttacatgagagcagaaccattctttattaaggtcctctctctcctctcacatttttttcatagacagcaagaagaagccagatggcactttcagtattctgtctagaaatctccttatctagatcatcacatttgttacgtacattttctattttctgccttcccataggcaacagtgttgtcaaattttctccttaacaaaggtccgctttcctctggctcgaagtagtcttttccctgttttcctcaggccctcactgacctcctcttgaaggcctgccatgattcccccaacagtctctcagaacctttccagcttccaccta

SEQ ID NO: 336980 - DNA, 135 bp, Homo sapiens
ccaggtctcgaagccagacatggggctggtggccctggaggctgaaggccaggagctcctgcttgagctggagaagaaccacaggctgctggccccaggatacatagaaacccactacggcccagatgggcagcc

SEQ ID NO: 336981 - DNA, 254 bp, Homo sapiens
  misc_feature (15)..(15): n is a, c, g, or t
  misc_feature (62)..(62): n is a, c, g, or t
agttcgacggagacntctcttttaaactttatttaattaattttgagacagagtctctgctntgtgcccaggctggagtggaatggcacaatcatagctcactgcagcttcaaaatcctcaggctcacatgatcttttcctccctcttcccatctgaataatccacctgctttcagaacttcaactgccacctcaatgttgacgactctcagaggtctacatgtcctctccagacatctctaagcctgagacct

SEQ ID NO: 336982 - DNA, 543 bp, Homo sapiens
ttttaatagtttaagtgcatgatgtctacgactgattttcaaatagttccaaaaaatacacacatacaggaaaagcaagcacaatcttgtctgtgagaaagactaggtgaaggcaaaaaactgtacccagaggatacgagccacctaagaatacacaaaatgcacacacctcagacatctaccagcgactttagtttatgggagttttatgatccacactcctctacaactggtgctactataagttctcatccaatttcagatagctcccccagctaacacatcacagtaactcacaagctgcaactctttgcaacacactcctataagcaaagctgagtttttttccaaggtaagatgccaaattgattgtagtattcacatatttattcaccacttaacatgcataaactgggcacagtgtctcacgcctataaactcagctacttgggaggctgaggcagaggatagcttgagcccgttagttcaagggtgcagtcagctatgatcacaccacctcacactagcctgaagaacaaagca

SEQ ID NO: 336983 - DNA, 185 bp, Homo sapiens
tatgcaagtattacgtgaatacactcctctctttgagtcacacttgtagataaagctgaagtctcttggacatgacttcaacctccccagatagaaccagttagtactgtgtcatttacgctttcaaatcttcctctgcctgtaggaatatcgtgttttgaacatgttgtttggcctaaatagca

SEQ ID NO: 336984 - DNA, 1150 bp, Homo sapiens
agtaatcacttattctattaaagtttgtatattatgaaattcatctacctaaagttttccccttgagtctgagcctaattataattgattttccgtactctaccagagattagaatgaaaaatctattaatacaatcatccttagagtgcaacaaattgagccatttaccctagccccaaacttgggaagccctttgcagttgttacagaaaccagaaaagtagtcttgcaaagaatcagaacaagggcaaaaagttaaatcagtatcagcacatataccttcccttaatgcctttttattatgtataaaacagtgtgggttatctctcttccgacttccaatgtcctccctatcaaccactaaacattaatgcttatttttgccagataaaatataaaagggggccgggcatggtggctcaggcctgtaatcccagcactgtgggaggccgaggcaagtggatcattttgagatcaggagtttgagaccagcctgggcaacatggcaaaaccccatctctaccaaaaattacaaaaattagcaggacatggtggcgcacacctgtagtcccagctactcaggaggctgaggctggagaattgcttgaaccagggaggcaaggctgcagggagccaagatcatgccactgcactctagcccaggcaacagagtgagaccctgtctcacaaaaattaatcaattaaattaaacatagaaggggttgaataaaactataagaagtagagatattggctgggtgtggtggctcacgcctataaacccagcactttgggaggcaaggcgggtgaatcacctgaggtcgggagttcaagaccagcctgacaaacatggagaaaccccgcctctactaaaaatacaaaaattagcggtgtgtggtggcgggcgcctgtaatcccagctactcgggagcctgaggcaggagaatcgtttgaacccggaagatggaggttgcagtgagccgagatcatgccattgcactctagcctgggcaacaagagcaaaactccggctcaaaaataaaaaagaaaagaagtagagataagatttaggtatgggcttaatacacaacttataaaagaacattcattcattcaacaagtatttactctatacctaccaaggttggaa

SEQ ID NO: 336985 - DNA, 264 bp, Homo sapiens
aaaaatgttaaatttatagaaaagtttaataaatagtttaatgaactcctatatatgcctcaccttgattccccagttttaaacattttaccacctttgctttctctctctctgtctctctctctcttatgctctcttttccccactgggattattttattgaaataatttgggaataagttgcagatatcatgcttttttatccctaattgcttgagtgtaagcaagaacatctcctgcatgaccacagtacaataaccaatt

SEQ ID NO: 336986 - DNA, 265 bp, Homo sapiens
acaggtaaaaggagaccagaaggaggtgggagatggctgaaagacacactatgagtaagcccaagactaaattcacaaaatcttgtttcctcacttttgtattctaaatgtctatcatagtatgaacatctcactgctctgagtgtaattcttgtatataataatacttatttttaatgtaaattggaccacaaaatgccaactacttcatttggtgctctactgaaaaatgtaagttctttttttgttgttgttgttttctact

SEQ ID NO: 336987 - DNA, 449 bp, Homo sapiens
gcccacagaataccccctagtccccttgccttgtggtcctgccccccttggagtattgacaccatagcccgcaaaaaggaggaagtaaaacccactgggtcacagatccctgaacaccccacccccaggggagggtggcagtgggagatttgattcctcctctacagcagccctttaaattggagagctcatggttcagatcacacctctgccactttcttgctgagtgatgctgagcatggggctttacttctgagccctgctggcctcatctataaaccagtattagccatattggcagggcgcagtggcttatgcctataatcccagcactttgggaggcgcaaggcgggagatcacctgaggtcaggagttcgagaccagcctggccaacatggtgaaacctcgtctctaccaaaaatacaaaaattagcctggcatggtggcag

SEQ ID NO: 336988 - DNA, 593 bp, Homo sapiens
gcccacagaataccccctagtccccttgccttgtggtcctgccccccttggagtattgacaccatagcccgcaaaaaggaggaagtaaaacccactgggtcacagatccctgaacaccccacccccaggggagggtggcagtgggagatttgattcctcctctacagcagccctttaaattggagagctcatggttcagatcacacctctgccactttcttgctgagtgatgctgagcatggggctttacttctgagccctgctggcctcatctataaaccagtattagccatattggcagggcgcagtggcttatgcctataatcccagcactttgggaggcgcaaggcgggaggatggcttgagctcaggagtttgagaccagttggggcaaacaaggtgtgaccccatctctacaaaaacttaaaaaattggctaggcggctggcacggtggctcatgcctgtaatcccaatactttgggaggccaagatgggtggatcacctgaggtcaggagttcgagaccagcctggccaacatggtgaaacctcgtctctaccaaaaatacaaaaattagcctggcatggtggcag

SEQ ID NO: 336989 - DNA, 970 bp, Homo sapiens
gcatggatacatatgcattctagggttagcatcaaaggctggagggagtcaggaggcaaaacatatgctgaaccgataagggatctagagctgtttatcccaaagaaaagaaaatgaggccacataaatatcttctaatatttggggtacttttatatgaacatgggagaaggcatttgtgtttctcaaggcagcagaacagaattgaatatataaattcatagaatttttaagctgggcaagaccttaggagctcattcggcccaaggagtacatataacttttcatctgtatgccagctccaaccaattggcatgttaagaaggattctgaggatgaatctaagctcagaggggaggggaaaatgtggtcactgatagtgatatctgttgtggaagagaagggccatatctactcaagtaccatgttttagtcttcattaatgtggtctgtaggtttttaacctctgggtggtggatccctgggaggccacaaagtcattgcaagaggtaaacaaatctgtatatgcagcaagtgcttttggcaagctactctgagtaaataatatatcttacatcatatgtgctactatttttctaattctatacatacattataatgataaaatgctaatttatttaaaagagttattgaattcatagtagcttttaagtttgtgtttttgtgttttattaatgagtggacttaaaacatataattatattatgtgtgggaaggttgggacaggaaatttgggatcttaagtagaaattctttttaaaatatgaaccagtgatctattttttattctccaaagcctagccacaccaagtaaaattatgtatgtatttgtaggtttcttcgattaatgtctgccctgtcttattggtctgtcagatatataaggacaggaacctctatttttttttcattcgtatatacccagtgcgtggcacacggcagaatctca

SEQ ID NO: 336990 - DNA, 401 bp, Homo sapiens
tgagtgtttcacagccggcatctcagcttctgctcgcaggagccgcctagttttggcagatgagggctctgaggcccagagaagttaaagaatttgccaatgaagtagcagagcaggacttgaatccacacttgcctgactccaaagccaggagcttcttgggaaaggccaagagaggacagggcctggcggtcccctccccaacacgcacacccctagtgtgttttgaaagatggcaggctccctctttgccatcatccgaggacaaagggcgggcagtttctccagaagcgagtctgagtcttgtcctgatggttccggcccacactccctcgtatcctagcagcatgaaccctccacctcactcaggcacaggactcctcccaggaggggggattcga

SEQ ID NO: 336991 - DNA, 397 bp, Homo sapiens
cgtggtggtgcatgcctgtaatcctagctacaggggaggctgaggcaggagaattgcttgaacccgggagatggaggttgcagtaagccaagattgcaccactacactccaacatggagtgtagagacagaatgagacttcatctcaaaaaaaaaaagtatagtcaaggaatatggtgttatgaatatttgctgagggcatcatgtgactatcgtttaaaatacagtcatgtatacgtacaatagaattagatagtttctgtgccagaattcttatttattgtgagatatatcaaatttttacttggtgattcagaatttaaactatatcactacctgtacagtttattcaaaaaataaatatttaagttataaatttattagttatttataactta

SEQ ID NO: 336992 - DNA, 268 bp, Homo sapiens
agccttaaaccactttgtgatttaaggagcatccagatgtttagacataaaacactattgctgtgattaattgaatggtttttctgaatactcaagttttacacatacatgggggtagggagaaggcctgttattataccttcactattcaacctccattgtacaaaattcatgatcattttaaaaacatacattagaactgcatttaagagttcacccttctctccattatcaacaagtaagtcacatttctagattacttcccact

SEQ ID NO: 336993 - DNA, 455 bp, Homo sapiens
aactctcagaacccgaatgtgtaaggaaatcctctctggaacttacccaagtgttctcattcccttttaatcctcagttctctttttctttcatttggactaagaatgtactattattcaaaagcctgcttcatccataaaacattatggagggaaacactgtatttttacacatgacaaccaatagaaattcttgtactactcctgagtatttcaccagtgtgtaatagtcactgctaatgtgtatttcctatagagcacacaacccacatcaccaaagccaacgtagacaggatacaggaaaagagacaacaggtactcacttcagtgaataaagagaacaaagaactacaaatatacccaattttcttatttttgaaatatcagaaacttttactcacaacacctaccacaactctctaagaccaaggctatcttataattgacagacttgg

SEQ ID NO: 336994 - DNA, 427 bp, Homo sapiens
cttttccttttaaggtaatgggcccatgtgttgcttgattactgggaatgaaaagtcatactttatgaacagggattaagcttttttaattttcaggtttttgggtggaggggaagagtatgttttttcaaagtctgtgtaacttgaattaaaactctggatattttcagatgtagccagcaattgtcttctttcttaaatgctaacagtgcattaaattataggcctagaagccagaattattgcttttttctctttttttgtagaaggtatactccaacatatgtgagttttttttactttgttttttaatttgagctgacgacaaaagaaagatcctgtaagttaggggataaaataaagatcctataatttgggcctggcttaaaccataaaaaattgattttttaggggagagaagtaatat

SEQ ID NO: 336995 - DNA, 153 bp, Homo sapiens
aaatgtttataacaatctaacacgcatatatacctttgccaatgtatccttaagaatcatgtcagtaactcctatgtacccagtgttttccctgtggaattgttttctcctccctactctttcttcctcttcttccccttatctctatgtata

SEQ ID NO: 336996 - DNA, 3600 bp, Homo sapiens
actcacagtcactctctctgagcgcgtctcgctcgctctcatacacgcccggagcccaggagcgctcaggatcccgagcgccgcgaaaaagttcccccggcttttgctggagactcatcgctttgggaagtgcatttgcttcgtggctccgccgagcctgctgaatcctgtcctcgcggctcgggaccccgggatcgctgaccgctgccgccgccgcctctgcctcccggactatcggcagcctcggcaacaatagtggcggccgcccccagcgaggctccgggagcccttgcctgcgggggtccggggactcgagccggcctccgccccccggacgcacagccagcgtggtccccgcgtgcaacgcgagcgccggggagtggctcctgctttgcccctcgtgggggccgagccaagaccagtctgcaaactccatcccgccggctggaagaagtcgcggagccggcaccaaacccgcagcgtcttcccgcgcggatcccgggacttaaaaagccggggccaccccggcccaggacgggatgcgggtcggtccggtgcgctctgccatgagcggcgcctcgcagccccgcggcccggccctgctcttcccagccacccgaggcgtcccggccaaacgcctgctggacgccgacgacgcggcggctgtggcggccaagtgcccgcgcctctccgagtgctccagccccccggactacctcagcccccccggctcgccctgcagcccgcagcccccgcctgccgctccgggggccggcggaggctccgggagcgcgccggggcccagccgcatcgccgactacctgctgctgcccctagccgagcgcgagcatgtgtcccgggcgctgtgcatccacactggacgcgagctgcgctgcaaggtgtttcccattaaacactaccaggacaaaatcaggccttacatccagctgccatcgcacagcaacattactggcattgtggaagtgatccttggggaaaccaaggcctatgtcttctttgagaaggactttggggacatgcactcctatgtgcgaagccggaagaggctgcgggaagaggaagccgcccggctcttcaagcagattgtctccgccgtcgcccactgccaccagtcagccatcgtgctgggggacctgaagcttaggaagttcgtcttctccacggaggagagaacccagcttagactagaaagtctagaagacacacacataatgaagggggaagatgatgctttgtcagacaaacatggctgcccagcctacgtgagccctgagatcctcaacaccactgggacctactccggaaaggctgcggacgtttggagcctgggggtgatgctctacacccttctggttggacgataccccttccatgactcagaccccagtgcccttttctccaaaattcggcgtggacagttctgcattcctgagcacatttcccccaaagccaggtgcctcattcgcagcctcttgagacgggagccctccgagagactcactgcccccgagatcctactgcacccctggtttgagtccgtcttggaacccgggtacatcgactcagaaataggaacttcagaccagattgttccagagtaccaggaggacagtgacattagttccttcttctgctaatccccaaaacctcagaaacctcataattcttaacacctggcatttccatttctaaagatggacaggccctttggcgtggtaccaaccagataatgactgcatcaggatgaaagctgctgaactcggcatggcgcctcctcttctctgttgggatgagtgactttattgatttgagcagcatatgctgtgattggctgccctgcaaatttgtttcccttaaggaaccctcaccaactatctctgctggatttgggagttccgcatcttttgtggagggcagagtatggacatcttacacccggtggtcaagtgtgtaataaacttgagcattcgaatgggagaaaaagcaaatcgcacaatgacatattttgagtaataaccgtatttttcacagggtgacaaattgggccaataaatctgccatctttgaactcatctttggtggctagactgctacggcagcttctctgatgggaaagttccttttttggcttaacactcaccctttcttcacactcacatttaccaatgactctgctccgtttttggagcagactgttttaagttgctcaggagcctgatggaaccatgaaccgagactcttctctgtttcctgccaagacctcatctgcactaatgccttctccctgaccttgacacttccccctttagctataaaagcacttaccagccgaacgtggaacagtatcacaaaagattccatctcccaacgatttcagaactctgagctcagagagactccagattttaaaaaataatttgagtgcttggaaactattagctttttaagttccttccaaatatgttagtacctaccctttactttttccccaagaccatctcagggtggagcattctgtctaagagaagaaagataaggaggctcccacccacctctcccaagagcagacattaaacatctttgtgctttgaagagagtgaattttggatagtcttgtgattctcagactaacttccagaattatactttaacccctcccagatatggtccgcctttggcattgtgtgtacatctgcagttttgcatggtgggttgttaatatttcaaatgtgtggtttatgaatacgtctgtataatcggcttctggagtgaaacagcaaaccccaaatcttcaaagttggaaggaactttaaaaatcatccggtccaatctctttcctctttctgccacctcccaaggcagaaatcccctcttcagcttcttttgtaggtgggaatccagcctctgttagatatgtccagagatggaaactcactcccctacaaaagatggagcttaatggagaaattgcaactttcattaaaaaacaaattcagatgaaatatcagtaactgtcttggacagtgctgaaatcaggtggttaaacgggtaaacaaaatatactgtattttgagaaatggcacaaaaacaggcagtcatctttaagggctatgcctaggcaaactactaacatgcattgtgagaatgccgtgtatacctcacgtactgtgtactttgtacatatattttaccttttatacctatgttcgattttgttttgttttgttttgttctggctttgaggcttgttttgttgtctgtgtctgtctgaataacctgcgtgtctaaaaccacgtgaaatgtgaatgattattggcaatattaccttgacagaatcatgggactttgagaagagggaggacagaggcctctgtcgcactaacgctctcgtggttgctcgactgttgtatctgtgatacattatccgactaaggactctgggctggcagggccttctgccgggaaagctagaaacactaggttcttcctgtacatacgtgtatatatgtgaacagtgagatggccgtttctgacttgtagagaaattttaataaacctggtttcgtaaaaaaaaaaaat

SEQ ID NO: 336997 - DNA, 734 bp, Homo sapiens
cggccgccacagcttctcctgtggccttttggaaccaaagcggaggtgcaggtcatgtagttaggtgctgtgtgttggtgcaaaacaaagtcaagggctcatatgtcccagatttagtatttagagcttctgttcctgaggagtcacagccaaggttggtttattctgcattctcttggacggggcctggggacaccgtggcgcttctatgggatggcaagtgttgacagggtgctcttcctctcctaccccaggatcaggttcattccccattgttgtcagaaaggtcagttgtctggggtacaaatattaaactgccctttacgatattgccttctgaaggaagtgttcaaatctttgcttatgccaagtgctgttttgtacctggaaggtttcacagagctagtgagactgtcatatatgcagaattccaccctcttgtttcacacagcattcctctcccatcccagtccaggttctctgtaacatcacattctctggtgactttttagacagcttgtttggatccgtcttcagaaaatagccacattgaatagtaaatggaagttggttaggatggattgctaaatatagatcatagcttacctcataaagaacaagatgagcttgataagagagtaatgaggcattaagattcaaagctgaggtttcagctagagaattcaggaagccgcatgagatagaccacacttgattttaagagccagccacat

SEQ ID NO: 336998 - DNA, 2562 bp, Homo sapiens
cggccgccacagcttctcctgtggccttttggaaccaaagcggaggtgcaggtcatgtagttaggtgctgtgtgttggtgcaaaacaaagtcaagggctcatatgtcccagatttagtatttagagcttctgttcctgaggagtcacagccaagaacccagcttagactagaaagtctagaagacacacacataatgaagggggaagatgatgctttgtcagacaaacatggctgcccagcctacgtgagccctgagatcctcaacaccactgggacctactccggaaaggctgcggacgtttggagcctgggggtgatgctctacacccttctggttggacgataccccttccatgactcagaccccagtgcccttttctccaaaattcggcgtggacagttctgcattcctgagcacatttcccccaaagccaggtgcctcattcgcagcctcttgagacgggagccctccgagagactcactgcccccgagatcctactgcacccctggtttgagtccgtcttggaacccgggtacatcgactcagaaataggaacttcagaccagattgttccagagtaccaggaggacagtgacattagttccttcttctgctaatccccaaaacctcagaaacctcataattcttaacacctggcatttccatttctaaagatggacaggccctttggcgtggtaccaaccagataatgactgcatcaggatgaaagctgctgaactcggcatggcgcctcctcttctctgttgggatgagtgactttattgatttgagcagcatatgctgtgattggctgccctgcaaatttgtttcccttaaggaaccctcaccaactatctctgctggatttgggagttccgcatcttttgtggagggcagagtatggacatcttacacccggtggtcaagtgtgtaataaacttgagcattcgaatgggagaaaaagcaaatcgcacaatgacatattttgagtaataaccgtatttttcacagggtgacaaattgggccaataaatctgccatctttgaactcatctttggtggctagactgctacggcagcttctctgatgggaaagttccttttttggcttaacactcaccctttcttcacactcacatttaccaatgactctgctccgtttttggagcagactgttttaagttgctcaggagcctgatggaaccatgaaccgagactcttctctgtttcctgccaagacctcatctgcactaatgccttctccctgaccttgacacttccccctttagctataaaagcacttaccagccgaacgtggaacagtatcacaaaagattccatctcccaacgatttcagaactctgagctcagagagactccagattttaaaaaataatttgagtgcttggaaactattagctttttaagttccttccaaatatgttagtacctaccctttactttttccccaagaccatctcagggtggagcattctgtctaagagaagaaagataaggaggctcccacccacctctcccaagagcagacattaaacatctttgtgctttgaagagagtgaattttggatagtcttgtgattctcagactaacttccagaattatactttaacccctcccagatatggtccgcctttggcattgtgtgtacatctgcagttttgcatggtgggttgttaatatttcaaatgtgtggtttatgaatacgtctgtataatcggcttctggagtgaaacagcaaaccccaaatcttcaaagttggaaggaactttaaaaatcatccggtccaatctctttcctctttctgccacctcccaaggcagaaatcccctcttcagcttcttttgtaggtgggaatccagcctctgttagatatgtccagagatggaaactcactcccctacaaaagatggagcttaatggagaaattgcaactttcattaaaaaacaaattcagatgaaatatcagtaactgtcttggacagtgctgaaatcaggtggttaaacgggtaaacaaaatatactgtattttgagaaatggcacaaaaacaggcagtcatctttaagggctatgcctaggcaaactactaacatgcattgtgagaatgccgtgtatacctcacgtactgtgtactttgtacatatattttaccttttatacctatgttcgattttgttttgttttgttttgttctggctttgaggcttgttttgttgtctgtgtctgtctgaataacctgcgtgtctaaaaccacgtgaaatgtgaatgattattggcaatattaccttgacagaatcatgggactttgagaagagggaggacagaggcctctgtcgcactaacgctctcgtggttgctcgactgttgtatctgtgatacattatccgactaaggactctgggctggcagggccttctgccgggaaagctagaaacactaggttcttcctgtacatacgtgtatatatgtgaacagtgagatggccgtttctgacttgtagagaaattttaataaacctggtttcgtaaaaaaaaaaaat

SEQ ID NO: 336999 - DNA, 2132 bp, Homo sapiens
cgcgattagaggatcccgcagctctctctgatgggagccctccgagagactcactgcccccgagatcctactgcacccctggtttgagtccgtcttggaacccgggtacatcgactcagaaataggaacttcagaccagattgttccagagtaccaggaggacagtgacattagttccttcttctgctaatccccaaaacctcagaaacctcataattcttaacacctggcatttccatttctaaagatggacaggccctttggcgtggtaccaaccagataatgactgcatcaggatgaaagctgctgaactcggcatggcgcctcctcttctctgttgggatgagtgactttattgatttgagcagcatatgctgtgattggctgccctgcaaatttgtttcccttaaggaaccctcaccaactatctctgctggatttgggagttccgcatcttttgtggagggcagagtatggacatcttacacccggtggtcaagtgtgtaataaacttgagcattcgaatgggagaaaaagcaaatcgcacaatgacatattttgagtaataaccgtatttttcacagggtgacaaattgggccaataaatctgccatctttgaactcatctttggtggctagactgctacggcagcttctctgatgggaaagttccttttttggcttaacactcaccctttcttcacactcacatttaccaatgactctgctccgtttttggagcagactgttttaagttgctcaggagcctgatggaaccatgaaccgagactcttctctgtttcctgccaagacctcatctgcactaatgccttctccctgaccttgacacttccccctttagctataaaagcacttaccagccgaacgtggaacagtatcacaaaagattccatctcccaacgatttcagaactctgagctcagagagactccagattttaaaaaataatttgagtgcttggaaactattagctttttaagttccttccaaatatgttagtacctaccctttactttttccccaagaccatctcagggtggagcattctgtctaagagaagaaagataaggaggctcccacccacctctcccaagagcagacattaaacatctttgtgctttgaagagagtgaattttggatagtcttgtgattctcagactaacttccagaattatactttaacccctcccagatatggtccgcctttggcattgtgtgtacatctgcagttttgcatggtgggttgttaatatttcaaatgtgtggtttatgaatacgtctgtataatcggcttctggagtgaaacagcaaaccccaaatcttcaaagttggaaggaactttaaaaatcatccggtccaatctctttcctctttctgccacctcccaaggcagaaatcccctcttcagcttcttttgtaggtgggaatccagcctctgttagatatgtccagagatggaaactcactcccctacaaaagatggagcttaatggagaaattgcaactttcattaaaaaacaaattcagatgaaatatcagtaactgtcttggacagtgctgaaatcaggtggttaaacgggtaaacaaaatatactgtattttgagaaatggcacaaaaacaggcagtcatctttaagggctatgcctaggcaaactactaacatgcattgtgagaatgccgtgtatacctcacgtactgtgtactttgtacatatattttaccttttatacctatgttcgattttgttttgttttgttttgttctggctttgaggcttgttttgttgtctgtgtctgtctgaataacctgcgtgtctaaaaccacgtgaaatgtgaatgattattggcaatattaccttgacagaatcatgggactttgagaagagggaggacagaggcctctgtcgcactaacgctctcgtggttgctcgactgttgtatctgtgatacattatccgactaaggactctgggctggcagggccttctgccgggaaagctagaaacactaggttcttcctgtacatacgtgtatatatgtgaacagtgagatggccgtttctgacttgtagagaaattttaataaacctggtttcgtaaaaaaaaaaaat

SEQ ID NO: 337000 - DNA, 2283 bp, Homo sapiens
tcccataacattattaatagggaatcttttctgcatgtggttgtgtcaggttgtcaaacatcagatggttgtagatgtgtggtgtgtttctgaggcctttcttctgttccgtgggtctatatatctgttttggtaccagtaccatactgttttcgttactgtagccttgtagcatagtttgaagtcacatagtgtgatgcctttagcttggttcttctggcccaggatggtcttggcaatacgggttctttttgggttccatatgaagtttaaagtagttttttccaattctatgaagaaagttagtggtagcgtgttgggcgataacatcagtgatgtaatccccaaaacctcagaaacctcataattcttaacacctggcatttccatttctaaagatggacaggccctttggcgtggtaccaaccagataatgactgcatcaggatgaaagctgctgaactcggcatggcgcctcctcttctctgttgggatgagtgactttattgatttgagcagcatatgctgtgattggctgccctgcaaatttgtttcccttaaggaaccctcaccaactatctctgctggatttgggagttccgcatcttttgtggagggcagagtatggacatcttacacccggtggtcaagtgtgtaataaacttgagcattcgaatgggagaaaaagcaaatcgcacaatgacatattttgagtaataaccgtatttttcacagggtgacaaattgggccaataaatctgccatctttgaactcatctttggtggctagactgctacggcagcttctctgatgggaaagttccttttttggcttaacactcaccctttcttcacactcacatttaccaatgactctgctccgtttttggagcagactgttttaagttgctcaggagcctgatggaaccatgaaccgagactcttctctgtttcctgccaagacctcatctgcactaatgccttctccctgaccttgacacttccccctttagctataaaagcacttaccagccgaacgtggaacagtatcacaaaagattccatctcccaacgatttcagaactctgagctcagagagactccagattttaaaaaataatttgagtgcttggaaactattagctttttaagttccttccaaatatgttagtacctaccctttactttttccccaagaccatctcagggtggagcattctgtctaagagaagaaagataaggaggctcccacccacctctcccaagagcagacattaaacatctttgtgctttgaagagagtgaattttggatagtcttgtgattctcagactaacttccagaattatactttaacccctcccagatatggtccgcctttggcattgtgtgtacatctgcagttttgcatggtgggttgttaatatttcaaatgtgtggtttatgaatacgtctgtataatcggcttctggagtgaaacagcaaaccccaaatcttcaaagttggaaggaactttaaaaatcatccggtccaatctctttcctctttctgccacctcccaaggcagaaatcccctcttcagcttcttttgtaggtgggaatccagcctctgttagatatgtccagagatggaaactcactcccctacaaaagatggagcttaatggagaaattgcaactttcattaaaaaacaaattcagatgaaatatcagtaactgtcttggacagtgctgaaatcaggtggttaaacgggtaaacaaaatatactgtattttgagaaatggcacaaaaacaggcagtcatctttaagggctatgcctaggcaaactactaacatgcattgtgagaatgccgtgtatacctcacgtactgtgtactttgtacatatattttaccttttatacctatgttcgattttgttttgttttgttttgttctggctttgaggcttgttttgttgtctgtgtctgtctgaataacctgcgtgtctaaaaccacgtgaaatgtgaatgattattggcaatattaccttgacagaatcatgggactttgagaagagggaggacagaggcctctgtcgcactaacgctctcgtggttgctcgactgttgtatctgtgatacattatccgactaaggactctgggctggcagggccttctgccgggaaagctagaaacactaggttcttcctgtacatacgtgtatatatgtgaacagtgagatggccgtttctgacttgtagagaaattttaataaacctggtttcgtaaaaaaaaaaaat

SEQ ID NO: 337001 - DNA, 1924 bp, Homo sapiens
ggtaccaatgcagcggactcgggaggaaacagagaagagtctcggtcatggttccatcaggctcctgagcaacttaaaacagtctgctccaaaaacggagcagagtcattggtaaatgtgagtgtgaagaaagggtgagtgactttattgatttgagcagcatatgctgtgattggctgccctgcaaatttgtttcccttaaggaaccctcaccaactatctctgctggatttgggagttccgcatcttttgtggagggcagagtatggacatcttacacccggtggtcaagtgtgtaataaacttgagcattcgaatgggagaaaaagcaaatcgcacaatgacatattttgagtaataaccgtatttttcacagggtgacaaattgggccaataaatctgccatctttgaactcatctttggtggctagactgctacggcagcttctctgatgggaaagttccttttttggcttaacactcaccctttcttcacactcacatttaccaatgactctgctccgtttttggagcagactgttttaagttgctcaggagcctgatggaaccatgaaccgagactcttctctgtttcctgccaagacctcatctgcactaatgccttctccctgaccttgacacttccccctttagctataaaagcacttaccagccgaacgtggaacagtatcacaaaagattccatctcccaacgatttcagaactctgagctcagagagactccagattttaaaaaataatttgagtgcttggaaactattagctttttaagttccttccaaatatgttagtacctaccctttactttttccccaagaccatctcagggtggagcattctgtctaagagaagaaagataaggaggctcccacccacctctcccaagagcagacattaaacatctttgtgctttgaagagagtgaattttggatagtcttgtgattctcagactaacttccagaattatactttaacccctcccagatatggtccgcctttggcattgtgtgtacatctgcagttttgcatggtgggttgttaatatttcaaatgtgtggtttatgaatacgtctgtataatcggcttctggagtgaaacagcaaaccccaaatcttcaaagttggaaggaactttaaaaatcatccggtccaatctctttcctctttctgccacctcccaaggcagaaatcccctcttcagcttcttttgtaggtgggaatccagcctctgttagatatgtccagagatggaaactcactcccctacaaaagatggagcttaatggagaaattgcaactttcattaaaaaacaaattcagatgaaatatcagtaactgtcttggacagtgctgaaatcaggtggttaaacgggtaaacaaaatatactgtattttgagaaatggcacaaaaacaggcagtcatctttaagggctatgcctaggcaaactactaacatgcattgtgagaatgccgtgtatacctcacgtactgtgtactttgtacatatattttaccttttatacctatgttcgattttgttttgttttgttttgttctggctttgaggcttgttttgttgtctgtgtctgtctgaataacctgcgtgtctaaaaccacgtgaaatgtgaatgattattggcaatattaccttgacagaatcatgggactttgagaagagggaggacagaggcctctgtcgcactaacgctctcgtggttgctcgactgttgtatctgtgatacattatccgactaaggactctgggctggcagggccttctgccgggaaagctagaaacactaggttcttcctgtacatacgtgtatatatgtgaacagtgagatggccgtttctgacttgtagagaaattttaataaacctggtttcgtaaaaaaaaaaaat

SEQ ID NO: 337002 - DNA, 1019 bp, Homo sapiens
cttttgggtctttgctcttttggggtctttgctagagtgaattttggatagtcttgtgattctcagactaacttccagaattatactttaacccctcccagatatggtccgcctttggcattgtgtgtacatctgcagttttgcatggtgggttgttaatatttcaaatgtgtggtttatgaatacgtctgtataatcggcttctggagtgaaacagcaaaccccaaatcttcaaagttggaaggaactttaaaaatcatccggtccaatctctttcctctttctgccacctcccaaggcagaaatcccctcttcagcttcttttgtaggtgggaatccagcctctgttagatatgtccagagatggaaactcactcccctacaaaagatggagcttaatggagaaattgcaactttcattaaaaaacaaattcagatgaaatatcagtaactgtcttggacagtgctgaaatcaggtggttaaacgggtaaacaaaatatactgtattttgagaaatggcacaaaaacaggcagtcatctttaagggctatgcctaggcaaactactaacatgcattgtgagaatgccgtgtatacctcacgtactgtgtactttgtacatatattttaccttttatacctatgttcgattttgttttgttttgttttgttctggctttgaggcttgttttgttgtctgtgtctgtctgaataacctgcgtgtctaaaaccacgtgaaatgtgaatgattattggcaatattaccttgacagaatcatgggactttgagaagagggaggacagaggcctctgtcgcactaacgctctcgtggttgctcgactgttgtatctgtgatacattatccgactaaggactctgggctggcagggccttctgccgggaaagctagaaacactaggttcttcctgtacatacgtgtatatatgtgaacagtgagatggccgtttctgacttgtagagaaattttaataaacctggtttcgtaaaaaaaaaaaat

SEQ ID NO: 337003 - DNA, 902 bp, Homo sapiens
  misc_feature (8)..(8): n is a, c, g, or t
  misc_feature (63)..(63): n is a, c, g, or t
  misc_feature (66)..(66): n is a, c, g, or t
  misc_feature (72)..(72): n is a, c, g, or t
  misc_feature (97)..(97): n is a, c, g, or t
  misc_feature (111)..(111): n is a, c, g, or t
  misc_feature (114)..(114): n is a, c, g, or t
  misc_feature (129)..(129): n is a, c, g, or t
  misc_feature (166)..(166): n is a, c, g, or t
  misc_feature (168)..(169): n is a, c, g, or t
  misc_feature (172)..(172): n is a, c, g, or t
  misc_feature (183)..(183): n is a, c, g, or t
  misc_feature (200)..(200): n is a, c, g, or t
  misc_feature (240)..(240): n is a, c, g, or t
ggccaatnctcgcaaatagaacgtggcaagccgccggcggaagtggaaaagcgcgctgggagnagnacgagngagaagaccaggagccacgcaaaanaaaaaaaaaagagnttnacggccaaccaaagngtaaaggaagaaccgaaatgagagggaagagggagcnannagnaaattccaacnaagaaaagaggatcagnagtgggcgatcgcccattaatcattagcggacagagctcnacatatgccatatctcactcccctacaaaagatggagcttaatggagaaattgcaactttcattaaaaaacaaattcagatgaaatatcagtaactgtcttggacagtgctgaaatcaggtggttaaacgggtaaacaaaatatactgtattttgagaaatggcacaaaaacaggcagtcatctttaagggctatgcctaggcaaactactaacatgcattgtgagaatgccgtgtatacctcacgtactgtgtactttgtacatatattttaccttttatacctatgttcgattttgttttgttttgttttgttctggctttgaggcttgttttgttgtctgtgtctgtctgaataacctgcgtgtctaaaaccacgtgaaatgtgaatgattattggcaatattaccttgacagaatcatgggactttgagaagagggaggacagaggcctctgtcgcactaacgctctcgtggttgctcgactgttgtatctgtgatacattatccgactaaggactctgggctggcagggccttctgccgggaaagctagaaacactaggttcttcctgtacatacgtgtatatatgtgaacagtgagatggccgtttctgacttgtagagaaattttaataaacctggtttcgtaaaaaaaaaaaat

SEQ ID NO: 337004 - DNA, 409 bp, Homo sapiens
cctggccctaacttgattctttttgcttttctatgttcgattttgttttgttttgttttgttctggctttgaggcttgttttgttgtctgtgtctgtctgaataacctgcgtgtctaaaaccacgtgaaatgtgaatgattattggcaatattaccttgacagaatcatgggactttgagaagagggaggacagaggcctctgtcgcactaacgctctcgtggttgctcgactgttgtatctgtgatacattatccgactaaggactctgggctggcagggccttctgccgggaaagctagaaacactaggttcttcctgtacatacgtgtatatatgtgaacagtgagatggccgtttctgacttgtagagaaattttaataaacctggtttcgtaaaaaaaaaaaat

SEQ ID NO: 337005 - DNA, 1852 bp, Homo sapiens
actcacagtcactctctctgagcgcgtctcgctcgctctcatacacgcccggagcccaggagcgctcaggatcccgagcgccgcgaaaaagttcccccggcttttgctggagactcatcgctttgggaagtgcatttgcttcgtggctccgccgagcctgctgaatcctgtcctcgcggctcgggaccccgggatcgctgaccgctgccgccgccgcctctgcctcccggactatcggcagcctcggcaacaatagtggcggccgcccccagcgaggctccgggagcccttgcctgcgggggtccggggactcgagccggcctccgccccccggacgcacagccagcgtggtccccgcgtgcaacgcgagcgccggggagtggctcctgctttgcccctcgtgggggccgagccaagaccagtctgcaaactccatcccgccggctggaagaagtcgcggagccggcaccaaacccgcagcgtcttcccgcgcggatcccgggacttaaaaagccggggccaccccggcccaggacgggatgcgggtcggtccggtgcgctctgccatgagcggcgcctcgcagccccgcggcccggccctgctcttcccagccacccgaggcgtcccggccaaacgcctgctggacgccgacgacgcggcggctgtggcggccaagtgcccgcgcctctccgagtgctccagccccccggactacctcagcccccccggctcgccctgcagcccgcagcccccgcctgccgctccgggggccggcggaggctccgggagcgcgccggggcccagccgcatcgccgactacctgctgctgcccctagccgagcgcgagcatgtgtcccgggcgctgtgcatccacactggacgcgagctgcgctgcaaggtgtttcccattaaacactaccaggacaaaatcaggccttacatccagctgccatcgcacagcaacattactggcattgtggaagtgatccttggggaaaccaaggcctatgtcttctttgagaaggactttggggacatgcactcctatgtgcgaagccggaagaggctgcgggaagaggaagccgcccggctcttcaagcagattgtctccgccgtcgcccactgccaccagtcagccatcgtgctgggggacctgaagcttaggaagttcgtcttctccacggaggagagaacccagcttagactagaaagtctagaagacacacacataatgaagggggaagatgatgctttgtcagacaaacatggctgcccagcctacgtgagccctgagatcctcaacaccactgggacctactccggaaaggctgcggacgtttggagcctgggggtgatgctctacacccttctggttggacgataccccttccatgactcagaccccagtgcccttttctccaaaattcggcgtggacagttctgcattcctgagcacatttcccccaaagccaggtgcctcattcgcagcctcttgagacgggagccctccgagagactcactgcccccgagatcctactgcacccctggtttgagtccgtcttggaacccgggtacatcgactcagaaataggaacttcagaccagattgttccagagtaccaggaggacagtgacattagttccttcttctgctaatccccaaaacctcagaaacctcataattcttaaacgcaacatagtaaccagtgcgactgccataacgaccattgcagccagtggaagctgttgtaactgcaggccaaatgccagcaaggtgccacccaaccaggcacctaatgcattgcctaaattgaacgcgcttgttaaatggttgatgccagattagggag

SEQ ID NO: 337006 - DNA, 321 bp, Homo sapiens
cccgctcagagccagtttctcccgctcagagagtttcccccgctcagagccagtttctcccgctcagagccgtttctcccgctcagagccagtttctcccgctcagaggcctctgtcgcactaacgctctcgtggttgctcgactgttgtatctgtgatacattatccgactaaggactctgggctggcagggccttctgccgggaaagctagaaacactaggttcttcctgtacatacgtgtatatatgtgaacagtgagatggccgtttctgacttgtagagaaattttaataaacctggtttcgtaaaaaaaaaaaat

SEQ ID NO: 337007 - DNA, 2986 bp, Homo sapiens
gaagatgggaacatgtacaggagacagttctttcaaatcatctgtgtgaaagcgggtaaccctttgggtatttgcaagtctagagctttaggtgttactggttttaaaggtgtcaggggcagctggggctgcgtaaggtaaggtggcagaggaaaggagtaggtgaatggaacttactcacatcctaagcccacaggttgagaacttctgttcagctccctcaggggtttgcgaggctgcctttgcttttctagccccctaaacgggccccccttctctctacaggtgtttcccattaaacactaccaggacaaaatcaggccttacatccagctgccatcgcacagcaacattactggcattgtggaagtgatccttggggaaaccaaggcctatgtcttctttgagaaggactttggggacatgcactcctatgtgcgaagccggaagaggctgcgggaagaggaagccgcccggctcttcaagcagattgtctccgccgtcgcccactgccaccagtcagccatcgtgctgggggacctgaagcttaggaagttcgtcttctccacggaggagagaacccagcttagactagaaagtctagaagacacacacataatgaagggggaagatgatgctttgtcagacaaacatggctgcccagcctacgtgagccctgagatcctcaacaccactgggacctactccggaaaggctgcggacgtttggagcctgggggtgatgctctacacccttctggttggacgataccccttccatgactcagaccccagtgcccttttctccaaaattcggcgtggacagttctgcattcctgagcacatttcccccaaagccaggtgcctcattcgcagcctcttgagacgggagccctccgagagactcactgcccccgagatcctactgcacccctggtttgagtccgtcttggaacccgggtacatcgactcagaaataggaacttcagaccagattgttccagagtaccaggaggacagtgacattagttccttcttctgctaatccccaaaacctcagaaacctcataattcttaacacctggcatttccatttctaaagatggacaggccctttggcgtggtaccaaccagataatgactgcatcaggatgaaagctgctgaactcggcatggcgcctcctcttctctgttgggatgagtgactttattgatttgagcagcatatgctgtgattggctgccctgcaaatttgtttcccttaaggaaccctcaccaactatctctgctggatttgggagttccgcatcttttgtggagggcagagtatggacatcttacacccggtggtcaagtgtgtaataaacttgagcattcgaatgggagaaaaagcaaatcgcacaatgacatattttgagtaataaccgtatttttcacagggtgacaaattgggccaataaatctgccatctttgaactcatctttggtggctagactgctacggcagcttctctgatgggaaagttccttttttggcttaacactcaccctttcttcacactcacatttaccaatgactctgctccgtttttggagcagactgttttaagttgctcaggagcctgatggaaccatgaaccgagactcttctctgtttcctgccaagacctcatctgcactaatgccttctccctgaccttgacacttccccctttagctataaaagcacttaccagccgaacgtggaacagtatcacaaaagattccatctcccaacgatttcagaactctgagctcagagagactccagattttaaaaaataatttgagtgcttggaaactattagctttttaagttccttccaaatatgttagtacctaccctttactttttccccaagaccatctcagggtggagcattctgtctaagagaagaaagataaggaggctcccacccacctctcccaagagcagacattaaacatctttgtgctttgaagagagtgaattttggatagtcttgtgattctcagactaacttccagaattatactttaacccctcccagatatggtccgcctttggcattgtgtgtacatctgcagttttgcatggtgggttgttaatatttcaaatgtgtggtttatgaatacgtctgtataatcggcttctggagtgaaacagcaaaccccaaatcttcaaagttggaaggaactttaaaaatcatccggtccaatctctttcctctttctgccacctcccaaggcagaaatcccctcttcagcttcttttgtaggtgggaatccagcctctgttagatatgtccagagatggaaactcactcccctacaaaagatggagcttaatggagaaattgcaactttcattaaaaaacaaattcagatgaaatatcagtaactgtcttggacagtgctgaaatcaggtggttaaacgggtaaacaaaatatactgtattttgagaaatggcacaaaaacaggcagtcatctttaagggctatgcctaggcaaactactaacatgcattgtgagaatgccgtgtatacctcacgtactgtgtactttgtacatatattttaccttttatacctatgttcgattttgttttgttttgttttgttctggctttgaggcttgttttgttgtctgtgtctgtctgaataacctgcgtgtctaaaaccacgtgaaatgtgaatgattattggcaatattaccttgacagaatcatgggactttgagaagagggaggacagaggcctctgtcgcactaacgctctcgtggttgctcgactgttgtatctgtgatacattatccgactaaggactctgggctggcagggccttctgccgggaaagctagaaacactaggttcttcctgtacatacgtgtatatatgtgaacagtgagatggccgtttctgacttgtagagaaattttaataaacctggtttcgtaaaaaaaaaaaat

SEQ ID NO: 337008 - DNA, 3151 bp, Homo sapiens
tgtgtgtccctgtgtaagaatttcagggtccctgcgtccctgaaatccatcagccacttttgtttgctcgcataacctctctgtccaggcaaagtgttctttgcagttaaacaccccaataaatgtaattaacattccttgcaactttcccatcctaattgttgcagcctgggcccaggaggacaaagtttgctctgtgtgcatgtatcagtgtgggcaccagcgctgatgacctgtgtgtaatagcagtgactttgggctccgtgttctgtaatgcagtgtgggtccaggtagccctggcagtcataagagggaagatgggttcgtaggatgctcaggccctctctgaagaagtaggatatgctgctcttccctgctagcttttgtagagaatgcagcattctgagacaggctcccagttctgcaatgggaacttagtaaattgcgtaactcctattaggatatctcttgtaagctccagcattatgaatactatttggggctttgcctcataccctccaccccaggcgctctgccgatactttgcaaacatttattgcagttcgtgttagtttgtgaaatcacgagccctcggtagttgcagggcactgcttactggacgaaggggtaaatagcattcctggagcctttgctgttagtgcctgtgggcgctgttattgggaaggctttgtttttcatagcagctggtgtggaaataatggcttggttcctctctcttgcagaacccagcttagactagaaagtctagaagacacacacataatgaagggggaagatgatgctttgtcagacaaacatggctgcccagcctacgtgagccctgagatcctcaacaccactgggacctactccggaaaggctgcggacgtttggagcctgggggtgatgctctacacccttctggttggacgataccccttccatgactcagaccccagtgcccttttctccaaaattcggcgtggacagttctgcattcctgagcacatttcccccaaagccaggtgcctcattcgcagcctcttgagacgggagccctccgagagactcactgcccccgagatcctactgcacccctggtttgagtccgtcttggaacccgggtacatcgactcagaaataggaacttcagaccagattgttccagagtaccaggaggacagtgacattagttccttcttctgctaatccccaaaacctcagaaacctcataattcttaacacctggcatttccatttctaaagatggacaggccctttggcgtggtaccaaccagataatgactgcatcaggatgaaagctgctgaactcggcatggcgcctcctcttctctgttgggatgagtgactttattgatttgagcagcatatgctgtgattggctgccctgcaaatttgtttcccttaaggaaccctcaccaactatctctgctggatttgggagttccgcatcttttgtggagggcagagtatggacatcttacacccggtggtcaagtgtgtaataaacttgagcattcgaatgggagaaaaagcaaatcgcacaatgacatattttgagtaataaccgtatttttcacagggtgacaaattgggccaataaatctgccatctttgaactcatctttggtggctagactgctacggcagcttctctgatgggaaagttccttttttggcttaacactcaccctttcttcacactcacatttaccaatgactctgctccgtttttggagcagactgttttaagttgctcaggagcctgatggaaccatgaaccgagactcttctctgtttcctgccaagacctcatctgcactaatgccttctccctgaccttgacacttccccctttagctataaaagcacttaccagccgaacgtggaacagtatcacaaaagattccatctcccaacgatttcagaactctgagctcagagagactccagattttaaaaaataatttgagtgcttggaaactattagctttttaagttccttccaaatatgttagtacctaccctttactttttccccaagaccatctcagggtggagcattctgtctaagagaagaaagataaggaggctcccacccacctctcccaagagcagacattaaacatctttgtgctttgaagagagtgaattttggatagtcttgtgattctcagactaacttccagaattatactttaacccctcccagatatggtccgcctttggcattgtgtgtacatctgcagttttgcatggtgggttgttaatatttcaaatgtgtggtttatgaatacgtctgtataatcggcttctggagtgaaacagcaaaccccaaatcttcaaagttggaaggaactttaaaaatcatccggtccaatctctttcctctttctgccacctcccaaggcagaaatcccctcttcagcttcttttgtaggtgggaatccagcctctgttagatatgtccagagatggaaactcactcccctacaaaagatggagcttaatggagaaattgcaactttcattaaaaaacaaattcagatgaaatatcagtaactgtcttggacagtgctgaaatcaggtggttaaacgggtaaacaaaatatactgtattttgagaaatggcacaaaaacaggcagtcatctttaagggctatgcctaggcaaactactaacatgcattgtgagaatgccgtgtatacctcacgtactgtgtactttgtacatatattttaccttttatacctatgttcgattttgttttgttttgttttgttctggctttgaggcttgttttgttgtctgtgtctgtctgaataacctgcgtgtctaaaaccacgtgaaatgtgaatgattattggcaatattaccttgacagaatcatgggactttgagaagagggaggacagaggcctctgtcgcactaacgctctcgtggttgctcgactgttgtatctgtgatacattatccgactaaggactctgggctggcagggccttctgccgggaaagctagaaacactaggttcttcctgtacatacgtgtatatatgtgaacagtgagatggccgtttctgacttgtagagaaattttaataaacctggtttcgtaaaaaaaaaaaat

SEQ ID NO: 337009 - DNA, 3037 bp, Homo sapiens
cgttcgacggtgtctgccaaaggagtatctatcatctctggcgaacttgacaatcatcacttacctcgaaaccctgcccacatcactttagaaggtcagcaggatgtcctctcacccaccctgtgctggtgtctaacaaatcttcgacggtgttctgtaatgcagtgtgggtccaggtagccctggcagtcataagagggaagatgggttcgtaggatgctcaggccctctctgaagaagtaggatatgctgctcttccctgctagcttttgtagagaatgcagcattctgagacaggctcccagttctgcaatgggaacttagtaaattgcgtaactcctattaggatatctcttgtaagctccagcattatgaatactatttggggctttgcctcataccctccaccccaggcgctctgccgatactttgcaaacatttattgcagttcgtgttagtttgtgaaatcacgagccctcggtagttgcagggcactgcttactggacgaaggggtaaatagcattcctggagcctttgctgttagtgcctgtgggcgctgttattgggaaggctttgtttttcatagcagctggtgtggaaataatggcttggttcctctctcttgcagaacccagcttagactagaaagtctagaagacacacacataatgaagggggaagatgatgctttgtcagacaaacatggctgcccagcctacgtgagccctgagatcctcaacaccactgggacctactccggaaaggctgcggacgtttggagcctgggggtgatgctctacacccttctggttggacgataccccttccatgactcagaccccagtgcccttttctccaaaattcggcgtggacagttctgcattcctgagcacatttcccccaaagccaggtgcctcattcgcagcctcttgagacgggagccctccgagagactcactgcccccgagatcctactgcacccctggtttgagtccgtcttggaacccgggtacatcgactcagaaataggaacttcagaccagattgttccagagtaccaggaggacagtgacattagttccttcttctgctaatccccaaaacctcagaaacctcataattcttaacacctggcatttccatttctaaagatggacaggccctttggcgtggtaccaaccagataatgactgcatcaggatgaaagctgctgaactcggcatggcgcctcctcttctctgttgggatgagtgactttattgatttgagcagcatatgctgtgattggctgccctgcaaatttgtttcccttaaggaaccctcaccaactatctctgctggatttgggagttccgcatcttttgtggagggcagagtatggacatcttacacccggtggtcaagtgtgtaataaacttgagcattcgaatgggagaaaaagcaaatcgcacaatgacatattttgagtaataaccgtatttttcacagggtgacaaattgggccaataaatctgccatctttgaactcatctttggtggctagactgctacggcagcttctctgatgggaaagttccttttttggcttaacactcaccctttcttcacactcacatttaccaatgactctgctccgtttttggagcagactgttttaagttgctcaggagcctgatggaaccatgaaccgagactcttctctgtttcctgccaagacctcatctgcactaatgccttctccctgaccttgacacttccccctttagctataaaagcacttaccagccgaacgtggaacagtatcacaaaagattccatctcccaacgatttcagaactctgagctcagagagactccagattttaaaaaataatttgagtgcttggaaactattagctttttaagttccttccaaatatgttagtacctaccctttactttttccccaagaccatctcagggtggagcattctgtctaagagaagaaagataaggaggctcccacccacctctcccaagagcagacattaaacatctttgtgctttgaagagagtgaattttggatagtcttgtgattctcagactaacttccagaattatactttaacccctcccagatatggtccgcctttggcattgtgtgtacatctgcagttttgcatggtgggttgttaatatttcaaatgtgtggtttatgaatacgtctgtataatcggcttctggagtgaaacagcaaaccccaaatcttcaaagttggaaggaactttaaaaatcatccggtccaatctctttcctctttctgccacctcccaaggcagaaatcccctcttcagcttcttttgtaggtgggaatccagcctctgttagatatgtccagagatggaaactcactcccctacaaaagatggagcttaatggagaaattgcaactttcattaaaaaacaaattcagatgaaatatcagtaactgtcttggacagtgctgaaatcaggtggttaaacgggtaaacaaaatatactgtattttgagaaatggcacaaaaacaggcagtcatctttaagggctatgcctaggcaaactactaacatgcattgtgagaatgccgtgtatacctcacgtactgtgtactttgtacatatattttaccttttatacctatgttcgattttgttttgttttgttttgttctggctttgaggcttgttttgttgtctgtgtctgtctgaataacctgcgtgtctaaaaccacgtgaaatgtgaatgattattggcaatattaccttgacagaatcatgggactttgagaagagggaggacagaggcctctgtcgcactaacgctctcgtggttgctcgactgttgtatctgtgatacattatccgactaaggactctgggctggcagggccttctgccgggaaagctagaaacactaggttcttcctgtacatacgtgtatatatgtgaacagtgagatggccgtttctgacttgtagagaaattttaataaacctggtttcgtaaaaaaaaaaaat

SEQ ID NO: 337010 - DNA, 2419 bp, Homo sapiens
actcacagtcactctctctgagcgcgtctcgctcgctctcatacacgcccggagcccaggagcgctcaggatcccgagcgccgcgaaaaagttcccccggcttttgctggagactcatcgctttgggaagtgcatttgcttcgtggctccgccgagcctgctgaatcctgtcctcgcggctcgggaccccgggatcgctgaccgctgccgccgccgcctctgcctcccggactatcggcagcctcggcaacaatagtggcggccgcccccagcgaggctccgggagcccttgcctgcgggggtccggggactcgagccggcctccgccccccggacgcacagccagcgtggtccccgcgtgcaacgcgagcgccggggagtggctcctgctttgcccctcgtgggggccgagccaagaccagtctgcaaactccatcccgccggctggaagaagtcgcggagccggcaccaaacccgcagcgtcttcccgcgcggatcccgggacttaaaaagccggggccaccccggcccaggacgggatgcgggtcggtccggtgcgctctgccatgagcggcgcctcgcagccccgcggcccggccctgctcttcccagccacccgaggcgtcccggccaaacgcctgctggacgccgacgacgcggcggctgtggcggccaagtgcccgcgcctctccgagtgctccagccccccggactacctcagcccccccggctcgccctgcagcccgcagcccccgcctgccgctccgggggccggcggaggctccgggagcgcgccggggcccagccgcatcgccgactacctgctgctgcccctagccgagcgcgagcatgtgtcccgggcgctgtgcatccacactggacgcgagctgcgctgcaaggtgtttcccattaaacactaccaggacaaaatcaggccttacatccagctgccatcgcacagcaacattactggcattgtggaagtgatccttggggaaaccaaggcctatgtcttctttgagaaggactttggggacatgcactcctatgtgcgaagccggaagaggctgcgggaagaggaagccgcccggctcttcaagcagattgtctccgccgtcgcccactgccaccagtcagccatcgtgctgggggacctgaagcttaggaagttcgtcttctccacggaggagagaacccagcttagactagaaagtctagaagacacacacataatgaagggggaagatgatgctttgtcagacaaacatggctgcccagcctacgtgagccctgagatcctcaacaccactgggacctactccggaaaggctgcggacgtttggagcctgggggtgatgctctacacccttctggttggacgataccccttccatgactcagaccccagtgcccttttctccaaaattcggcgtggacagttctgcattcctgagcacatttcccccaaagccaggtgcctcattcgcagcctcttgagacgggagccctccgagagactcactgcccccgagatcctactgcacccctggtttgagtccgtcttggaacccgggtacatcgactcagaaataggaacttcagaccagattgttccagagtaccaggaggacagtgacattagttccttcttctgctaatccccaaaacctcagaaacctcataattcttaacacctggcatttccatttctaaagatggacaggccctttggcgtggtaccaaccagataatgactgcatcaggatgaaagctgctgaactcggcatggcgcctcctcttctctgttgggatgagtgactttattgatttgagcagcatatgctgtgattggctgccctgcaaatttgtttcccttaaggaaccctcaccaactatctctgctggatttgggagttccgcatcttttgtggagggcagagtatggacatcttacacccggtggtcaagtgtgtaataaacttgagcattcgaatgggagaaaaagcaaatcgcacaatgacatattttgagtaataaccgtatttttcacagggtgacaaattgggccaataaatctgccatctttgaactcatctttggtggctagactgctacggcagcttctctgatgggaaagttccttttttggcttaacactcaccctttcttcacactcacatttaccaatgactctgctccgtttttggagcagactgttttaagttgctcaggagcctgatggaaccatgaaccgagactcttctctgtttcctgccaagacctcatctgcactaatgccttctccctgactttccattctctgctggatgacgtgagtaaagcctgaatctttggagtacgctggagatagttgtaaatggcgagatagttataaatggcgagatagttgtaaatggcg

SEQ ID NO: 337011 - DNA, 862 bp, Homo sapiens
ctggaccatcacagctcgatcaaactcaccttcccaaggcaaagctccaaaggcatcccctctccagcttaacaaccttcagtggctccctatcatcctcaaagaaagcacaacaccctcagcctggcttcggagacccacataggatgaccccaactctcctatccctcaccttccctgttgtccacattttataccaactctccaaccagagcctgctactttctgagcatacagttggccctccacagcctcaagttccacatctgcagattcaagcaacctcagaatgaaactatttggaaagaaataaccaacaataagaataatataaatgtaataacagtacactgtaacaactatttacaaagcatttatattttattagataaagccataccttgcttaaaaggggatatgttgagaaatgcatcattaggcaatgtcatcttcatgcaaacatcatagagtgtacctacacaaacctacacgacagagcctactacacacctaggctacgtggcacagcctattgctcctaggctacaaacctgtgcagcatgttaccgtactgaataccgtaagcaattgtgacacagtggtatctgtttctaaacataccaaatgtagaaaaggtacagtaaaaacacagtattataatcttatgggaccaccatcaataaccaaaatgtcgttatgtggtgcatgactgtattataagtaatctcaagatgatttaaagtgtacaggaagatgtgtataggttatatgcaaaagctagctatggcattttacataaggacttgagcatccaaggattctgggatccccaagggcaggggtccccaacccccgggccatg

SEQ ID NO: 337012 - DNA, 450 bp, Homo sapiens
cccacacccatcttcaagttattttgaagactaattctttattttgtgttgctgcttgcagttacataaaattgagacattaactagggttctttttgagggtgcaaataatacttttaaggaattcacttaacagcaaatttgtttcataagaaaacttttctcctttctttagcttctttgaaagaaaggatgccttgatggaaagtggaatcagtgggggaagagtaattttggttacagcagtattgatagggtactgagacgagaggccttggaccaccagattgtgataaagtttaaggacatagatgagaaggaaattacctggatgaaagagagttgtgaaatctgaaaggtagtttgggagaactaaaaacaatcttggatatatgtttagttttgcccagagtctatccagactccttaagatgcttaggatttggtggg

SEQ ID NO: 337013 - DNA, 1744 bp, Homo sapiens
ggtgacatcttactaactatagttcagtatcaaaacatagaaattgatgttggtacagttaatagactattcagatttcatccattttacattgttcatttgtgtgtgttagtatctttaatgcgccagacattgcttatactctggaatggaatgtggtgatacagacagttcttcaaaacactttacactttcttgggaggtgtttggttttgttttgttttgtaatgtggcctcaattctcaaacctgcctttaagatttctccacttgtcttagagagtcaagaattaaagtattccaactgcagtgaatattaattaaagaataaatatattaaagtgggttggaggcaggggaataacatgtcacttgtcacattgagccagctagttagaattctcctgacggatgcaaaggcctaggaagcttaagttcctagatagctgagaatctttgccatgagtgaaaacaataaggaacatcactacctggttggaattgccaaatttggccaggcggatcagtcctttcaaatctaagtctctgtgttggtcattttccttccagcaaggaagatccattatttaacaggtatacaatctccaggaaaacctatgaaaggtctgtcagtatcttctgtgcttttataacacattcataacacacacacaaaattacagttaaagtttcacaaaatacatacacttatggggatatgcttatttattctttcattcatttttttaaaaattggtggttattacctggtaaatcaatttcaggaccgttgtttaaaagaaaagtcagttcaaacagtagtaagaattgttaggttggtgcaaaagtaattgctgtttttgccattaaaagtaatgataataacagcctaaaagttttcataataagagctacaatttactggctacctattatgtggtaggtgattttccaagaaaatgaccagtcataacattcttgggattcattcattcaacacatagttattgtgctcctatttgctaggcattgttctagttgacagagcagtgaccaaagcaggaaaaaaaaaaattcgctaatggaatttacagtctagcagggagaatgtttaacagacacatgagaaaatcatatttcatgtcataggatgtaagtactatgaagataaataattagggaagggagataaggagtactgggatgctagtttaagtaagatggtcatggcagacttctttcacaaggtgatatctgaaggagatgaaagagaaagccgcagggatactgggtggaagagaaatcctggctgaaggtgtagcaagagccagaccttgaggcaagacacatattggagaattcaaaggataggacagtggagttatgattcaaatgcaaaacaatagactcaggacattgagctcagggtcagacttagagggtcctgaacacaggtctagctgactccaaagtcagtgcacttttacaaataaccacatgtgctactgactgctcatctactatgtgtcattttccaaactcttgctctaaatatttgatggccatctaacgttttctggttaactaaaagagtcaaattacccctgctagaaatcacatttcaaaggaaattgtcaacaaaagaaatacactcaggactacaagctttccaaacattaataagaggcaaatatgtctagtgcattactgtttcaattaattaaatgattagtgagatagcactg

SEQ ID NO: 337014 - DNA, 314 bp, Homo sapiens
gcacaagaatcgcttgaaccagggaggcagaggttgcagtgagctgagattgtgccactgcactccagcctgaacgacaaagcgaggtaggaaggtaagaaggtaggaaggtaagaacgcaggaaagaaggaaggaaggaaggaaaaaccaaccttaaactgtgtctaagaaataagaacaggccaggtgcggtggctcacacttgtaatcccagcactttgggaagccaaggtgggcggatcacctgaggtcgggagttcaagaccagcctgaccaacatggagtaaccccgcctctaccaaaaaaaaaaaaa

SEQ ID NO: 337015 - DNA, 229 bp, Homo sapiens
gaagacagaacaagatagtgtgacaagggctataatggactgctcagagcttggctgaggggtccccccaaggcagcttctcagagggtacatatgagccaggcatttagacacttactgagggcctactttatgccacgtgtaccgtgggaacaaaagcccagtagggagtgggcagcactctgagaaattcatttcataaatgtttggatgcaggaaagggtgacaa

SEQ ID NO: 337016 - DNA, 230 bp, Homo sapiens
gtggcgatatctgtcttaaagaagtggggctcaaacctggatgaaccgtcgaatactctggagaaatctaaaaaattctgatgtccagcaatcacactgaatccattgaatcacagtttctgggttaggagaggccaggttttggttttgggtttgcctcaaagctcttacagctgtttaaaatattcagaaaggattgaagatcaaccaagcttaggggctcgtgattc

SEQ ID NO: 337017 - DNA, 807 bp, Homo sapiens
ataccagcaactgaaaagcagaacaaaaacacttggatcgtaggctaactcctaaaagattgatccctggtgctgatacagaaaccatccaagaagccttggaaaagtgtcagattcccgatgatgctcaagatgcttttggccgaagaccataagtgctgagaacttccttgcttcctctcaactcactctgggatcatctttcataactctaagcttttctccatcatatgtttccaacctacactgcaactcaagcatgccaagtagtcatcaatctataaagaaatacttaaatgcattgttgaggaggactgctagtcaaaggagcctctcaggaagcttatgcaataggaaagaatcaccctgtcttactctttaaaagactttcctgcaagagaggcacaccagactcaaaatttcatgtactgtgcaaaaacatgcccaggcctttggagaactggtcttttaaacaagaattgagaccaggtgcaatggttattgcctgaatgcccagcacttcgggagaccaaggtgggaggatcgcttgaggtcaggagttcaaaaccagcctgggaaacatagtgagactctgtctctacaaaaaattaaaaaaacaaaacaaaacaaaaaaaacaaccagatgggtgtggtgacacatgcccatagtctcagctacttgggaggctgaggcaagaggatcgcttatgcccaggagttcaaggctgcactgatccatgagccatgactgcactccaacttgggtgacagagtgagaccctgtatttattgtctttaaaaataaaa

SEQ ID NO: 337018 - DNA, 588 bp, Homo sapiens
ccaaaggttcctaacactcaggatttccttcccttacagcatgccaagtagtcatcaatctataaagaaatacttaaatgcattgttgaggaggactgctagtcaaaggagcctctcaggaagcttatgcaataggaaagaatcaccctgtcttactctttaaaagactttcctgcaagagaggcacaccagactcaaaatttcatgtactgtgcaaaaacatgcccaggcctttggagaactggtcttttaaacaagaattgagaccaggtgcaatggttattgcctgaatgcccagcacttcgggagaccaaggtgggaggatcgcttgaggtcaggagttcaaaaccagcctgggaaacatagtgagactctgtctctacaaaaaattaaaaaaacaaaacaaaacaaaaaaaacaaccagatgggtgtggtgacacatgcccatagtctcagctacttgggaggctgaggcaagaggatcgcttatgcccaggagttcaaggctgcactgatccatgagccatgactgcactccaacttgggtgacagagtgagaccctgtatttattgtctttaaaaataaaa

SEQ ID NO: 337019 - DNA, 528 bp, Homo sapiens
tgtctgctagcctgaatttctccaacactgagttttcaacgtccaccctgctcccctccacccgccccacaaagtatcagacagtgttttcccaatggcaagttagctcatgcaaaagcaaagagaatcctgatgccatcctgcctatccacacactgacagaaaccatccaagaagccttggaaaagtgtcagattcccgatgatgctcaagatgcttttggccgaagaccataagtgctgagaacttccttgcttcctctcaactcactctgggatcatctttcataactctaagcttttctccatcatatgtttccaacctacactgcaactcaaggtaatctgcatatttataaatcattaagtcatcaacgattccttatatttcacctaaaaccactactgtggcaaatgcaagaagtctttttttattttttgagatggagtctcaaaaataaatgaatagataaaataaacatgaaaaaaaagctcagctagaattacagtattttaactgtaaggtgaa

SEQ ID NO: 337020 - DNA, 724 bp, Homo sapiens
tccagtgagggtctaggaatatatcccctacgaatatgagggactgttgtagttaaagctagtgtacagataaattacattaggtagtatggaaatcagaggaaaagggaaaaaacaattattactttacagttacaccaaatctcattgctatttcaataagacataatgacatgttttagaaagtatcttcaagtaatattggcacatattccctggagaacaccgctaccatgcaagctgttcaatatttattctagtggaaggaaaggactagcagaatttaaattaccatgaattgtaatacaatgtgacatgagcaagtgccttgggagggccagcacattagagacccagataattgaaggaatttgcaaggagaaagggcaggttaaggagtggctggagaatagcttatgaagaggtagtgtagcaagacaagccacagacaaaaccctcagacacccaagttaaagaaggaagggctttattcggctgagagcttaggcaagactcatgtctccaacaaccgagctctccaagtgagcaattcctgtcccttttaagggctcacaactttaagagggtccatgtgagagggtcgtgatcgattggacaagcagcggtacatgacaggggctgtatgcaccagtaatcagaatggaacagaacaggacagggattttcacagtgcttttccatacatgtctggaatctatggata

SEQ ID NO: 337021 - DNA, 260 bp, Homo sapiens
taggggctgaggcagctaccttggaccatgagatggaagtccagcattggtaaggacctgagaattcttgacccagtcatcccaagatgcactcacccagagggtcagcttttccatccttgtctggaactgtgaacacccctactactcggtggccctctttgcggaggtggctatagacttcttgtccaaagaggctctggccaattagtgccaacttcagcttgtttttgaaataaacctgtgaaacaattcaatga

SEQ ID NO: 337022 - DNA, 519 bp, Homo sapiens
ttaaaattctagagctcagaaactctcctttatatgtttcttttcattaagttgctttttcatccattatatacatctttttaaaaatcggagctcattagactggtactcacaaaacagtgagaagataaattggcatcatctctctggcaaacaacttagtgatattttaagaaccctgtaaatgttaacttctcagaatctaccttaaagaaataacttagtatgtggaagaatctttcatgcacaaagatgtctattgcagtgttatttttaataatgaaaaactaggaacagcaataaggaaataagtaatagttactgacaatatctatgatagaaaattaatgcagccagtaacatgatgaagagtatgtattcatattgaaaaatagtatgtgtacatatgtaataatctcaatgcatagaaaaatacaatgaaacgtaaaaatattcaaagaattgacactcagtaaaattgtaggtgatattccctgtctccttttccttttttctttc

SEQ ID NO: 337023 - DNA, 340 bp, Homo sapiens
ctttctctgtttgtgtttatatgtgtgtgtgcatatgtagatgggagcatctgcctctggcccaggccctgtgcatcggggtgtcggaccaggctcctggccgccttccccatctggctagcttctggcagccgtgcagggttgggactgaccttctgagaagctgggcgcgcacctacccagtggcctgcgtgagaggttcagctgcaggccctctcctcaaaaggactttccgtttctgccctccaagcttcctaaaatgtctgggctcttgcatctttgggttaaggctctgctgcccttgtagtgtctctggaactcagaatctctggggctcagc

SEQ ID NO: 337024 - DNA, 437 bp, Homo sapiens
gaataaactattaattttactgagctacaacttctaatttacataagttagaaagtttgatttcctctagattttacaatggtctggtttcttttcaccttataagtttttaaaaactattgattataccaataaacaatggctcccacaaactaatttaactcccagtcacagtaatgctgtctcaattgtttacaaatatttgattatgtgtaggtccactttcactgcaataaaattgcctaataaagacaccaactattctttttgtgtgtacatgtgcgtgtgtaattttagtgtaatactgcaattagctttttgaagcatagtaacttaaaaattatatgttcaaatgggaatacggattggtgatttaggcaaaacttaaaaataatgaaactggccaggcgtggtggctcatgcctgtaatcctagca

SEQ ID NO: 337025 - DNA, 370 bp, Homo sapiens
atgtgcacggatagtccacaagagatcttaagggatctcaccaggggcgtgtgctacacaagagagcttccactgatctataattggggtaaagcaacaccttttcaaggtgatgattatgcaaatccagacaacccaaatttcaggcccaatctgcctacagcagaattactttcactctcttcttttagaaagtacccttacaagaaatatttattaaatgtcattttgcaagtccaactggggacaaaccacataagatatgttaaaatctttaatgtcctttaatgtgctacttgttttacaactgctgaatgaatagttcaagcgctccgtcagccttataattcattttagattcatgttagct

SEQ ID NO: 337026 - DNA, 421 bp, Homo sapiens
ggtggggaggggctgcagtgccgatgacaggaaaggcctgcaggtgggacctgcctgaggagcactcccagcagagggcactgcgaaggtcctggcacagggtggaggggacaccaccagggatggtgcagctgggcagagtgagagaaaagtggaggaggtgagccaatagtgcgggtcagatggaaagccaggacttgcgtctaaaagggattactctgctgggctgagatgagactctgggggatcagggcaggggctggcaacaacctcagcaagagacgataagcctgggtgtcagagtggaggggatgaggcgtggacagactctgggcaaacctggcagggagggccagtagggtttctggtggagtggatgcggatgtggaggaggaggtcagagaggactcgtggggttttg

SEQ ID NO: 337027 - DNA, 232 bp, Homo sapiens
caaaaaaaagaatgctttgaaggcgagcaggaagtgccaccttcaagacctcagcactccaccctgaagcaggcagatccaaccaggccaaggctctttgcttcatgtcccagccgtcccatcacaggaggtgagggcccaggctgtgcgtctagtccagcagcactggaaatgtggccagtgccatctgagatgtgctgaagtataaaatccacagcagattaatatgaaa

SEQ ID NO: 337028 - DNA, 414 bp, Homo sapiens
gcagaatcacccaaaaaattctggagataatcctccagtgacttacacttcctggacaaaaattgagcttatggcctagaacccatctactgaaaagtaagcagattaaacaatacgaattatttactcaacaccaattttcttcttttttgtgactgaaagaaacccaacctggcaatcttccttgcaactaggagagtctatattacatagtgctagtaagaagatgcaagaggccgggcacagtggctcacgcctgcaatcccagcactttgggaggccgaggtcggcggatcacgaggtcaggagatcgagaccatcctggctaatatggtgaaactctgtctctactaaaaatacaaaaaattggccgggcatgttggcacgtgcctgtagtcccagctactcaggagg

SEQ ID NO: 337029 - DNA, 289 bp, Homo sapiens
ttatgtgtcttatacataactgctgctttggctttgcttgtcgtatagcaggtacttttccacttatatcctgactcactttcagaagtccttttttgaaacagggtgttgctctgttgcccagactggaatacagtggcacgatcatagctcatggcagcctcaagctcctgggttcaagtgatcctcccaccttaacctcccaagtagctgagactacagacacacactaccatacctggctaattctttttattttatttatttatttatttgagatggagtctgg

SEQ ID NO: 337030 - DNA, 316 bp, Homo sapiens
tcacttagcatagtttggtcaactcatcaagccataccctgaatcaagatgttcagagccctatcattttacagccactataaaccattctttcaaacacacatactccaaactcctccaaactccccttcccctttgtcacttatgcctgctccctccttccttcccattaatttaaatactataggtcctacaagcctcaatcaaatttaagatttactttgtctatgaaactttccatgataatggcaagctctctttctcgtaaaactcacaggaatcagttagtatttaaatatatggtacccttacaact

SEQ ID NO: 337031 - DNA, 461 bp, Homo sapiens
acatgaagtttctgtgtcagagttacagatttttctagtcacagcacagcaggcaacatgcacttcatgttcacatcgcttccccttgtctcccaaatcccataaggatgacacagtaggtctttgtcacagccggagaatcctgagcttaggagactccagtcttataaagaggtttataataaacatacccaacctttgacattattgttctggccaggaaacaaacctgccttctgtcatcttctgagactgttggttacacaaacatccttcaaaagataatccaggacaaaaactgccacaaggcatatagaattgccccgtgccaccaccacgaccagaggatattttaagcctctcaatttataacttctctctttttcctcccttgctatttatttgttgaaaagatgtctgatctctttttatttttatttatttatttatttttgagttgg

SEQ ID NO: 337032 - DNA, 414 bp, Homo sapiens
ggaaaataaaagaagcaaaaacaggccctgctgtgagggaccacgaggcagtgccaggatgaaagagttggagtaacctaggtgattctgagtgaatcagtcaggaggccttcctggaggggaccattgcaggtactgtgccttctgcctgaaatgtgctcacctcgcctcgctgactcctactcgccagttagtgttcggcccatttctgcccccgtgagatttcttcacagatgttgccctcccccatttgctgagtttcctgcatgccggctccttcagcactcaagggtacctctttgattctgcttctcacagggctgaggccccagcttgtggccaccacaacgtatcaagctatctccagggttgggctcaggactcagagctgacgcagctggggtgccccttggt

SEQ ID NO: 337033 - DNA, 426 bp, Homo sapiens
tccagcctgggtgacagagagagactctgtctcaaaggaaaaaaaaaaatcagtgctgctcccgtggctgcacagcttgtggttggtcattccaaacctgacaaccacggaaaagagaagagaagctcagaggagccagatgaaggaggaacccaccttcagggtctggtaggcctggacccggatcaggggcttgaaggactggagggtgtggctgaggggaagagaggaggacgatgtgagtaagcagagaccactctgcagcagaggccacagactggcgtctcgagggctggattcttttgcgggcccattttgtttggcccgtgccgtgttctttaaaacttggaactgaatgtctttatatggagaactcactctttccttccccacagacgtcaccatccccgttttctatcctgatct

SEQ ID NO: 337034 - DNA, 335 bp, Homo sapiens
atcccatctgtgtctcttggataatactcaatcttctttgcaaccacatgcatcaagctattggctaaatatccttgtagacaggatgtctcctacttgcatttgaactactcttttgtttaaaatataaatgcaattaatttgcattatttatttaatctgtctttgcatactaatgtcgcaaaaactgaaaataaatattaggtcatgatcaacatgcctcaaaatatctttgtgttcagtgactttaaataacttttggcaaaaaaactaaccccaactttctttgaagcttttgatgcttccccacctcctactatcctctgcgccgccca

SEQ ID NO: 337035 - DNA, 388 bp, Homo sapiens
ttcccctacgcaagctctcttgcctgccgccaagtaagacatgactttgctcctccttcaccttctgccatgattgtgggtcctccccagccatgtggaactgtgagtcagttaaaccttttttccttataaatgcctcagccttgggtatgtctttattagcagagtgagaacagactaatgcaggtcctcttcagtctctcgtggacacacctggggcctcctaaagtatcttctgctcccagcctcctcccttctcaccattctgttcctggggcattctctgtttccatcttgtgatgcttctgttgaaaaccattgagagccttctgcttcctgtgtcgttaaatccaaattcttcaccgttgcctatatttcagtagcataa

SEQ ID NO: 337036 - DNA, 2289 bp, Homo sapiens
ttttgaatccccggcggcggcgcggggcggccgcggaccgtgagtcagcattggcggcggccccagcgcgtggcagccgtgcgccgccaaggtgcgggtctcgttactcggcggtcaggagcgggccctcccttaggtgcgccccccgccaggttctgcgttagacctgcatcttagcaatgtgaatattgcatccctagagaaggacctggaagagcaagacggccacgacctgggagcagcaggtcccaggtcgctggccggctctgcacctgtcgccatccccggctccctgcccagagcaccatcgctacactcgccatcctctgcgtccacctcgccgctcggttcgctgtcccagcccctcccagggccggtgggctcctcagccatgacgcctccccagcagccgccacccctgcgttcagagccgggcacactgggctctgcagcctcatcctacagccccctaggtttgaacggtgtccccgggagcatctgggactttgtttccggcagcttctcccccagcccctcccccatcctgagtgccggccccccatcctcttcgagtgcaagtccaaacggagctgagctggcccgggtcaggcggcagctggacgaggccaagaggaagatccggcagtgggaggagtcctggcagcaggtgaagcaggtctgcgatgcctggcagcgagaggcgcaggaggccaaggagcgtgcccgtgtggccgatagcgaccggcagctggcgctgcagaagaaggaggaggtggaggcacaggtgatcttccagctccgcgccaagcagtgtgtggcctgccgggagcgggcccacggtgctgtcctgcggccctgtcagcaccacatcctctgtgagccgtgtgcggccaccgcacctgagtgcccctactgcaagggccagcccctgcagtggtgacctcagcggggacagccacctcctgctgggcaccctggctccagcgctcctcctgaccacggacatgtcgtcactcgcttctggtgccaccgacgtgaggaccgaggctgggagcccttcctgttacacgttatcatgaggctgggagccccgcctgcgcttggcctgacagcctttcctgtcacacgttgtcacctatctagtcctaccgacggtttcaaggtattttcctcaaaaaccttaaatgcaaacccacagaacccgcctgcctgtccctgaggggcctggtgcctccgggatccacgcggcgctgtgatcacagcagtttgtggtcctgacactactgtgactaggccactgggagctggggtctttcaaagcactttgtaaaccgaggaatttagttagaggttataaattgctctaagctgctttctgtttttttttaatatgcgataatatgaagctttatatgtgtactgtgaacttaaatatttcatatcagtttattgtcaattcatagtatgctaaatatattagatttcatattctgaaactagtacttatgaaatgagtgtttatctagtagtaagacctaggatttttacattttccaattaagtgcaaatagtatttataagcagagtgattatggattgagatgtttttaacttgatggaaggagctagttttcctgagcctgtgtgtgcaccaggcactggggctgatgttccagcctcgtggcgtgggagcaggagagctccgtcctgcatttctgtggtccgtggccgctgtttctgtgcgcctgcgcctcggagagcaagtgaaggagcatcatgggttttgttttctcccttaaccctctgaaagacagtttgatactaacaaaaaacgcagcagaggggatccaacgtcagagcttttagaattacttttttaagcagctgtcttctggctgggtgcggtggctcatgcctgtgatcccagcactttgggaggcgggtggatcacctaaggtcaggagttcaagaccagcctggccaacatggtgcaaccccgtcttagtaaaaatacaaaaattggcctggcgtgagagcgggcacctgtagtcccagctactcgggaggctgaggcaggagaatcgcttgaacctgggaggcagaggttgcagtgagccgagatcgcgccaccgcactccagcccgggtgacagagcgagactctggctcaaaaaaaaaaaaaaaagctgttttctgattactcagagctgtcctaggcaatggtgctttgtagctccttggagatgtcgctgggcgtcctggcaggggtcaggcagtgaactgggagagt

SEQ ID NO: 337037 - DNA, 2635 bp, Homo sapiens
  misc_feature (657)..(657): n is a, c, g, or t
ttttgaatccccggcggcggcgcggggcggccgcggaccgtgagtcagcattggcggcggccccagcgcgtggcagccgtgcgccgccaaggtgcgggtctcgttactcggcggtcaggagcgggccctcccttaggtgcgccccccgccaggttctgcgttagacctgcatcttagcaatgtgaatattgcatccctagagaaggacctggaagagcaagacggccacgacctgggagcagcaggtcccaggtcgctggccggctctgcacctgtcgccatccccggctccctgcccagagcaccatcgctacactcgccatcctctgcgtccacctcgccgctcggttcgctgtcccagcccctcccagggccggtgggctcctcagccatgacgcctccccagcagccgccacccctgcgttcagagccgggcacactgggctctgcagcctcatcctacagccccctaggtgagtgccggctccctccatgctggcgttgccgtgaagcctccgtggggctccctcccagatgccgtcctgactgaggggcctcacacggaaccttgtgccctatctgtggtggcaaaccacatgacctgctgctcacaggttcccccacgccgcagaccgagtctcgctctgtcgcccaggntggactgcaatggtttgaacggtgtccccgggagcatctgggactttgtttccggcagcttctcccccagcccctcccccatcctgagtgccggccccccatcctcttcgagtgcaagtccaaacggagctgagctggcccgggtcaggcggcagctggacgaggccaagaggaagatccggcagtgggaggagtcctggcagcaggtgaagcaggtctgcgatgcctggcagcgagaggcgcaggaggccaaggagcgtgcccgtgtggccgatagcgaccggcagctggcgctgcagaagaaggaggaggtggaggcacaggtgaagcagctgcaggaggagctggagggcctgggcgtagcctccacactgccggggctgcggggctgtggggacatcggcaccattcccctgccgaagctgcactcgctgcagagtcagctgcgcctggacctggaggcggtggacggcgtgatcttccagctccgcgccaagcagtgtgtggcctgccgggagcgggcccacggtgctgtcctgcggccctgtcagcaccacatcctctgtgagccgtgtgcggccaccgcacctgagtgcccctactgcaagggccagcccctgcagtggtgacctcagcggggacagccacctcctgctgggcaccctggctccagcgctcctcctgaccacggacatgtcgtcactcgcttctggtgccaccgacgtgaggaccgaggctgggagcccttcctgttacacgttatcatgaggctgggagccccgcctgcgcttggcctgacagcctttcctgtcacacgttgtcacctatctagtcctaccgacggtttcaaggtattttcctcaaaaaccttaaatgcaaacccacagaacccgcctgcctgtccctgaggggcctggtgcctccgggatccacgcggcgctgtgatcacagcagtttgtggtcctgacactactgtgactaggccactgggagctggggtctttcaaagcactttgtaaaccgaggaatttagttagaggttataaattgctctaagctgctttctgtttttttttaatatgcgataatatgaagctttatatgtgtactgtgaacttaaatatttcatatcagtttattgtcaattcatagtatgctaaatatattagatttcatattctgaaactagtacttatgaaatgagtgtttatctagtagtaagacctaggatttttacattttccaattaagtgcaaatagtatttataagcagagtgattatggattgagatgtttttaacttgatggaaggagctagttttcctgagcctgtgtgtgcaccaggcactggggctgatgttccagcctcgtggcgtgggagcaggagagctccgtcctgcatttctgtggtccgtggccgctgtttctgtgcgcctgcgcctcggagagcaagtgaaggagcatcatgggttttgttttctcccttaaccctctgaaagacagtttgatactaacaaaaaacgcagcagaggggatccaacgtcagagcttttagaattacttttttaagcagctgtcttctggctgggtgcggtggctcatgcctgtgatcccagcactttgggaggcgggtggatcacctaaggtcaggagttcaagaccagcctggccaacatggtgcaaccccgtcttagtaaaaatacaaaaattggcctggcgtgagagcgggcacctgtagtcccagctactcgggaggctgaggcaggagaatcgcttgaacctgggaggcagaggttgcagtgagccgagatcgcgccaccgcactccagcccgggtgacagagcgagactctggctcaaaaaaaaaaaaaaaagctgttttctgattactcagagctgtcctaggcaatggtgctttgtagctccttggagatgtcgctgggcgtcctggcaggggtcaggcagtgaactgggagagt

SEQ ID NO: 337038 - DNA, 2219 bp, Homo sapiens
ttttgaatccccggcggcggcgcggggcggccgcggaccgtgagtcagcattggcggcggccccagcgcgtggcagccgtgcgccgccaaggtgcgggtctcgttactcggcggtcaggagcgggccctcccttaggtgcgccccccgccaggttctgcgttagacctgcatcttagcaatgtgaatattgcatccctagagaaggacctggaagagcaagacggccacgacctgggagcagcaggtcccaggtcgctggccggctctgcacctgtcgccatccccggctccctgcccagagcaccatcgctacactcgccatcctgagtgccggccccccatcctcttcgagtgcaagtccaaacggagctgagctggcccgggtcaggcggcagctggacgaggccaagaggaagatccggcagtgggaggagtcctggcagcaggtgaagcaggtctgcgatgcctggcagcgagaggcgcaggaggccaaggagcgtgcccgtgtggccgatagcgaccggcagctggcgctgcagaagaaggaggaggtggaggcacaggtgaagcagctgcaggaggagctggagggcctgggcgtagcctccacactgccggggctgcggggctgtggggacatcggcaccattcccctgccgaagctgcactcgctgcagagtcagctgcgcctggacctggaggcggtggacggcgtgatcttccagctccgcgccaagcagtgtgtggcctgccgggagcgggcccacggtgctgtcctgcggccctgtcagcaccacatcctctgtgagccgtgtgcggccaccgcacctgagtgcccctactgcaagggccagcccctgcagtggtgacctcagcggggacagccacctcctgctgggcaccctggctccagcgctcctcctgaccacggacatgtcgtcactcgcttctggtgccaccgacgtgaggaccgaggctgggagcccttcctgttacacgttatcatgaggctgggagccccgcctgcgcttggcctgacagcctttcctgtcacacgttgtcacctatctagtcctaccgacggtttcaaggtattttcctcaaaaaccttaaatgcaaacccacagaacccgcctgcctgtccctgaggggcctggtgcctccgggatccacgcggcgctgtgatcacagcagtttgtggtcctgacactactgtgactaggccactgggagctggggtctttcaaagcactttgtaaaccgaggaatttagttagaggttataaattgctctaagctgctttctgtttttttttaatatgcgataatatgaagctttatatgtgtactgtgaacttaaatatttcatatcagtttattgtcaattcatagtatgctaaatatattagatttcatattctgaaactagtacttatgaaatgagtgtttatctagtagtaagacctaggatttttacattttccaattaagtgcaaatagtatttataagcagagtgattatggattgagatgtttttaacttgatggaaggagctagttttcctgagcctgtgtgtgcaccaggcactggggctgatgttccagcctcgtggcgtgggagcaggagagctccgtcctgcatttctgtggtccgtggccgctgtttctgtgcgcctgcgcctcggagagcaagtgaaggagcatcatgggttttgttttctcccttaaccctctgaaagacagtttgatactaacaaaaaacgcagcagaggggatccaacgtcagagcttttagaattacttttttaagcagctgtcttctggctgggtgcggtggctcatgcctgtgatcccagcactttgggaggcgggtggatcacctaaggtcaggagttcaagaccagcctggccaacatggtgcaaccccgtcttagtaaaaatacaaaaattggcctggcgtgagagcgggcacctgtagtcccagctactcgggaggctgaggcaggagaatcgcttgaacctgggaggcagaggttgcagtgagccgagatcgcgccaccgcactccagcccgggtgacagagcgagactctggctcaaaaaaaaaaaaaaaagctgttttctgattactcagagctgtcctaggcaatggtgctttgtagctccttggagatgtcgctgggcgtcctggcaggggtcaggcagtgaactgggagagt

SEQ ID NO: 337039 - DNA, 2439 bp, Homo sapiens
ttttgaatccccggcggcggcgcggggcggccgcggaccgtgagtcagcattggcggcggccccagcgcgtggcagccgtgcgccgccaaggtgcgggtctcgttactcggcggtcaggagcgggccctcccttaggtgcgccccccgccaggttctgcgttagacctgcatcttagcaatgtgaatattgcatccctagagaaggacctggaagagcaagacggccacgacctgggagcagcaggtcccaggtcgctggccggctctgcacctgtcgccatccccggctccctgcccagagcaccatcgctacactcgccatcctctgcgtccacctcgccgctcggttcgctgtcccagcccctcccagggccggtgggctcctcagccatgacgcctccccagcagccgccacccctgcgttcagagccgggcacactgggctctgcagcctcatcctacagccccctaggtttgaacggtgtccccgggagcatctgggactttgtttccggcagcttctcccccagcccctcccccatcctgagtgccggccccccatcctcttcgagtgcaagtccaaacggagctgagctggcccgggtcaggcggcagctggacgaggccaagaggaagatccggcagtgggaggagtcctggcagcaggtgaagcaggtctgcgatgcctggcagcgagaggcgcaggaggccaaggagcgtgcccgtgtggccgatagcgaccggcagctggcgctgcagaagaaggaggaggtggaggcacaggtgaagcagctgcaggaggagctggagggcctgggcgtagcctccacactgccggggctgcggggctgtggggacatcggcaccattcccctgccgaagctgcactcgctgcagagtcagctgcgcctggacctggaggcggtggacggcgtgatcttccagctccgcgccaagcagtgtgtggcctgccgggagcgggcccacggtgctgtcctgcggccctgtcagcaccacatcctctgtgagccgtgtgcggccaccgcacctgagtgcccctactgcaagggccagcccctgcagtggtgacctcagcggggacagccacctcctgctgggcaccctggctccagcgctcctcctgaccacggacatgtcgtcactcgcttctggtgccaccgacgtgaggaccgaggctgggagcccttcctgttacacgttatcatgaggctgggagccccgcctgcgcttggcctgacagcctttcctgtcacacgttgtcacctatctagtcctaccgacggtttcaaggtattttcctcaaaaaccttaaatgcaaacccacagaacccgcctgcctgtccctgaggggcctggtgcctccgggatccacgcggcgctgtgatcacagcagtttgtggtcctgacactactgtgactaggccactgggagctggggtctttcaaagcactttgtaaaccgaggaatttagttagaggttataaattgctctaagctgctttctgtttttttttaatatgcgataatatgaagctttatatgtgtactgtgaacttaaatatttcatatcagtttattgtcaattcatagtatgctaaatatattagatttcatattctgaaactagtacttatgaaatgagtgtttatctagtagtaagacctaggatttttacattttccaattaagtgcaaatagtatttataagcagagtgattatggattgagatgtttttaacttgatggaaggagctagttttcctgagcctgtgtgtgcaccaggcactggggctgatgttccagcctcgtggcgtgggagcaggagagctccgtcctgcatttctgtggtccgtggccgctgtttctgtgcgcctgcgcctcggagagcaagtgaaggagcatcatgggttttgttttctcccttaaccctctgaaagacagtttgatactaacaaaaaacgcagcagaggggatccaacgtcagagcttttagaattacttttttaagcagctgtcttctggctgggtgcggtggctcatgcctgtgatcccagcactttgggaggcgggtggatcacctaaggtcaggagttcaagaccagcctggccaacatggtgcaaccccgtcttagtaaaaatacaaaaattggcctggcgtgagagcgggcacctgtagtcccagctactcgggaggctgaggcaggagaatcgcttgaacctgggaggcagaggttgcagtgagccgagatcgcgccaccgcactccagcccgggtgacagagcgagactctggctcaaaaaaaaaaaaaaaagctgttttctgattactcagagctgtcctaggcaatggtgctttgtagctccttggagatgtcgctgggcgtcctggcaggggtcaggcagtgaactgggagagt

SEQ ID NO: 337040 - DNA, 414 bp, Homo sapiens
gtataattttttaaaagttataacattaaaaaaactaaataattatattcccccaaaagattcatgttgctggagttggtgcaccccctttcagacctgttctatgaatgtgtttatctaggtagatatagctctagcttcctacccacaaaaataagatatctttgattctgttctgtaatttgtatactatatcatgcaatcttgatgcacatataaactatcttacctttttttttttttttttttttccatgtgtggaagggaatgtatttaattaaccctggcgggattttggggccaaaaattttggcccagcaaattaatgctctcccacacttctggtccacggaggttacaaccacaggtatagggcaacaaaacatcttggaaaacccactcaacggaacgcgg

SEQ ID NO: 337041 - DNA, 499 bp, Homo sapiens
tacaaaatttgatcatgatcatattgtagcctctcaaagtgctctagaaattgtcagtggtatacatgaagcggcagtggtgtctggtgcactctgaaatgctatcaaagttgtacatatttccaaacatttttaaaatgaaaaggcactcttgtgttctcattctgtgcgctttgctattggagtgacaaggcatttaaagatgtttctggctttattttttttaataaggtggtgttaactatctggttattgactagaaatcctgagttatcaattgtatatctgtacggtttgtaaaaagaacaaaacaaccaaggcagactcttgacggctccttgcttggcattgaggctctgggggaagatgccttttggaggggctgtagctcagggcgtgcactgtgagtctggacctgttgactctgcagggcttccatttagcttcaagttgtcttgtttctgcatatagtgacggagcattctgctgccattcttag

SEQ ID NO: 337042 - DNA, 151 bp, Homo sapiens
ctgagcatggtggttagtagcctagtatgcacctgtacctccagctactcaggaggtggaagaatcgattgagcccagggggtggaggctgcagtgagccacgatcacatcactgcactccaacccaggtgacagagtgaaaccctgtctc

SEQ ID NO: 337043 - DNA, 413 bp, Homo sapiens
agcttggaacagcgcgagcgcccgggaagccctggccgggtcgtgcgctccgtgaggggtcctaggcgggcaggacagtcggaccgaaccgccgggctggtgccgcgagcccaggctgtcaccttcgtcccgcctcaggcgaggggttcagcgcctgccccgaagataacacaggggtccccttctgtcccggcggcccgcgagagccaaggctgcagtcccccatttatgcttcctgttgggtgtacctctctgaaagccagcagcatggagcccattacattccacagaggtcagttcccagggccccaaacaaggtagagagtggctctggagaagcaaaccaaagacacttcctcactctgtccatcaaaagcccgggagtccactgaatacactgtccttaggacaca

SEQ ID NO: 337044 - DNA, 3233 bp, Homo sapiens
gcggctgctttagaagaacaagctggtttggcagctacctcagagaagcaggaccctgggcagcgtgaaagggcctctgcccccagggtggctgggctttggatcctggatccgtgggtcctggaggggcaggagtggttcaggaaacagctctcccagtgaagtgatatcactgcctctgtggacaagacacctccaggagcccagctcacagccaccggtaccttcttccagggctgctgttatagtttctgcatggaaagcacttggaacaatgcctggttgttcccctctttggccctctcagggccctaggagcctttgtgtgtcctgctcacattgtctccagggcctcggacagggcctggtacagaacatatgactgagtttctggagtcccacaggccagcgttggagtcctgacacctcagtatagctgtgcacctctgggcaaatagtttctctgctctgagccccaggacaagctgggggcctccatgggcgcctgagggccaggcgccagggccgtgggcacgagtatggtgagacaccagcccctgcagtactacgagccacagctgtgcctctcctgcctcacgggcatctacggctgccgttggaagcgctaccagcgctcccatgatgataccacaccgtgggagcgcctctggttcctgctcctcaccttcacctttggcctcacgctcacctggctttacttctggtgggaagtccacaatgactatgatgaattcaactggtacctctacaaccgcatgggctactggagcgactggcccgtacccatccttgtgaccacagctgctgccttcgcatacatcgctggcctcctggtcctggcactatgtcacattgccgtggggcagcagatgaacctgcactggctgcacaagatcgggctggtggtcatcctggcttccacggtggtggccatgtcggccgtggcccagctgtgggaggacgagtgggaggtgctgctgatctccctgcagggcacagcgccattcctgcatgtgggggctgtggcagcagtcaccatgctctcctggatcgtggcaggacagttcgcccgcgcagagcggacctcctcccaggtgaccattctctgtaccttcttcaccgtggtgtttgccctctacctggcccctctcaccatctcctctccctgcatcatggagaagaaagacctcggccccaagcctgctctcattggccaccgcggggcccccatgctggctccagagcacacgctcatgtccttccggaaggccctcgagcagaagctgtacgggctccaggctgacattaccatcagcctggacggcgtgcccttcctcatgcatgacaccaccctgcggcgcaccaccaacgtggaggaggagttcccggagctggcccgcaggcctgcctccatgcttaactggaccaccctgcagagactcaacgctggccagtggttcctgaagactgaccccttctggacagccagctccctgtcaccctccgaccacagagaggcccagaaccagtccatctgcagcctggcagagctcctggagctggccaagggcaatgccacactgctgctcaacctgcgtgacccgccccgggagcacccctaccgcagcagttttatcaacgtgactctggaggccgtgctgcactccggcttcccccagcaccaggtcatgtggctgcctagcaggcagaggcccctggtgcggaaggtggctcccggcttccaacagacatcaggctccaaggaggcagtcgccagcctgcggagaggccacatccagcggctgaacctgcgctacactcaggtgtcccgccaggagctcagggactacgcgtcctggaacctgagtgtgaacctctacacagtcaacgcaccgtggctcttctccctgctgtggtgtgcgggggtcccatccgtcacctctgacaactcccacaccctgtcccaggtgccttcccccctctggatcatgcccccggacgagtactgtctcatgtgggtcactgccgacctggtctccttcaccctcatcgtgggcatcttcgtgctccagaagtggcgcctgggtggcatacggagctacaaccctgagcagatcatgctgagtgctgcggtgcgccggaccagccgggacgtcagcatcatgaaggagaagcttattttctcagagatcagcgatggtgtagaggtctccgatgtgctctccgtatgttcagacaacagttatgacacatatgccaacagcaccgccacccctgtgggcccccgagggggtggcagccacaccaagaccctcatagagcggagtgggcgttagctgaagacatgtctgtcccacctgtacctgacacagaagctggggagcctaggagagctggtggaagtgtgtctgaactcggagtgctctgggagcgggctccacagcctccttgtgggctccagccccttgtcagccgcagcctctcttgagggggactccctgtctcctgaggcccagctgggccaggactccatcctttcagatgcccctgcaggcctggggctccttctgggaagtatggggcctagggcttggtccccctcttctgaggccctctcctgtatcccgacctggaagctttgatgggtcatgggccatgccataccccctgtggcaatggagtgtgtggatgctcacctgtgccatctgtcctcctgtctgtgccaggaggcacctgagttctctgctgttatcctgccccaagggcctgggccgagcctctacctgaagcaactctgctcttcctgtcagtctcaaagcacaaggaggttcagcccaggaggaagccagctgcaatgtggagacacgtcctcctccccaacccacctcatgccaccgccaaccccctgccccaggagcgggcctgagccacgtcccctaggagcagctggagatggccaaaagagtgagctcaggactactggatcccatgcccaggtgtccagcagacctcaaggcagaagggtcacctaacccaggagtccacagactgatgtgacctcaggttcccacatcagtggccacagggcagggcccacctggtagaagtgttctggatatggccagggtgggtgtgtggctaagtgggcctgaacagagggaacctagggcccttggccaatgtgattaaagctgccatcttgaaaaaaaatt

SEQ ID NO: 337045 - DNA, 1750 bp, Homo sapiens
caggcacctgggacagggcgtgggagttgtcagaggtgacggatgggacccccgcacaccaccaacgtggaggaggagttcccggagctggcccgcaggcctgcctccatgcttaactggaccaccctgcagagactcaacgctggccagtggttcctgaagactgaccccttctggacagccagctccctgtcaccctccgaccacagagaggcccagaaccagtccatctgcagcctggcagagctcctggagctggccaagggcaatgccacactgctgctcaacctgcgtgacccgccccgggagcacccctaccgcagcagttttatcaacgtgactctggaggccgtgctgcactccggcttcccccagcaccagggactacgcgtcctggaacctgagtgtgaacctctacacagtcaacgcaccgtggctcttctccctgctgtggtgtgcgggggtcccatccgtcacctctgacaactcccacaccctgtcccaggtgccttcccccctctggatcatgcccccggacgagtactgtctcatgtgggtcactgccgacctggtctccttcaccctcatcgtgggcatcttcgtgctccagaagtggcgcctgggtggcatacggagctacaaccctgagcagatcatgctgagtgctgcggtgcgccggaccagccgggacgtcagcatcatgaaggagaagcttattttctcagagatcagcgatggtgtagaggtctccgatgtgctctccgtatgttcagacaacagttatgacacatatgccaacagcaccgccacccctgtgggcccccgagggggtggcagccacaccaagaccctcatagagcggagtgggcgttagctgaagacatgtctgtcccacctgtacctgacacagaagctggggagcctaggagagctggtggaagtgtgtctgaactcggagtgctctgggagcgggctccacagcctccttgtgggctccagccccttgtcagccgcagcctctcttgagggggactccctgtctcctgaggcccagctgggccaggactccatcctttcagatgcccctgcaggcctggggctccttctgggaagtatggggcctagggcttggtccccctcttctgaggccctctcctgtatcccgacctggaagctttgatgggtcatgggccatgccataccccctgtggcaatggagtgtgtggatgctcacctgtgccatctgtcctcctgtctgtgccaggaggcacctgagttctctgctgttatcctgccccaagggcctgggccgagcctctacctgaagcaactctgctcttcctgtcagtctcaaagcacaaggaggttcagcccaggaggaagccagctgcaatgtggagacacgtcctcctccccaacccacctcatgccaccgccaaccccctgccccaggagcgggcctgagccacgtcccctaggagcagctggagatggccaaaagagtgagctcaggactactggatcccatgcccaggtgtccagcagacctcaaggcagaagggtcacctaacccaggagtccacagactgatgtgacctcaggttcccacatcagtggccacagggcagggcccacctggtagaagtgttctggatatggccagggtgggtgtgtggctaagtgggcctgaacagagggaacctagggcccttggccaatgtgattaaagctgccatcttgaaaaaaaatt

SEQ ID NO: 337046 - DNA, 3181 bp, Homo sapiens
agcttggaacagcgcgagcgcccgggaagccctggccgggtcgtgcgctccgtgaggggtcctaggcgggcaggacagtcggaccgaaccgccgggctggtgccgcgagcccaggctgtcaccttcgtcccgcctcaggcgaggggttcagcgcctgccccgaagataacacaggggtccccttctgtcccggcggcccgcgagagccaaggctgcagctctcccagtgaagtgatatcactgcctctgtggacaagacacctccaggagcccagctcacagccaccggtaccttcttccagggctgctgttatagtttctgcatggaaagcacttggaacaatgcctggttgttcccctctttggccctctcagggccctaggagcctttgtgtgtcctgctcacattgtctccagggcctcggacagggcctggtacagaacatatgactgagtttctggagtcccacaggccagcgttggagtcctgacacctcagtatagctgtgcacctctgggcaaatagtttctctgctctgagccccaggacaagctgggggcctccatgggcgcctgagggccaggcgccagggccgtgggcacgagtatggtgagacaccagcccctgcagtactacgagccacagctgtgcctctcctgcctcacgggcatctacggctgccgttggaagcgctaccagcgctcccatgatgataccacaccgtgggagcgcctctggttcctgctcctcaccttcacctttggcctcacgctcacctggctttacttctggtgggaagtccacaatgactatgatgaattcaactggtacctctacaaccgcatgggctactggagcgactggcccgtacccatccttgtgaccacagctgctgccttcgcatacatcgctggcctcctggtcctggcactatgtcacattgccgtggggcagcagatgaacctgcactggctgcacaagatcgggctggtggtcatcctggcttccacggtggtggccatgtcggccgtggcccagctgtgggaggacgagtgggaggtgctgctgatctccctgcagggcacagcgccattcctgcatgtgggggctgtggcagcagtcaccatgctctcctggatcgtggcaggacagttcgcccgcgcagagcggacctcctcccaggtgaccattctctgtaccttcttcaccgtggtgtttgccctctacctggcccctctcaccatctcctctccctgcatcatggagaagaaagacctcggccccaagcctgctctcattggccaccgcggggcccccatgctggctccagagcacacgctcatgtccttccggaaggccctcgagcagaagctgtacgggctccaggctgacattaccatcagcctggacggcgtgcccttcctcatgcatgacaccaccctgcggcgcaccaccaacgtggaggaggagttcccggagctggcccgcaggcctgcctccatgcttaactggaccaccctgcagagactcaacgctggccagtggttcctgaagactgaccccttctggacagccagctccctgtcaccctccgaccacagagaggcccagaaccagtccatctgcagcctggcagagctcctggagctggccaagggcaatgccacactgctgctcaacctgcgtgacccgccccgggagcacccctaccgcagcagttttatcaacgtgactctggaggccgtgctgcactccggcttcccccagcaccaggtcatgtggctgcctagcaggcagaggcccctggtgcggaaggtggctcccggcttccaacagacatcaggctccaaggaggcagtcgccagcctgcggagaggccacatccagcggctgaacctgcgctacactcaggtgtcccgccaggagctcagggactacgcgtcctggaacctgagtgtgaacctctacacagtcaacgcaccgtggctcttctccctgctgtggtgtgcgggggtcccatccgtcacctctgacaactcccacaccctgtcccaggtgccttcccccctctggatcatgcccccggacgagtactgtctcatgtgggtcactgccgacctggtctccttcaccctcatcgtgggcatcttcgtgctccagaagtggcgcctgggtggcatacggagctacaaccctgagcagatcatgctgagtgctgcggtgcgccggaccagccgggacgtcagcatcatgaaggagaagcttattttctcagagatcagcgatggtgtagaggtctccgatgtgctctccgtatgttcagacaacagttatgacacatatgccaacagcaccgccacccctgtgggcccccgagggggtggcagccacaccaagaccctcatagagcggagtgggcgttagctgaagacatgtctgtcccacctgtacctgacacagaagctggggagcctaggagagctggtggaagtgtgtctgaactcggagtgctctgggagcgggctccacagcctccttgtgggctccagccccttgtcagccgcagcctcttctgaggccctctcctgtatcccgacctggaagctttgatgggtcatgggccatgccataccccctgtggcaatggagtgtgtggatgctcacctgtgccatctgtcctcctgtctgtgccaggaggcacctgagttctctgctgttatcctgccccaagggcctgggccgagcctctacctgaagcaactctgctcttcctgtcagtctcaaagcacaaggaggttcagcccaggaggaagccagctgcaatgtggagacacgtcctcctccccaacccacctcatgccaccgccaaccccctgccccaggagcgggcctgagccacgtcccctaggagcagctggagatggccaaaagagtgagctcaggactactggatcccatgcccaggtgtccagcagacctcaaggcagaagggtcacctaacccaggagtccacagactgatgtgacctcaggttcccacatcagtggccacagggcagggcccacctggtagaagtgttctggatatggccagggtgggtgtgtggctaagtgggcctgaacagagggaacctagggcccttggccaatgtgattaaagctgccatcttgaaaaaaaatt

SEQ ID NO: 337047 - DNA, 1385 bp, Homo sapiens
agcttggaacagcgcgagcgcccgggaagccctggccgggtcgtgcgctccgtgaggggtcctaggcgggcaggacagtcggaccgaaccgccgggctggtgccgcgagcccaggctgtcaccttcgtcccgcctcaggcgaggggttcagcgcctgccccgaagataacacaggggtccccttctgtcccggcggcccgcgagagccaaggctgcagctctcccagtgaagtgatatcactgcctctgtggacaagacacctccaggagcccagctcacagccaccggtaccttcttccagggctgctgttatagtttctgcatggaaagcacttggaacaatgcctggttgttcccctctttggccctctcagggccctaggagcctttgtgtgtcctgctcacattgtctccagggcctcggacagggcctggtacagaacatatgactgagtttctggagtcccacaggccagcgttggagtcctgacacctcagtatagctgtgcacctctgggcaaatagtttctctgctctgagccccaggacaagctgggggcctccatgggcgcctgagggccaggcgccagggccgtgggcacgagtatggtgagacaccagcccctgcagtactacgagccacagctgtgcctctcctgcctcacgggcatctacggctgccgttggaagcgctaccagcgctcccatgatgataccacaccgtgggagcgcctctggttcctgctcctcaccttcacctttggcctcacgctcacctggctttacttctggtgggaagtccacaatgactatgatgaattcaactggtacctctacaaccgcatgggctactggagcgactggcccgtacccatccttgtgaccacagctgctgccttcgcatacatcgctggcctcctggtcctggcactatgtcacattgccgtggggcagcagatgaacctgcactggctgcacaagatcgggctggtggtcatcctggcttccacggtggtggccatgtcggccgtggcccagctgtgggaggacgagtgggaggtgctgctgatctccctgcagggcacagcgccattcctgcatgtgggggctgtggcagcagtcaccatgctctcctggatcgtggcaggacagttcgcccgcgcagagcggacctcctcccaggtgaccattctctgtaccttcttcaccgtggtgtttgccctctacctggcccctctcaccatctcctctccctgcatcatggagaagaaagacctcggccccaagcctgctctcattggccaccgcggggcccccatggcatcaggagaaccctccaggagagctgggaggcagctcagagcccactgtgacagtgagtacg

SEQ ID NO: 337048 - DNA, 392 bp, Homo sapiens
gctgtaggtacagaatgagcacatgttgtggtgtacgccaggtgtgcttccaccattgacttcctaaagcgctatgcttccaacactcccgtccggtgaatttcaaacagccgacgaagacctctgctactgcttggagtgtgtggctgagtaccacaaagcaagagatgaattgccattcttgcatgaggtaaaatatattagatgggcaatatttttcagagcttgatagctgggattacagtcccccatttatgcttcctgttgggtgtacctctctgaaagccagcagcatggagcccattacattccacagagtgctgcatctctttcctccgagggttttcaaagaaagacaagccttaaatacatgccttaaaaggaagaagtga

SEQ ID NO: 337049 - DNA, 3301 bp, Homo sapiens
agcttggaacagcgcgagcgcccgggaagccctggccgggtcgtgcgctccgtgaggggtcctaggcgggcaggacagtcggaccgaaccgccgggctggtgccgcgagcccaggctgtcaccttcgtcccgcctcaggcgaggggttcagcgcctgccccgaagataacacaggggtccccttctgtcccggcggcccgcgagagccaaggctgcagctctcccagtgaagtgatatcactgcctctgtggacaagacacctccaggagcccagctcacagccaccggtaccttcttccagggctgctgttatagtttctgcatggaaagcacttggaacaatgcctggttgttcccctctttggccctctcagggccctaggagcctttgtgtgtcctgctcacattgtctccagggcctcggacagggcctggtacagaacatatgactgagtttctggagtcccacaggccagcgttggagtcctgacacctcagtatagctgtgcacctctgggcaaatagtttctctgctctgagccccaggacaagctgggggcctccatgggcgcctgagggccaggcgccagggccgtgggcacgagtatggtgagacaccagcccctgcagtactacgagccacagctgtgcctctcctgcctcacgggcatctacggctgccgttggaagcgctaccagcgctcccatgatgataccacaccgtgggagcgcctctggttcctgctcctcaccttcacctttggcctcacgctcacctggctttacttctggtgggaagtccacaatgactatgatgaattcaactggtacctctacaaccgcatgggctactggagcgactggcccgtacccatccttgtgaccacagctgctgccttcgcatacatcgctggcctcctggtcctggcactatgtcacattgccgtggggcagcagatgaacctgcactggctgcacaagatcgggctggtggtcatcctggcttccacggtggtggccatgtcggccgtggcccagctgtgggaggacgagtgggaggtgctgctgatctccctgcagggcacagcgccattcctgcatgtgggggctgtggcagcagtcaccatgctctcctggatcgtggcaggacagttcgcccgcgcagagcggacctcctcccaggtgaccattctctgtaccttcttcaccgtggtgtttgccctctacctggcccctctcaccatctcctctccctgcatcatggagaagaaagacctcggccccaagcctgctctcattggccaccgcggggcccccatgctggctccagagcacacgctcatgtccttccggaaggccctcgagcagaagctgtacgggctccaggctgacattaccatcagcctggacggcgtgcccttcctcatgcatgacaccaccctgcggcgcaccaccaacgtggaggaggagttcccggagctggcccgcaggcctgcctccatgcttaactggaccaccctgcagagactcaacgctggccagtggttcctgaagactgaccccttctggacagccagctccctgtcaccctccgaccacagagaggcccagaaccagtccatctgcagcctggcagagctcctggagctggccaagggcaatgccacactgctgctcaacctgcgtgacccgccccgggagcacccctaccgcagcagttttatcaacgtgactctggaggccgtgctgcactccggcttcccccagcaccaggtcatgtggctgcctagcaggcagaggcccctggtgcggaaggtggctcccggcttccaacagacatcaggctccaaggaggcagtcgccagcctgcggagaggccacatccagcggctgaacctgcgctacactcaggtgtcccgccaggagctcagggactacgcgtcctggaacctgagtgtgaacctctacacagtcaacgcaccgtggctcttctccctgctgtggtgtgcgggggtcccatccgtcacctctgacaactcccacaccctgtcccaggtgccttcccccctctggatcatgcccccggacgagtactgtctcatgtgggtcactgccgacctggtctccttcaccctcatcgtgggcatcttcgtgctccagaagtggcgcctgggtggcatacggagctacaaccctgagcagatcatgctgagtgctgcggtgcgccggaccagccgggacgtcagcatcatgaaggagaagcttattttctcagagatcagcgatggtgtagaggtctccgatgtgctctccgtatgttcagacaacagttatgacacatatgccaacagcaccgccacccctgtgggcccccgagggggtggcagccacaccaagaccctcatagagcggagtgggcgttagctgaagacatgtctgtcccacctgtacctgacacagaagctggggagcctaggagagctggtggaagtgtgtctgaactcggagtgctctgggagcgggctccacagcctccttgtgggctccagccccttgtcagccgcagcctctcttgagggggactccctgtctcctgaggcccagctgggccaggactccatcctttcagatgcccctgcaggcctggggctccttctgggaagtatggggcctagggcttggtccccctcttctgaggccctctcctgtatcccgacctggaagctttgatgggtcatgggccatgccataccccctgtggcaatggagtgtgtggatgctcacctgtgccatctgtcctcctgtctgtgccaggaggcacctgagttctctgctgttatcctgccccaagggcctgggccgagcctctacctgaagcaactctgctcttcctgtcagtctcaaagcacaaggaggttcagcccaggaggaagccagctgcaatgtggagacacgtcctcctccccaacccacctcatgccaccgccaaccccctgccccaggagcgggcctgagccacgtcccctaggagcagctggagatggccaaaagagtgagctcaggactactggatcccatgcccaggtgtccagcagacctcaaggcagaagggtcacctaacccaggagtccacagactgatgtgacctcaggttcccacatcagtggccacagggcagggcccacctggtagaagtgttctggatatggccagggtgggtgtgtggctaagtgggcctgaacagagggaacctagggcccttggccaatgtgattaaagctgccatcttgaaaaaaaatt

SEQ ID NO: 337050 - DNA, 3408 bp, Homo sapiens
agcttggaacagcgcgagcgcccgggaagccctggccgggtcgtgcgctccgtgaggggtcctaggcgggcaggacagtcggaccgaaccgccgggctggtgccgcgagcccaggctgtcaccttcgtcccgcctcaggcgaggggttcagcgcctgccccgaagataacacaggggtccccttctgtcccggcggcccgcgagagccaaggctgcagctctcccagtgaagtgatatcactgcctctgtggacaagacacctccaggagcccagctcacagccaccggtaccttcttccagggctgctgttatagtttctgcatggaaagcacttggaacaatgcctggttgttcccctctttggccctctcagggccctaggagcctttgtgtgtcctgctcacattgtctccagggcctcggacagggcctggtacagaacatatgactgagtttctggagtcccacaggccagcgttggagtcctgacacctcagtatagctgtgcacctctgggcaaatagtttctctgctctgagccccaggacaagctgggggcctccatgggcgcctgagggccaggcgccagggccgtgggcacgagtatggtgagacaccagcccctgcagtactacgagccacagctgtgcctctcctgcctcacgggcatctacggctgccgttggaagcgctaccagcgctcccatgatgataccacaccggatagcgtctgggcctgcacactccagggacctgactcagaggaggtcctcggacaagatttactgaatgaacaactggaaggaggattgagcatatgtgttcatgatgggagcgcctctggttcctgctcctcaccttcacctttggcctcacgctcacctggctttacttctggtgggaagtccacaatgactatgatgaattcaactggtacctctacaaccgcatgggctactggagcgactggcccgtacccatccttgtgaccacagctgctgccttcgcatacatcgctggcctcctggtcctggcactatgtcacattgccgtggggcagcagatgaacctgcactggctgcacaagatcgggctggtggtcatcctggcttccacggtggtggccatgtcggccgtggcccagctgtgggaggacgagtgggaggtgctgctgatctccctgcagggcacagcgccattcctgcatgtgggggctgtggcagcagtcaccatgctctcctggatcgtggcaggacagttcgcccgcgcagagcggacctcctcccaggtgaccattctctgtaccttcttcaccgtggtgtttgccctctacctggcccctctcaccatctcctctccctgcatcatggagaagaaagacctcggccccaagcctgctctcattggccaccgcggggcccccatgctggctccagagcacacgctcatgtccttccggaaggccctcgagcagaagctgtacgggctccaggctgacattaccatcagcctggacggcgtgcccttcctcatgcatgacaccaccctgcggcgcaccaccaacgtggaggaggagttcccggagctggcccgcaggcctgcctccatgcttaactggaccaccctgcagagactcaacgctggccagtggttcctgaagactgaccccttctggacagccagctccctgtcaccctccgaccacagagaggcccagaaccagtccatctgcagcctggcagagctcctggagctggccaagggcaatgccacactgctgctcaacctgcgtgacccgccccgggagcacccctaccgcagcagttttatcaacgtgactctggaggccgtgctgcactccggcttcccccagcaccaggtcatgtggctgcctagcaggcagaggcccctggtgcggaaggtggctcccggcttccaacagacatcaggctccaaggaggcagtcgccagcctgcggagaggccacatccagcggctgaacctgcgctacactcaggtgtcccgccaggagctcagggactacgcgtcctggaacctgagtgtgaacctctacacagtcaacgcaccgtggctcttctccctgctgtggtgtgcgggggtcccatccgtcacctctgacaactcccacaccctgtcccaggtgccttcccccctctggatcatgcccccggacgagtactgtctcatgtgggtcactgccgacctggtctccttcaccctcatcgtgggcatcttcgtgctccagaagtggcgcctgggtggcatacggagctacaaccctgagcagatcatgctgagtgctgcggtgcgccggaccagccgggacgtcagcatcatgaaggagaagcttattttctcagagatcagcgatggtgtagaggtctccgatgtgctctccgtatgttcagacaacagttatgacacatatgccaacagcaccgccacccctgtgggcccccgagggggtggcagccacaccaagaccctcatagagcggagtgggcgttagctgaagacatgtctgtcccacctgtacctgacacagaagctggggagcctaggagagctggtggaagtgtgtctgaactcggagtgctctgggagcgggctccacagcctccttgtgggctccagccccttgtcagccgcagcctctcttgagggggactccctgtctcctgaggcccagctgggccaggactccatcctttcagatgcccctgcaggcctggggctccttctgggaagtatggggcctagggcttggtccccctcttctgaggccctctcctgtatcccgacctggaagctttgatgggtcatgggccatgccataccccctgtggcaatggagtgtgtggatgctcacctgtgccatctgtcctcctgtctgtgccaggaggcacctgagttctctgctgttatcctgccccaagggcctgggccgagcctctacctgaagcaactctgctcttcctgtcagtctcaaagcacaaggaggttcagcccaggaggaagccagctgcaatgtggagacacgtcctcctccccaacccacctcatgccaccgccaaccccctgccccaggagcgggcctgagccacgtcccctaggagcagctggagatggccaaaagagtgagctcaggactactggatcccatgcccaggtgtccagcagacctcaaggcagaagggtcacctaacccaggagtccacagactgatgtgacctcaggttcccacatcagtggccacagggcagggcccacctggtagaagtgttctggatatggccagggtgggtgtgtggctaagtgggcctgaacagagggaacctagggcccttggccaatgtgattaaagctgccatcttgaaaaaaaatt

SEQ ID NO: 337051 - DNA, 1402 bp, Homo sapiens
agcttggaacagcgcgagcgcccgggaagccctggccgggtcgtgcgctccgtgaggggtcctaggcgggcaggacagtcggaccgaaccgccgggctggtgccgcgagcccaggctgtcaccttcgtcccgcctcaggcgaggggttcagcgcctgccccgaagataacacaggggtccccttctgtcccggcggcccgcgagagccaaggctgcagctctcccagtgaagtgatatcactgcctctgtggacaagacacctccaggagcccagctcacagccaccggtaccttcttccagggctgctgttatagtttctgcatggaaagcacttggaacaatgcctggttgttcccctctttggccctctcagggccctaggagcctttgtgtgtcctgctcacattgtctccagggcctcggacagggcctggtacagaacatatgactgagtttctggagtcccacaggccagcgttggagtcctgacacctcagtatagctgtgcacctctgggcaaatagtttctctgctctgagccccaggacaagctgggggcctccatgggcgcctgagggccaggcgccagggccgtgggcacgagtatggtgagacaccagcccctgcagtactacgagccacagctgtgcctctcctgcctcacgggcatctacggctgccgttggaagcgctaccagcgctcccatgatgataccacaccgtgggagcgcctctggttcctgctcctcaccttcacctttggcctcacgctcacctggctttacttctggtgggaagtccacaatgactatgatgaattcaactggtacctctacaaccgcatgggctactggagcgactggcccgtacccatccttgtgaccacagctgctgccttcgcatacatcgctggcctcctggtcctggcactatgtcacattgccgtggggcagcagatgaacctgcactggctgcacaaggtaagggccgcctcggccggggctgggagagagcaagggaagctggaggcagcagcagcagaggaagggcctggccaccatgtccctcccctggatcgccgttagaattgttctcatagctaaggctgagcactcactatgcgccaagcacttttctcacaacctcacccgtcttcattcacttaacccttacagcaaccttgtgatgtaggtactgttatcattccattttgtggttggggaaactgaagtacaaagaggttaagtgatttgcctaaggtctcccagtttaaacatagaagatccagggtcccgcagtcatgtgattaaccagcagagctcacagctcatactgtggcacccaccctctgggggccctgcctcgggtctcacctgcctcttccttctttggtgagctct

SEQ ID NO: 337052 - DNA, 141 bp, Homo sapiens
cgaagttggatagtggttacacagtccaccgggaccgtctcacaaaacgggaagaaaggagcgaagtactgacgtcttggacattagccggctgaattattcaacgactctctacatatggcacctgactgacactctgtg

SEQ ID NO: 337053 - DNA, 550 bp, Homo sapiens
aatgatgtcttttctgccactaccgccctgcccccgccttgggggatctagggctcagggccaattgggtagagcccctggagggaaaaggggtatctaggttgctgggctggcccagaatctggccaccacaatgtagaaactcaggccctcatttcagcaggcctccaaccccaccgcacgccccattctgttctagctcactgaagccacaggctgaaacagggggctacatctcccagcaagctgtaacttcagaaggcgaggtgcccagagtcctaaacaaaaatccacagactattttccatcatggtatggggagttttgtttgtttgctgttttattttttctgaaacaggttctagctctgtcgtcccggctggagagcgagaccctgtctcaaaaagaaaacaaaagaaaagacaaagacaagaaaagaaaagctacttttgacccagctgttgcttcccagtttctccactaacagcctagaccagctgtcaactcccatatcttgcctagacctcttgttgcctcctactggggcatc

SEQ ID NO: 337054 - DNA, 540 bp, Homo sapiens
aatgatgtcttttctgccactaccgccctgcccccgccttgggggatctagggctcagggccaattgggtagagcccctggagggaaaaggggtatctaggttgctgggctggcccagaatctggccaccacaatgtagaaactcaggccctcatttcagcaggcctccaaccccaccgcacgccccattctgttctagctcactgaagccacaggctgaaacagggggctacatctcccagcaagctgtaacttcagaaggcgaggtgcccagagtcctaaacaaaaatccacagactattttccatcatggtatggggagttttgtttgtttgctgttttattttttctgaaacaggttctagctctgtcgtcccggctggagtacagtggcacgatcacggctcactgcagcctcgacctccgggctcaagcaatcaatcctcccgcctcagcctcctgagtggctgagactacaggcatgtgtcaccaagcccagctaatgtttgaaatttttgtagagacgggggtcctactatg

SEQ ID NO: 337055 - DNA, 713 bp, Homo sapiens
taagcacctgagaaagtgctcaatatcattgatctttagggaatgcaaaacaaaaccaaaatgacatactataatatgtcacagtgcaaaagtcacagcattcctatacaccaataacagacagagagccaaatcatgagtgaactcacattcacaattgctacaaagagaataaaatacctaggaatccaacttataagggatgtgaaggacctcttcaaggagaacgacaaactactgctcaaggaaataagagaagacacaaataaatggaaaagcattccatgcttatggataggaagaatcaatattgtgaaaatgggcataccacccaaagtaatttatagattcaatgccatccccatcaagctaccaatgactttcttcacagaattggaaaaaactactttaaggttcatatggaaccaaaaaaagagcctgcatagccaagacaatcctaagcaaaaagaaaaacgctggcggcatcgtgctaccttacttcaaactatactacaaggctacagtaaccaaaacagcatgttattggtaccaaaacagatatatagaccaatggaacagaacagaggcctcagaaataacaccacacatctacaaccatctgatctttgacaaacctgacaaaaacaagcaatggggaaagatttcctatttaataaatggtgttgggaaaaccgactagccatatgcagaaa

SEQ ID NO: 337056 - DNA, 134 bp, Homo sapiens
gagacatctaaaccctttaccttgtaataattagactttgttaaagacgattccaatttccctcttttgtagctttgttattcactattacgtttgaggagacctttgtctttgtcttttcctctttcagaata

SEQ ID NO: 337057 - DNA, 563 bp, Homo sapiens
ctgatttcccatatttgctgcctcaagctgtcacttaacttatgcatttaatatttcacagatttgtctttgtcaactgtaagttcatccttagagaccatatcttagagttgcagtagtaaagaaaattgtccataattctcaatacctagcccttgcataatttcagaacaaggtatcctttctcaagtatacatacctaaatattataaattatggtaattataaccaattcagtatatcctgcataatgtgggtaggtgtcaagcaaataaatcaaacacacaaacaccaatatgaagactctgatagtaaattgtttttaatttaaattttctgtcatgtaggttcaacttagttctataattctgccctcactctcattagaactttctctagcaatggaagaaatgagagatctaacaaaatgctctgtttttaaattgcaaagttgtttctaggtatcagaacatgtgtgtttaggcaaattaatgtaaacagggataaaataaacatctttccatcaagaaaaagaattttgcagttagaaggaacaggacttc

SEQ ID NO: 337058 - DNA, 982 bp, Homo sapiens
  misc_feature (60)..(60): n is a, c, g, or t
  misc_feature (104)..(104): n is a, c, g, or t
  misc_feature (106)..(106): n is a, c, g, or t
  misc_feature (931)..(932): n is a, c, g, or t
  misc_feature (975)..(975): n is a, c, g, or t
ccagcctgtaagggcgagcatctgcacgcttggctccattgcctccgaggacaccagagnagggaagaccgctaccccccaagtagctgagccctccccacccnancacctagcccgtgaagcagtagcaaggtcatgatatccctcattaagagagcggccccaaactccccgctgaggccaacgagccatttttttttttttcccttaagagtccattttaatatttttaactgctacttaaaatttctcagtatcttttaaaaactgaaggcaaggaaggtcttcagaaaacagtaaccagaaaagaaaatctagaaaagtactagaaaatatatatatatatatatattccttgtaccagcccctgtaacatgttaagcttttgtaaaataatctaatattcaagaatatagacttgtcaaagatatacagaacaattaacaaattaacaaattaacaatttcttctccaaacctaaacatagcgtgcttgttccatatttatacaaattctttactataatagattgtatgctcagcttttattaaggtttttattaataagtatacttgttttcacttggaagaaaagtcagcagttaacctggatggttattcccttggaatgtatgaagtcctttgctatttcttccaagtctcatataaaacatttaaatgctcagatccaaaatattgatgacttttgaaaatgttttactgatttggacagttcagcattgattttatctacttactgatatacgggcacagagcttctgtttttttaatttggcagatagcattatatgtttttattgtccaatagagcttttaagaaaatttttgaaactccatttctggtagccaacatcttgctttctcagtctccatcctgcatgaaggaagggcatttactagaactccaaatnnccttctacactctctctctctactctccttctcctttcttacnccccccc

SEQ ID NO: 337059 - DNA, 198 bp, Homo sapiens
tgtgattcggttccatagcatgtgatagaagccccaagacaaaactggtttaaactaagatgaaagtctatttcactgccacgtaaacgaagtttaagggagcccctccagggttgatgcagaggctccaaggttatgtgagacctagactctatctagttccatcatcctgagcatgctgcctcatggtccagaaca

SEQ ID NO: 337060 - DNA, 369 bp, Homo sapiens
tatgggtacaccaagtcccacttccgggggcacccagggcaggggtcagcaaaggctttctggaagggtccagatgacacacactttgggctttgcaagccactcacggcctctgtcacatcatcctgttgctgctgtgaacgaccctttaagaatgtgaagaccatccttcgcaatctggttgtacaaagacagacccacaggctggattaggtccgctgattgtggtttgccagcccctggcctggagctttgccagtgtgcaggctggatgcccagccacggctccttctgctaggacgacctctcctctatgacagactccaagatgccaccccgagactcaccggatactcactacctcaactc

SEQ ID NO: 337061 - DNA, 596 bp, Homo sapiens
tgatcttgaggatccccaagcagttaatacagactcatagtgatacagttagatactaggtcactgtcacagctcctgtaccaaatagtccacagttcttaattatacacatttgagagaccatttgattaaggattgtctccccactgtactgtaaactctacggatagagagatctggaccactttgctcaccattgtattccttctacccagctcagcagtacatactacatacctaatgaatgaatgaatgcatcaatggctttaaaagccctggccatgctccttaccccatctcctctcagaatctgtccgagaacccccattttgaattcatctctcgattttttccaatccgatcatgcttaacctcttctctagtaggcagtagctccagagagtagttaagtcaggaaaatggtcaggtttgtgtttaaggatgaacattagtgcaaggctttgtccataggagtgaataataaaggtctgtaaaagttgaaattttggttaaatttgaaatgttcaaagtattatgtcgtgtttctaatgacatgaaagtttgagtctgtattaactgcgaaacagtgtcctgtg

SEQ ID NO: 337062 - DNA, 390 bp, Homo sapiens
gtcttacttctctttctgctttggctgccaggaatctccaagctaaatttactctttagataaagtcaccatctgtctcacctgagtgcttgcccccttcctctgcatggttttcaatcttcctgagagtaacaatcacttggggagacacttttgttggctatttcttctgattcttttgtggaagtaggctggaaatcaattataatttattctaaactcatgtactacagcctgccccatcactgttgcctggtctttctgggtagactgtattgctatccagaaaatatacagctgagcacacagcagctccccacaaatgcctgtaaatggtcctctaagacctagcctatcccttgtcccttcagctatcactctaggatggct

SEQ ID NO: 337063 - DNA, 555 bp, Homo sapiens
tcaggcatttggtccaaatggataagggagctccgagcatcataacaaataataatggcacttgagaaatagcaatacgatgtgtttgaaatgtagagggcaggaggaggagggacaagataagtaggaacatgccagatcacaagagctttacatgcaataacaactttgaactaaaatttaaagacagcaaggaacaaatgaatacatttaagaatgagcatgaattgatcaaatttacattttagactgatatctggaagtgtgtgcaattgtgatagctgtgtaagttgatcaagcaagaaagataaaggaagaagagcatggtcaaagaagagaagagtgagaagatagagttgagtaggttagccaagaaatgtattttaaatatcaaattgacagtactttaccattcatgtgtggtaggttagcacagctgtaaatcttaaaactcccaaaggtttgcaagaaaaactgggtagatgaaggtgccaataaattactacaaagaacagatttgggggatagatgattagttcaattatgaacatattg

SEQ ID NO: 337064 - DNA, 219 bp, Homo sapiens
cacctgggtaagcataaaagtagagatcagaagtaattgcttcaaaaggatatgctataatttgcttggtcaaataagtagtatatttctagaaatcctgattcagatccttttaaaaagtatagactcaggatataataatcatgtgtatcagctattcaaatacattctcaaaatccattttactaaaagttgaattttgggcatatttttgccttg

SEQ ID NO: 337065 - DNA, 709 bp, Homo sapiens
ccagtttgttgttttacctaaaaggtgttttccacgtggagtgggactgagaggcacaggtggctgaggggacccgcctgggatgtgaggcgcaggtgtgctcggccccttcatctgtcagctgcagcaatggaatacgtgctggaagtgaagaactctccgcggcacctcctgaagcaattcacagtgtgtgatgttcctctgtatgacatttgtgactacaacgtctccagggaccgatgccaggagctcgggtgctgcttctacgaaggcgtctgctacaagaaagcggttcccatttacatccacgtgttctctgccttgattgtgatcatcgctggggccttcgtcatcaccatcatctacagagtcattcaggagagcaggaaagaaaaggccatccctgtggatgtcgcgctgccacagaagtccagcgaaaaggcggagttggcctcatccagcagcaagttagggctgaagcctgcgagtcctgggcctccaagtgctgggccctcgatgaagagtgacgaggataaggatgatgtaacagggacaataacagaagccgaagaaactgaggactgactgagacgcatgaagaagtggagattgtcagaattatccaaatgaaatggtacagcaggtgcactgttaacagtgtgatggaatgaccacccaaagagaaaaaaataaaggtattttgaaaatt

SEQ ID NO: 337066 - DNA, 489 bp, Homo sapiens
caacccacacttgatttcagatctggaatgcctggcccctaactgaggctgcgtctgtgcaaatgaggctttcctgcaggacagatgtttgcctggttaagggagcctcctgtgtagagagatgatgtgggaggaagagtgttttactgtcccctagaatgcaatgagaaacataggaggatacggccatccccaaaactggcttttgaatcaatcattgccaatcagacaccatgtagatgggttcaaagatcctgatgaaatcttttcgggactgctgaatattccatttgaaaaaacaattcttcttttctaaaaatctagtaacagggacaataacagaagccgaagaaactgaggactgactgagacgcatgaagaagtggagattgtcagaattatccaaatgaaatggtacagcaggtgcactgttaacagtgtgatggaatgaccacccaaagagaaaaaaataaaggtattttgaaaatt

SEQ ID NO: 337067 - DNA, 625 bp, Homo sapiens
ttttacaggtgagttctcctggaagaagaacctgatgccagccatctgtcaaggaagacaggaagtaacagtgcaggctcagtgtgctcggccccttcatctgtcagctgcagcaatggaatacgtgctggaagtgaagaactctccgcggcacctcctgaagcaattcacagtgtgtgatgttcctctgtatgacatttgtgactacaacgtctccagggaccgatgccaggagctcgggtgctgcttctacgaaggcgtctgctacaagaaagcggttcccaagtcattcaggagagcaggaaagaaaaggccatccctgtggatgtcgcgctgccacagaagtccagcgaaaaggcggagttggcctcatccagcagcaagttagggctgaagcctgcgagtcctgggcctccaagtgctgggccctcgatgaagagtgacgaggataaggatgatgtaacagggacaataacagaagccgaagaaactgaggactgactgagacgcatgaagaagtggagattgtcagaattatccaaatgaaatggtacagcaggtgcactgttaacagtgtgatggaatgaccacccaaagagaaaaaaataaaggtattttgaaaatt

SEQ ID NO: 337068 - DNA, 450 bp, Homo sapiens
ttttgaatcaatcattgccaatcagacaccatgtagatgggttcaaagatcctgatgaaatcttttcgggactgctgaatattccatttgaaaaaacaattcttcttttctaaaaatctagtaacagggacaataacagaagccgaagaaactgaggactgactgagacgcatgaagaagtggagattgtcagaattatccaaatgaaatggtacagcaggtgcactgttaacagtgtgatggaatgaccacccaaagagaaaaaaataaaggtattttgaaaattgcttctcgtccgatgttgcttattcattgctatatttttatcttaggagagagaaagcctgtggggtaggagagtgggaacctgaactttcagtttttaatggcactgcttgtcactaatattaacactatgggggctcacagcatgggctcaaggtggtgtcc

SEQ ID NO: 337069 - DNA, 840 bp, Homo sapiens
ttttacaggtgagttctcctggaagaagaacctgatgccagccatctgtcaaggaagacaggaagtaacagtgcaggctcagtgtgctcggccccttcatctgtcagctgcagcaatggaatacgtgctggaagtgaagaactctccgcggcacctcctgaagcaattcacagtgtgtgatgttcctctgtatgacatttgtgactacaacgtctccagggaccgatgccaggagctcgggtgctgcttctacgaaggcgtctgctacaagaaagcggttcccatttaggggaggaattgacctgggcattgaggagccatttccagggagctggggagcacagcaggaacagaggggccagcgccatctctccacgcacccccaggggtcaggagccagcaccatctatcctccacacactcccgaggtttacatccacgtgttctctgccttgattgtgatcatcgctggggccttcgtcatcaccatcatctacagagtcattcaggagagcaggaaagaaaaggccatccctgtggatgtcgcgctgccacagaagtccagcgaaaaggcggagttggcctcatccagcagcaagttagggctgaagcctgcgagtcctgggcctccaagtgctgggccctcgatgaagagtgacgaggataaggatgatgtaacagggacaataacagaagccgaagaaactgaggactgactgagacgcatgaagaagtggagattgtcagaattatccaaatgaaatggtacagcaggtgcactgttaacagtgtgatggaatgaccacccaaagagaaaaaaataaaggtattttgaaaatt

SEQ ID NO: 337070 - DNA, 112 bp, Homo sapiens
tacataatttataaggcaaaaaaagcatgcaagtgagaaaaaattctgtgtatgtttgaaattatgccaggattaacctgaactgaattttaagttatttgttatgatcccc

SEQ ID NO: 337071 - DNA, 117 bp, Homo sapiens
atatgcaaaggcatagaaggtgctgagagtgtcaagatgtgaggctgaagaagggagccaggggcatttggaaagctgtttattatctctgacttcagttttctcgtatacaaaatg

SEQ ID NO: 337072 - DNA, 399 bp, Homo sapiens
gagttgtccaaggaccttggggataaggggacggggcttctctgctgatctgatggttttttcagtaccacccttcagttatctgtagcaggatcctctgctgctgatggccaaacctcagtgcccactgggattacaaattggggaggaagagggggacttccacattagggatcagcagggagcctccagaatggagtaggagatacctacggccatcatcagaggctgccgcagccccaggttcagagcagtcatcttagctgatgccatggaaagcagtagaccagaagtccagtccgcagtgtttgctcagcacttggcagaattgtatgaccttgggggtcacttgccttgtccgcgcctcggttccccctgtgaatattgagcgagttgcat

SEQ ID NO: 337073 - DNA, 557 bp, Homo sapiens
tagatgagtttatccactggggggtaatcctagagtacatatctgtgggtggttcttgacaagtgtgtaaggcctgggacatctggctttgaggcagttctttctccaggttttatttatgcgaatccactcatctggcaggaatgatttgttggtgtgaaatcaggtgttggcccagcatcctgcacatgttccatccacatggcagtgatggtcattgcacaccagtgcttggtctcccaagttctggagagtgtttttatttcactgccatctaatttatccagaaagttcaagtagcgtattttctgtagattcttataatttcaagattaccaggtccctgtgtgaactctcagaccacatcctgttgcctttctctgtcattctattgttttctctcccaggagggctgggtggtagggtatttattaatttattgccccatatactaatgagttccttcctagaactccttacaactctcagtccatggcctgttgtccatctttgctgtcccaggagtgctggtaggtagagtatttaatgatctcttc

SEQ ID NO: 337074 - DNA, 555 bp, Homo sapiens
gagtaaggatggaagttaacaatgcagaaggcttagggaggcagcaaaaggtgagaatttagaaaatttagtgcagaggtttggcagtgaaaggaaggaggaaaataggagagcacctggaagttgtaacggaattaaataaaaacttactttctcctcctcccacacaaaggaaagttatgcaagtatcatcagttgaagataaccacctctttaggcctggaatgattgtgtctctcagttttccacagaaatttagagacttaccatcaatttccactttgtccaaataaaaaacacccagcgattgagcttaagttctgaaattcagactgctaaatgattgtgttcatcaaaacactaagcagctggctgttaccatgttcccaactcacagtgactattcataccatgagccactgtgacttgagtgtgctgtcacatgagcattgccagcaaagcggccactgcagacttgtaaatctacctacagatttgtaattcacccatagctacctctcattcatttactgtcactcttccttcctctggcaa

SEQ ID NO: 337075 - DNA, 242 bp, Homo sapiens
atcttccagctagacagagccactcggattcccctgggaatcgtgtactcagcagacccaaaacccgactgctgacagttgccctccatgagcccctctgtggtcttttctgattcagatatggcagctcccgctttctccttgtttcttgattcttatttcccttgaaccctaggcccagccaattccccaacaaagccttggctttacaatcaaaatacacccgtcatctagtccctttt

SEQ ID NO: 337076 - DNA, 232 bp, Homo sapiens
tagtagatcgagccggtacccctagtttagaagtttcaatagcattgtcacccttctctccataacagcattcagtcattctctaggtctttgtagttccatatccaaaagcattttcagcattattcccttagtttcctttctaccacaattagttcaatttctcagacttatctttctagattgttgcaaacctactaagtgattcctggctattaatcttttttttttt

SEQ ID NO: 337077 - DNA, 570 bp, Homo sapiens
gatatttcgttttccttgctttgtgttaggacaagaatgcttcagctcttaatttaaaattatgtttctccctcctaggttgagtgaacttagaatgcattctctgacatatccaagattttgttaatatgaatttcgggaaaaaagcatacttaattagctaagacgtcttattctaagcttgaccctatgttcgacatcttttgaatttctggttgcgtgggctgctctctgacactggttagtgacctggaagctctattaatgttaggggaggtggtgtatgagcattagaggtatccttgcaaggaaagacttgtcttatctcaatacgtctttttttttgcacacaagaaagtcaatgtctgagtcttctaaaatcttcctatttccaaattgcagattatgattgattcctaaacaaagacctaatttttgactcagagacgtggcaagctagtgaatcaccgttataatttaacaatcttcaagataaaattatctctgatatttagattttgcccaattattaagatatttgggtgtttcgttaagaatggaaaactctag

SEQ ID NO: 337078 - DNA, 328 bp, Homo sapiens
ctggccctaagactatctttatctccctaggttggtgaacatgtgaaaaagatgaccgtccaaattcctcattctgattcaagttccttcctgagctggtcccatttcccctgctcactcagccagttcagtcacactccacggcccaggccaaactcagtctcgtctctcactttagcctcccatggctcccttctttgggcgaaagctctgctctacaaaaatggatgcgagcacaatataatacccttcacgttggacttgtatagcttgatccacgctggggaatacccgggggacccgaagctcgaattacgtaaatcatggg

SEQ ID NO: 337079 - DNA, 157 bp, Homo sapiens
tgattgcatcaagctcattagttagattgccattagattacatgtaataaaataatatttaatttagtaaaaaacaaattcatgttatttagacacatgatcattgctctttaaaaaatattgtaacagccgggcacggtggctcatgcctgtaatc

SEQ ID NO: 337080 - DNA, 322 bp, Homo sapiens
ctcttggccaccaattttggaaagtaggaataagatcagattttaaagtttactggcatattctaactgtattagactaaccaagcatggtaattagttttcagacatcctcaccatgaagcataacctccaactattcacagtggaaattacactgtgtgattaacttggagcttctgtgtgggccttctgtatcactaaagctggggaagtacaacttccatgaaagaattgcaactactatgagatgcccaggctatgagcaacccaatctagccatatagagaggccacatgaagcaagagatgctccactggcccct

SEQ ID NO: 337081 - DNA, 481 bp, Homo sapiens
attcccttaaatacaatatggtagattctaattccaattatctcctaaattatactttctccatgcctcctctcatgcctctctgaggtagagtatatgtcttcactccattgtcaggctgtgtgacttgctctggaatgtaagcatgtgatataagccacatcctaacagaagctttaaatgtgcctgcagggtcagtgcagcttctctcacttctgtcttctgctatgagattaacatgtcccagatgtgggtactttgttaacctgggtccctgaatgagaggacatagagaatacagccaatctgaaaaaatctgacccttttaggctgggcacggtggctcacgccagtaatcccagcactctgggaggccaaggtaggtggatcacttgaggtcaggaatttgagaccagcctggccaacacggcaaaaccccatctctactagcattacaaaaattaggtgggcatggtggcat

SEQ ID NO: 337082 - DNA, 107 bp, Homo sapiens
ggaagtgaggtagtaaagcaggacagttattgcacaagtggtatagtttaatatctaatatgtgaaacttacaaagaagtagtttggttttactaatgcttacattc

SEQ ID NO: 337083 - DNA, 404 bp, Homo sapiens
ggaattcgaggctgcacggagctatgattgcaccacttgtacttcagcttgggtgacagagtgaaagccccatctctaaataaataaataaagagaggtcctgattcagtttatcaatcccatgtaaactagagagaaaacagcagaaaatttatgggtgaaacctttggtgatggttaattttttgtcagtttggctaggccacagtattcggatatttgatcaaacacatctggatgttgctgtgtagtttttacatgagattaacctttaaatcagtagactttgagtaaagtaattaccttcctatgatggtaaattttatgtgtcaatttgactggaccatagggtgcctggatatttggccaaatatcattcagggtgtgtgtctctgagatgaaatt

SEQ ID NO: 337084 - DNA, 223 bp, Homo sapiens
gaggctcaggacaaaagtattcttctgttgtctttaaaggtaaactagggtgtcttggtgccccccagaggacactctgagattcaacagcgatagtctcatctttgaggcacagcattggttggagctataaactgctgtgatcttgtttggagaaaatatgttttttattattgatttgaaatatgttctcttatttttatcctctctccctaccagtcaa

SEQ ID NO: 337085 - DNA, 269 bp, Homo sapiens
tgtagactggtgtgaccttttagaatattttgggaagagaaaaaatggagcatttattgcagtcatgtggaaactctgcttcaatatgatatgcaactcattacatttaaaattccatttgggtaactttcacactgtggcatttcttgagccctctctcacatgtcaaagagatgcatatagatgggaaactatttattcaggcaacctcaaatggtactataaatatagttgtaaaatgtcaagttatttgcacgctggttattccg

SEQ ID NO: 337086 - DNA, 201 bp, Homo sapiens
tcttttgttcagttgtgttcagctaaaacatggggaaaacacctctgtcatataggttttatttgcctgggacatgctgtttaaaggtaaatgaaacagggtagctaattgtgaggtttctcttcagtgtcctcagacttctgtctgttctttcgtctgcttgatagcccatcatctccatgactgttccccactttaaga

SEQ ID NO: 337087 - DNA, 127 bp, Homo sapiens
ttatccttattcttcaagagactcctactcctaatagcactttgaatttaacctccctggtagttcttctcagccaaatttcaccttcctgaaaacaggattctctgttctccttgtctccctagag

SEQ ID NO: 337088 - DNA, 167 bp, Homo sapiens
tcggcactcgctatcatcggcacctcgcttattcatcgggcacctcgctatcatcggcacctctgaccttacgggtgtttgactgtaggtcataacaccctcattccagagagtgtcctcccttatacccagaaggaaggagtattgaatacatgcccagagaggcc

SEQ ID NO: 337089 - DNA, 612 bp, Homo sapiens
ggatttttctatctgtacgtgcagatacaacacataacattatctaggggcattcaatgtgtttgttgactgctatgagggtatacggtgcaaggaaagaaaacaggagcagggacaagcttggcttctcaaccaccatgtggcatctctgtgtggctctgtaaagcagtgttgtctttggaaggcagcagtgaccccagtgtttacagacgggatgcatccctgagagccggattttagctttgtgcatcactcagatgcaagcagctgtttacctagaagtgcattttcacttcgtgtttgttgtcagagtgtttatgaatgatccatccattaggcactcccatgatgtggtcatcaacaaagcttctaggtctctgaccattttgccaaccgtacaatcagctttcacaatttacacataactgaagcctgctaacaacccatgggacctagagaaacagctttcttgatagctcagatgcagaatgtggggatctgggtaatttacatagatgggtgtcacctgtgatgcctcctccctcctaagcctctggctcaatcctacctcaggctgttggctccttggagttcttggcctggactacgacc

SEQ ID NO: 337090 - DNA, 342 bp, Homo sapiens
agatttgaagatggaggctcagaggggctaagtaactagctcaagactgcacagttagagaaacagcagagttaggacttgaactcagcactagtttcggccagtggctcttccagtggaaaggagtaagaagaaacagaacaggatggaagagaagagaaataggagaatgaagtgacccaggtaggagcctgtcgtgctctgcctgcctgcagaacaaagttcaaactccttcacctggtacgcaaaggtctccttgatccagcttctcttctgttaacccattcctggatcccctgcattctatgctctgaaagggaaaatgatgtcagattcagggct

SEQ ID NO: 337091 - DNA, 352 bp, Homo sapiens
ggtcctaactgtcctcaacctgctgtagtattttcatcttttgcattttggccattctgatggctatgtagtggtgtaccttatagttttaatttttatttctctggtggttaacaaagttgagccccttttcctattttttttggctgttgtatattctctttttataaagtggctgctgaactatgtttccacctttctattgggctttctctattttcagcatcaatattgaaacaatgagaattattattgagggcctatctggaactatgtttgtggaggtagagaagagaacaatatagtcatactctgtacctcaagaaagcttggctgtgtgtaggaggagtga

SEQ ID NO: 337092 - DNA, 353 bp, Homo sapiens
ctaggtgctcagtaagtatctagggaatggacgagttgtaacattcttcactgtgttcttgctttctcttcctttgtcgctttttcctggcccaaacgagtccagtgtcaggattcgaaatagaaaaggattagtcaaggcttgtggggagaaggccttgtccctgaaaccaagtcacaaataagccttcagtacgggcttttgacaatgcctgggtgctctagggaagccattaaagagggaaaaaaccattttttttttcagtgaaaagtctagtactttggtatagttaaacatttcagaggatggcatgtctgagcccccaacctagcgcctataggtcactgtagtca

SEQ ID NO: 337093 - DNA, 861 bp, Homo sapiens
atatgtcctgtaattgacaggtcatcatttaggctaaggtattctgcctttaaaagtctgcagtcatcttctagggcttaacaccatgcttcccgttcatagattataaggtgcttagtgggtgatatttttggcctatgtggggccttcatattatggagcattcgtgtgttctgtggcttttcatgtagtgcgtgtggtcttcctttttcaggagcagagtagagtgattattagtaattatgattatgagtaattatttacaaatggatgtgagcccttggtgtatacactaaatgaaagtcctatgagttgaatcagtacttttctgagatgcattgtgaggggaaggaactgtgcttgtcttgctgaccattgatctccaaggcctaatatgctacttgacacctatcagtgctcataaatatgttttgaatgaatgaatgaatgttcaactaacttaagccttccagtttagcttcagaggctgtaacatggagctgagaagagaagtaacgagtaactacaccagtggctttatagttcttccaaggaacgcagtctctccaggggtactattgttagctctgtgactctgatttctttctggtaagatatgtagcaggaattgttacacttatttgatgacagattgaaaaataaagtcacaagaagatttggtgctcaggtcatacagagagagttggaagtatacatcaaatggaagtagttgtttctattgcattgtgcagtcatccatgataacttcttttttttttttttgagttggagtctcgctctgttgcctaggctggagggcagtggcacgatctcagctcattgcagcctctgcctcccagg

SEQ ID NO: 337094 - DNA, 346 bp, Homo sapiens
ccatgtcgagaagtggttaagagagtggtgtcatatacaggctgccatctctctgaggtttctccttttgtgtaggaagagctaaattaagtggtgcttcgagcaagaggaggtcctgcagagaaacaatgcatacaagtcatcttggcacaggtaaggggtggtgactagcagggctagcagctgcagagtaagtaagggccaagttctcagtggagcgcataaagttggggtgggccagatcagctttatataagacatttttggccaggttcagtggctcacacctgtaatcccagcactttgagaggccaaggcgggtggatcacaaggtcaggagttcgag

SEQ ID NO: 337095 - DNA, 95 bp, Homo sapiens
tgctgggattacaggcgtgagccaccatgcccagcctgaaaatgtgatttttttatgcagatgaaaataggaccacagtgaaggaggtagagaag

SEQ ID NO: 337096 - DNA, 213 bp, Homo sapiens
gccccatgctccgtgagagccttgacctgggtcagcaggggcggctgggcttgactcgagaattcccacagggcccgagggaagagcagagcaagagggaggagcgcgtggagccctatgtggcctgcgatattggggtggcgtccaggcccgcctagatgggggagggagacaacagagctgccacctgctcaccgcagacccaggggccca

SEQ ID NO: 337097 - DNA, 703 bp, Homo sapiens
cattatccactcacaccctttgctatggccagtgtgcccaggaatgctacatgtgagacccagacagcctctgatgagtccaacacctctactggggtatccacacatgtccctccatccccaactcagtgaacggcaccctgtcattgccacacacagagcctgggagccaccatcagctcctctttttaccctacagccaatggctaactcctaatatcaacccagaccttctctttaccccttgccatttctggatccagaccgttcatggtctcaggcccttcaccccacttcttaccagttctccttgcctcctggtacctagcacaaagccaggaatacgagatgcactaacaaaatgcaaaaatagtatgtatgacatgtccctgccaggcgtgcccaactcagtcagcccactagggccaacaggcaggaaaatgtccacactcgggcccgggatactgcctcgggccttctgccactgcactcacgtggggccggtctaggcctgtggccttttgcaaactaggggcctcattaagggaactaattctcagaggagcacaaaaccagacatgggctcggaagcttccagtgcatcctctgcggtaacacgtcttgctcctcggcaccccgcctgttcccagctccagctctgatgggccccagtgtcctatgacccctcctctgtacctccttc

SEQ ID NO: 337098 - DNA, 491 bp, Homo sapiens
ttagcctgtctagttcacattggcctggaggctagggcaggtagtgacatggagcaaacttatggtagttagggttcttctctctcttccttgaggtctcagctaaaccagtgcctcctccaggaagccttccccacctcagaggctgcactgtgtgctctttgtgcaccctcggagcaaccctcccaacacctattaacgctaatgcagtagaccagcaaagcgtcttatctaatgagcacatgaagaaagaggccaagtgtccccaactgacccccaccccaggaccacacacagccagggacacactaccagactctcttcatgacaccaatcttttttggggtgcatcctagaccccggatggtaccagcaacagaatgtcactaagacacagccctgccttcatgaggctcacagtctggtgtgaggggcagaaaaatacacgaatatgcaaataatcaggtggtggggaggtgggaggagaggaa

SEQ ID NO: 337099 - DNA, 422 bp, Homo sapiens
tctgccccgatctgcccccacctcttccccgagttcctacgctccactcttgctccctcccactcaccccacattcagcagctagagggatccccaacgctgaacctgtctttctcctgctcagaacctttgtggctccctggtgttcccagcaaaaaagccaaactcctcagctgaggatccaaggcccttcaggacctcgcctctgctgccctgcgttccaggtgcatgagctgagacgtgcacctagaaagccctcgggaaaggctaaggaccatgacgttgactattgcacctctccagcctctccgccctacctgactctccatgttacgcttctgtcactcaagcccttccctctggcctccatcagggacagcacctccttctgggcgttcttctctctcttccttgaggtctca

SEQ ID NO: 337100 - DNA, 287 bp, Homo sapiens
ctcaaggcagcatcctcaaataacttcccattaccttagagtatttgggtacagaatggaaataagaaagtttgtgtccagctcaaattttagtttttggcagatcttacattggcattttgttgctacggagaaaacaacatttaaaaggataagctgtagaaaatgtataaaaattgtttttttatatattcatattgttaggaaccacaaatcttgtttggaagtagccagaacttaaaatccttaatacctgctgtatttaatattcttttcatggtctagtt

SEQ ID NO: 337101 - DNA, 308 bp, Homo sapiens
gggctgtggaggtaggacggatgggctaaggggtgcagggtttatctctggggtgacaaaaatgttctaaagtttactgtggtaatggctgcacaactctgaatatactaaataaaagccgccgaactgtacactttatatgggtaaattgtatgttgtggcaagtgaattctatttcaataaagccgctaagcaaaagtgactgcagggcacttgacagctgatagccacttccccagtaaaataaaaattaaaaaagcagaatgagagtttccaggagcccccaacttaacagctggttacacggc

SEQ ID NO: 337102 - DNA, 396 bp, Homo sapiens
ccccatcctgtctcatctcccagcctccctgccgggccccagcactcaggtctggcctgtcccttctctgcccactcgacacagtgtgcccagaactccttctctacctaccaaataaggattggtgcactctgaagccctcctggatgtcccatctgacatcgagcccctgcccccatctcttatctgaattcctgcagccgattgcacctgctactctttcaggaaccaccttccattatcaagagctgggaaaactggcgaaagtttctaccttgctcttcactgctgtttctgcatctcataaaatgctccctacctcacaaggttgtgtgaaaagtaaaatgagaaagtgcatataaagtgcgaaatacagtgcctggtacatagttcaca

SEQ ID NO: 337103 - DNA, 200 bp, Homo sapiens
aaagatacctgcacttgcatgtttattgcagtgctcttcacaagagtgaagatatagaatcaacagattctatcaacagatgaagtgtccgtcaacagatgattgggcaaagaaaatgaggtatagatacacaatgaaatactattcagccataaaaaagaatgaaattgtatcctttgcagcaacatggatggaactgg

SEQ ID NO: 337104 - DNA, 624 bp, Homo sapiens
tgggattacaggcgtgagccactgcgcctggaccccccaaaacacttatactaccattctgggaaacactgtttcaaaggatactggcttgttaacagctcttctaggttattctcattatatggatcaattaaaattatttttttgttttgtttttatgaaaggttcttgatcctcttgcctcagtctcccgagtagctgggactacaggtgcacgctgccacaccgagctaatttttttttactttttgtagagacagggtctccctatgttttctaggctggtctctaactcctgggctcaagtgatcctcccaccttggcctctcaaagtgctgggattacagacatgagcgaacacgcctggtctaaaattatttaatgtcctccttagattagaaatttcttgagacagagactatagtgtctctatatttctgtgtcattccaattccagctgttaatactaacataaggtaaggagctatactttacttgaatgaaccaaacatttaaaattgtgggaggctgggtgtggtgaaaccctgtctctataaaaatttttttaaaaattaaagaaatttaaaaactaggtgtggtggcatgcacctttagccctagcta

SEQ ID NO: 337105 - DNA, 262 bp, Homo sapiens
gctcagtctcctttcaggaagagaacacctaacgtcggggcaggaagcctaggggacgtttgttcctagagagggaaatggaacagtgctttgagattgtttccctttcatcttatcctcagctcccatgcctggccccaccctgtcctctgataagcagagggtgtccatcagtcatcattcaactcacagctgccccacatcctgggtcaactcacagctccctcacatgcggggtccatcttccaatctttcccccatg

SEQ ID NO: 337106 - DNA, 393 bp, Homo sapiens
tcaagcctggttgacagtgagaccctgtctcaaaaaaaaaagaaagtagatttttaaaattctgtaaaccatacatagatatggaaagatatcttggaagtattattaaatgacaagagcaagttgcagtgtagtatatacaatattctgtttatataaaaagcattatatacaagtggttgattcaaaattaacaatgtaatttataaaaacaataaagggtactagaaaagctataatttcttaaaattccccacataacaaattatgaaaacctggaactccctaacatacaattatcaaagtcaactgtcaaattgtaatggccacagaaacactctgatacacaattaaaggtatttggtcaaaacttgccatgtgctgggtgtggtg

SEQ ID NO: 337107 - DNA, 400 bp, Homo sapiens
ggcatgcgccaccatgcctggctaatttttgtatttttagttgagacgggatttcaccatgttggccaggctggtcttgaactcctgacctcaggtgatccacctgcctcggcctcccagagtgctgggattacaggcgtgagtgactgcaccaggccggtttggagattttaatagcttcatgtcatgcagcatgagtcagaggcaagagctcagaccaggtacccaaaaacaggaatgccaaatctcgtgccctgagtaattctgtgtcgtagtaatagattgctgtggattcatgagtaatttggggttattttacttccttggcaccaaattacacactcaaaattgacattgttgatcctatccaatgttcttctttttcaagaaaaaaaaaaaa

SEQ ID NO: 337108 - DNA, 346 bp, Homo sapiens
actccagactgggtgaaagagtgagactcataaaaaaaaaaaaattactatcttaaccatgtaaccatttttaagtgtattaggtttcttttgtagtagcataaaaattgagatatgctgtacataatctaaaattcacaattttaaaatgtacatttcagtggtttttagtatattcactatgttgtacaatcattactactatctaatttcagaacatttctggaaaatctgtacctattagcaattagtcccagttattctcctaccccatgccaaggcaaactctgttctctgtctctatggatttgcatattctggatgtttcatataaatggaatcatac

SEQ ID NO: 337109 - DNA, 717 bp, Homo sapiens
ttctcccttcctccttctcccccaagcatgcttttacttatagttgaaagccacagtctctgcttaataccactgaatgttaatctggaccaacaggttgctgtcctctgccccttacctggggagctttcataaaagtaaccagtggtagctttgtaatatcaagccaaacctaagaagcacaaagttctcacaggctgagtgatttctgaacactacccaagtcatcacaagtgtccattttctctggtcaagcgcattcattttcatcatgattctattaagcaaaattcaggcccggtggggtggctcacggccaggcagagtggctcacgcctgtaatcccggcagtttgggaggatcgcttgagcccaggagttcaagaccagcctgggcaacatagcgagacttcatcgctacaaaaaaatcaaaaaaattagctgggcatggcagtgcacacccgtggtcccagctactcaggaggctgaggtgggaggatcactcgggattgggaggtcgcagctgcagtgagctgtgattgcgccactgcaccgcactcccgcctgggtgacagagtgagaccctgtctcaaaaaataattaaaaaaacatatatgtgcatttttagttgagttgttgtttcctaaactctaggttagtgtaggtgcctgccattccaaatatcttctccaagacgccaagcgaagatcctgtagag

SEQ ID NO: 337110 - DNA, 355 bp, Homo sapiens
ttgccgggtaaagagggcagaggggcctggcaggtgtggaaccctcccagcagctcggggatcccaggccccacaagcatgtacaagtgggatggagaggggccaggacaatgtggcttcacatttactgggaatggttgggagctgctgaggcactctgagtgccaggcccacggaactcagcttgcatttggacaggcttgcactgctgtgctggtcagaaacttaacctctgcactttggggtaggtgggtggagtggctgaaattagagacagaccagcgatcatcctggacacaaactgagggggggtgaacagagacagggagtagggaggggtgggactgattagcag

SEQ ID NO: 337111 - DNA, 244 bp, Homo sapiens
ctccaaattattcatttcacattttcaagcttgttttgaaactttggtttatctcagttatattattgttagcatctagtgaaaatgatgatacagctggataaagatagagatcgatagatagatagatgatagatagatagatagatagatagatagatgatacatagatagacagagagatagtgatagagatagagatctattttttttttaaacagagtctcgccctgatgcccgggct

SEQ ID NO: 337112 - DNA, 478 bp, Homo sapiens
ttcttaccgtatatatccaaagtaaatgaagttgagatttgatgtcatcagtagcccatttgattatctacaagaatcagataacaaactggtattatgggggagagatataaataggaaatcagtgataaagaagctgtagtaacatcagtgttggagaatctttatttattatagggttaacctcttgtaccgtaatggaccttaaatgagcacagaagtctggtctccaaagtgagacctaaaggaagatgatgccaaccagagcatggaggacagactggaagttttcccctggcacaggccatcagtaatcagctgttgatatgcctatgttaattgtctggtaaactcgtggtgctgttttggctcttctcaactagttcactttttaaaaatttaagcacctcattaaagaaacccttttagatgtggtaaagcgaaacagtctactaggtagggccctactaagtaacga

SEQ ID NO: 337113 - DNA, 133 bp, Homo sapiens
gcaaattcctcaggctattttctctgggctggaaaggtctggaaggtgactgtgaaaagtatagttgaactaggccttaaagagcagtagaatttagctggattgtgggtgggaagacatctgaagctttgaa

SEQ ID NO: 337114 - DNA, 211 bp, Homo sapiens
aaggacctatgcggggggctgggatctaccccaggggctgagtaaagaaaccaggccacggtgtaatgcttctgcagttgatcacactagagcccgacccaaaaccccaaaccactctccatcctccccagcctcgcagactgctggcttctccaagccacctttccttctgtctgtctcctctgctgagctccatgtgccgctccttctc

SEQ ID NO: 337115 - DNA, 528 bp, Homo sapiens
tgccactgggccttgcacctgatgcccccagggagctcagcagtagcaagtgtagaagtgccggtgccaccttctcctctcagcccgcttaccctccacgtgactttctgtggtcaagtcacgccatggaccccatgtcctgagcctgacattcatcctgacctcttcgctcctcttcctcctccctgagtcccagccatcaagagcatcgggctgagtcctcattggtctcactgcctccggttcttccctcctctgagccatcctccaggtctcatcataacccctccgccctccagcgggtcctcactgctcctagaaaaaggccataggcccagaattctctaaggagggtgtgaaggtctcaggtgatttgactgtaccattctttgccaccacattgctgctgtcctcctgtaatttctaacctgcttgaggtgcgtttctcaagcacccattgagctttcatgtggttcccactgggattcctccataggagggttttcttgatgccccaccccaccccac

SEQ ID NO: 337116 - DNA, 107 bp, Homo sapiens
atgttaaataagagaaaatattcgcatctgactggggactaatatacagaaaacacaaggcattcaaacaactccacaacaaaaagaaaagacttacaatcccatta

SEQ ID NO: 337117 - DNA, 270 bp, Homo sapiens
gactcaggagaatagatatcgctgggcaatggaggatatctcatcataccccccttgagcagtttgcttttatcatgactttgagcactatcctttatgtctctgttcctcaatttctccagttataaaataggaccatttttacatcagcgcctcctctccctgtcttacaggggtttgacaaggatcaaatgagttgctttaaagagaacatgtgagataagatatctcctcacagtaggtttccaggatcctgtccaggatgatcac

SEQ ID NO: 337118 - DNA, 406 bp, Homo sapiens
ttggcagactgagaatttggagcagagtgtgagtgccgagcctgggcttaagtctcaaccccagaccagactgcctttccaggccacctatgaaggatggctgggcagatgctcctctggcacctgaggctgggtagcagcgaagctcacctttgagatgaggtaccacctcatgcctggcttgggcattcatagtcattcatagtctccttctgacacactcagctggaaggagataaaactccagtttcagcagaacgttctcctgttgaactctaatctgagtctgtcctccccagcagcatccacatacttcccaaattgtggtgaattaaagaagctgcaagcactggcccaactggcttttgctggtggtttttcggcaaccctcctgcaaatgctgtca

SEQ ID NO: 337119 - DNA, 376 bp, Homo sapiens
ctagatactggtgatccctgattagcacatattcttgtggcctaattttcatgagagatgaattactgtcagaagcttgcttggtggacatggacatagaattcacagagcaatttggatgatcttaatgaccactgtcaaggtggtgtgagaagctggttcatttgtcttcactgtagggggagacccgaatggacagtttttctggacagagccagatctaaaggtccataattgcatggccaagtctttcctaggcttctgtgctggagctcctcctaccctcctctggttgctacatactttcttgtacccttttctcctttgcattatttctgtggttatatcatttcttcaatcagattaatataaagtg

SEQ ID NO: 337120 - DNA, 381 bp, Homo sapiens
gtaggggatggagttattgaactcctgaagttccattcagcccagagtttaggaaggaagtcttctaggaagaggactggggaacctccatgtggtgaaatggctggaaatggcttctcgtgctctctaggatagagaattcatcccttcactcatgtaacaaaagccgctgagctcctggtctgggccggtccaggaccagagagtagaggggacagacaggtgagatgtctgctctcagggatccgagcttggtggggagtacaaacaaggggcaggggcagagaaggagaggccacacctcctgtagtagggtaggcggggacagtctctctgcttgagttgagctttaatgggagaggaggacaggagttcatagtc

SEQ ID NO: 337121 - DNA, 192 bp, Homo sapiens
gcccttagcttttaagagggtgggaagggcagaagggaatggtcatgtgggtttgcagaattggggttggatgagaattcaactgggtttgttttccaaaagactccctagcttactgttcccttgtttttcctgcttgggaaaatggggaagccggtgtcgcccaagtgtggaggagcaaaggacttttct

SEQ ID NO: 337122 - DNA, 439 bp, Homo sapiens
tctctacaaggtacatatacattaattatgtccattcttttgttatgtatgatgcgtttcaagataagaaaacaaaaagaggaagtggttaagtacagagcagctcaaccaaagctttataacagtgccaagaatacactccagaatttcagaagaatgataacaactttcaagtcttggcctcttctagtgcatgagacattatttaaccatttattttaagtgtataacccatcttatacacaggtctgtgtggtaggttattaccctcatttatgtagtgggggaaactgaaacacagagagtgaccaggatcaaatccaggtagtttggctctaaagcccttgttcttggccacttctctactccccatatcgtattaccatagaaagagcctacatgtaagtttgcatgagttcttacattgaaaggatcaaca

SEQ ID NO: 337123 - DNA, 298 bp, Homo sapiens
acttcatggaagagtggctgatgactcaagccttggcattagtcacatctaagtttgaatcccagatggttcacttattagatctgaaatcttggatcagccattcctaaggctccgtttcctcatcaataaaatggggatgatcatatcaaccccacagagttgaaaaggtttaaacaggataatgtgcacaagtcctgcccctggtgttcggtagagaatattttgactccttgagtaatgggagttcttttgtggtctctgctagggttgggatggtcagtagcatgcatttgta

SEQ ID NO: 337124 - DNA, 426 bp, Homo sapiens
acctggcattcccctttcctcccacagcacctaggtgggggcctgggggatgcatagacgctttgctcgagtggagaaaagctgtactgggcagggcaatgccacagggatagtgacaaacacggaaaagcatttttctcctacattgcctcgtctggagcgtcagctgggacaatgctgggggcatctttccacagtcttaatgaggaattcagccccttaaaaatcatccccaaactaaacacccctcagttttatatgccatggctttagttcccatgaggtctgtgtgccgcttagcatgaggtcagtacatgttcatcttaatgctcttcttggttttttgttaaccgacgctaataaatttttacaagggctgtgctgttctggaaagtataaaagtgaagcattaaaaaacggaaccct

SEQ ID NO: 337125 - DNA, 504 bp, Homo sapiens
aggctgggtcccatggctcacacctgtaatcccagcactttgagaggaggatcacttgagcccaggaatttgagaccagcctgggcaacaaagtaagatcctgtctctataaaaaataggaaaaaaaaattagccgggcatggtgatgtgcgcctgtggtcccagccgcatgtgagactgagctgggaggatgacttgagcccaggaggttgagggtgcaatgagctgtgattgtgccattgcacaccagcctgagtgacagagtgagaccctgtctcaaaagggactttaatcgcctgacttcatcacagtatatgctataactgggtaaaagtgtgtgtgtgtgagagagagggattttcagtcccctccttctcgtgtaagaaaagcaagtgttactttctttactctcagtgaaattgctgtcgttgaaatggattatttaagtcatcttgtggagtagctatatcagcttgagtttgtttccagattgaaatttggcaa

SEQ ID NO: 337126 - DNA, 425 bp, Homo sapiens
gacaaatgagtgagtattggcttcaacttaaagtcaccagctgcatttgcccctaataagagagttagcctgtcctttgaagcgttgaagccagatactgacttcttatctctagctatgaaaaccctaggtggcatttttttcaatagaaggccgtttcatctacattgagaatctgtggtttggggtagataccttcatcagttatcttctggataagttgctgtagcttctacaactacttcaccttgcattttaggttaaatgcttcaccttgcattttaggttaaaaacaacgtctttccataaacttctgctagggtctatgaaccagcctttgctagtttgcacttttctttcgcagcttcctcatggtgactctcagccttaatagaattgaagagagtcttaccctggattaggct

SEQ ID NO: 337127 - DNA, 668 bp, Homo sapiens
  misc_feature (603)..(603): n is a, c, g, or t
  misc_feature (607)..(607): n is a, c, g, or t
ccaggctcaagtgatcctcccacctcagcctcccaagtagctgggactacaggtgtactccaccacacctggctaacttttgtacttttgtagagaggaggtttcaccatgtttcccaggctggtctcaaattcctgggctcaagcaatccacgtgccttggcctcccaaagtgctggcattacaggcgtgagtcactgcacctcgccacctttttctaagaagaaaaacagccttgattaagccttgattttgataacaaaaatgacagcaactccaaacaactacaatcacaattttcaatatcttttgactgattgttttagagaactaaaataaaatcttattcttattttttaaatgttttgattccagaccaagggtaaaaaacaaatacaacaaatatatagaccccacactccctctggtggaccttcactttcattaaccaaatgttttccaagaggctataagtcggcctggcactgtggctcgcacttataatcccagcactttgggaggccaaagtgttgaggtgttgacattacaggtgtgagacatcatgcctggtatatatatatactttttttttattcttaccttngttnggagtacggcttcttttttttttttttttttggaaatagagtctcgctcttttctgtcccc

SEQ ID NO: 337128 - DNA, 642 bp, Homo sapiens
ccaggctcaagtgatcctcccacctcagcctcccaagtagctgggactacaggtgtactccaccacacctggctaacttttgtacttttgtagagaggaggtttcaccatgtttcccaggctggtctcaaattcctgggctcaagcaatccacgtgccttggcctcccaaagtgctggcattacaggcgtgagtcactgcacctcgccacctttttctaagaagaaaaacagccttgattaagccttgattttgataacaaaaatgacagcaactccaaacaactacaatcacaattttcaatatcttttgactgattgttttagagaactaaaataaaatcttattcttattttttaaatgttttgattccagaccaagggtaaaaaacaaatacaacaaatatatagaccccacactccctctggtggaccttcactttcattaaccaaatgttttccaagaggctataagtcggcctggcactgtggctcgcacttataatcccagcactttgggaggccaaaggctgaggcgggtggatcacctgaggtcaggagttcgagaccagcctggccaacatggcaaaaccccgtctctactaaaaatacaaaaattagccggacatggtggcgcaggcctg

SEQ ID NO: 337129 - DNA, 452 bp, Homo sapiens
ctgcacatctggcagtggtgagtggccctcagtctccactgagggacactgagtgtctccagcatctcaataggaagcttcctgcagaccaactataatctattggcacccaagtggggagtttctatgggccagcttcaacccatgacaccctagtaaaagtcaccaacatccgaacatgtgacctcctgcagaccagctctggcccacaggacccagtgaagttctctgctcttcagcaggtagcagttgtgccctctccagtggggtcaaaaatctcagccattggtatgagctggtgcttttcaaacttttagctccttctctgggtattcttttttaccttaggagtataactgcccccaacatttgctgtgagtactttttagtctacttagtagtcaatcacattttaccagttaagaactttttctataaagttttccccattc

SEQ ID NO: 337130 - DNA, 709 bp, Homo sapiens
aggcagcgtttcactatgttgcccaggctggtcttgaacctggcctcaagtgatgctcccacctcaacctcccaaagtgctggtattgtatgtatgagccaccctgcttcgcctctgtttccttaagatcaagaaaaatgataaacctttagctagactaatgagaaaaagagacaaaattaccaacatcggggatgagagaattgacaacaccacaatttctgtagacatttctgataagatgccaaacctaaatggctacactgatgaattctttcaaagattaaaagaagacaatatcccaatattttacaaaagcttccaggaaataggaggggataatttccagctcaatgtttgagaccaacattaccctcatgccaaaataaggcagcatcatgacaagaaaactagacaatatttgccatgaagacagatgtaaacgttctaaacgagatttttttagcagtttgaatccagtgatgggtaaaagagaacacatatgaccaagtgaggtttatctcaagaatgcaaatttgggctaacattaaaaatcaattgtaattcgccatattaaacggactaacaggaaaattatgtgatcacctcaatagatgcagaaagagcatttgataaaacccaacattcattcttgataaaaactcagcaaagtaggaataaaagagaacgaaaaggacatcaaaaaccc

SEQ ID NO: 337131 - DNA, 770 bp, Homo sapiens
caggctgtacaagaagcatggtgccagtatctgcttctggtgagggcttcagactgcttctgctcatggtggaagtgccttaatatgtatgcctcatctctccgaagtggtggaccctgtttacctgctctggagaatggctgcctgtggcagacacaggagttgctctcacactgtgcttcctgtcttccatagtaactgagttgtagctgcgatgcagctactaaccaggaatagtttctcagccccacaccttgcacctacagctaagtgtggccatgttctcatcaacgaagtgcgaatagcaacaaagtgcaccaccttcaggttgaggctttgaagaagcaggggtacccttcccttgctctctttccccttctgctggtgggatatatataacaataaggccctgggtgatagtagccaccagatgcaaaacgcctcaaacctgagtcaccacatggaagagaagaagcctctgacctggaacacctagcctggtctatagatgaacaagaaataaacttctgttatgtttgaacattacagatttggttctgttatagcaagttagcttaccctgactaaactgttgcctgtctcttggaaggtgtgccctccttccctgaaagtgactttttcatacatgtaatttatattttaatccatattctccgaagcatatccacatctattcaactgtttccatgttttccaccaacagaaacctcatataaataaatatatatgaaggtttattgcattattca

SEQ ID NO: 337132 - DNA, 583 bp, Homo sapiens
  misc_feature (548)..(548): n is a, c, g, or t
caggctgtacaagaagcatggtgccagtatctgcttctggtgagggcttcagactgcttctgctcatggtggaagtgccttaatatgtatgcctcatctctccgaagtggtggaccctgtttacctgctctggagaatggctgcctgtggcagacacaggagttgctctcacactgtgcttcctgtcttccatagtaactgagttgtagctgcgatgcagctactaaccaggaatagtttctcagccccacaccttgcacctacagctaagtgtggccatgttctcatcaacgaagtgcgaatagcaacaaagtgcaccaccttcaggttgaggctttgaagaagcaggggtacccttcccttgctctctttccccttctgctggtgggatatatataacaataaggccctgggtgatagtagccaccagatgcaaaacgcctcaaacctgagtcaccacatggaagagaagaagcctctgacctggaacacctagcctggtctatagatgaacaagaaataaatcgagatgcgagaagacgtattanttcaaattcataatcaaaaaccgggatcacgggag

SEQ ID NO: 337133 - DNA, 740 bp, Homo sapiens
ggctcttccagaggcaagaccaaccaagatgagtgccctgggagctgtcattgccctcctgctctggggacagctttttgcagtggactcaggcaatgatgtcacggatatcgcagatgacggctgcccgaagccccccgagattgcacatggctatgtggagcactcggttcgctaccagtgtaagaactactacaaactgcgcacagaaggagatggagtgtacaccttaaacaatgggaagcagtggataaataaggctgttggagatatcaaagctctgtttgtgtctgaggaggagaaaaagctgactcggaaggaggtctacatcaagaatggggataagaaaggcagctgtgagagagatgctcaatatgccccaggctatgacaaagtcaaggacatctcagaggtggtcacccctcggttcctttgtactggaggagtgagtccctatgctgaccccaatacttgcagaggtgattctggcggccccttgatagttcacaagagaagtcgtttcattcaagttggtgtaatcagctggggagtagtggatgtctgcaaaaaccagaagcggcaaaagcaggtacctgctcacgcccgagactttcacatcaacctctttcaagtgctgccctggctgaaggagaaactccaagatgaggatttgggttttctataaggggtttcctgctggacaggggcgtgggattgaattaaaacagctgcgaacaaca

SEQ ID NO: 337134 - DNA, 531 bp, Homo sapiens
ccttctcagaccagcatgtggcccttaagtccacttgtaacactatacccatggttggggccctgaatgtgactcatagctggctgttcatctctcctgtgacccttcataaggaattcttcctaagccctgtgatcaactatctctaacccttcctcaacttgctcaccctgccatgtgtatccctgcctttagccagtttatcttccttatctcctaccctcatggtcctgtctcttctgcaggattgcacaacatgggcggggacccaattactgtcattgatgagatccgggacttgctatacattggcaaggatcgcaaaaacccaagggaggattatctggatgtctatgtgtttggggtcgggcctttggtgaaccaagtgaacatcaatgctttggcttccaagaaagacaatgagcaacatgtgttcaaagtcaaggatatggaaaacctggaagatgttttctaccaaatgatcggtagggagatacaagggaataaagaacacaactctcctcaggttcc

SEQ ID NO: 337135 - DNA, 1404 bp, Homo sapiens
ggccttgggggagggggaggccagaatgactccaagagctacaggaaggcaggtcagagaccccactggacaaacagtggctggactctgcaccataacacacaatcaacaggggagtgagctggatccttatttctggtccctaagtgggtggtttgggcttactggggaggagctaaggccggagaggaggtactgaaggggagagtcctggacctttggcagcaaagggtgggacttctgcagtttctgtttccttgactggcagctcagcggggccctcccgcttggatgttccgggaaagtgatgtgggtaggacaggcggggcgagccgcaggtgccagaacacagattgtataaaaggctgggggctggtggggagcaggggaagggaatgtgaccaggtctaggtctggagtttcagcttggacactgagccaagcagacaagcaaaactataggccaggtgacgatctggctaacctagtccccaggacctgggctaactacatcctgcccgatgcattcgcgcggagtatgaacaagacgcatggcctgcgaactgctatccatatttccctgaagagctggaatgcgacatgtgtaaacgaaagagattccgtccagcatctcgtagattggagaaaaggcccaaggccctcatgattagaggcgaactatccagcaagtaggatctgtatcgacagaactacttcggacaaagtcgagcagctcatcgcaattgggatcgagcgattacagagactcgaatttctgcaaggaagtgccagaagtatatccgaggcaaggtttgactaaggcccataatctcacttagaggtaaattctgttgaaatccggagcaggagtcagggcaaatttgccgattacgcatgcccaggggaagagcacacgcgaggccagaattcgatctgatcgaaagaacgatcgtacgtttggattagccggggaccattcgaagaaccccaatgtagtcaaacaacgagaacttttgttcggaaaagcatgtgaagacttatggaaaatcctcgccagagaactacgcgctaaagcgttcgcatcacttggagaacactacgtagctgcgacggcaagagcgacctttcattctctcacaccggaagttctattctaagaaaaccaattggaaattcggggcgattcttccgccgaattggtcgcgggcgagggggcactttttaccagggccactcctttatccttcagatggtaagatacaagaaatttctctccgataatatgagaatcggcgttgggtggcacaatagcttactggaattccgtagggagagccacttcttggattccttcgggttgacttgggcgtgctccaaatgccgttggtagcttgagctcccgag

SEQ ID NO: 337136 - DNA, 166 bp, Homo sapiens
gtgggattgaaaacccaaatcctcatcttggagtttctccttcagccagggcagcacttgaaaccctggctgaaggagaaactccaagatgaggatttgggttttctataaggggtttcctgctggacaggggcgtgggattgaattaaaacagctgcgaacaaca

SEQ ID NO: 337137 - DNA, 2893 bp, Homo sapiens
  misc_feature (171)..(171): n is a, c, g, or t
  misc_feature (173)..(173): n is a, c, g, or t
  misc_feature (325)..(325): n is a, c, g, or t
  misc_feature (363)..(363): n is a, c, g, or t
  misc_feature (387)..(387): n is a, c, g, or t
ggaccaaaggcaagctcttccttggcaaacaatcggctgagttccagacccagggatcactaatgcagaagcaagcatccaaactctgtttgcaaaggcttgtctagattacactgagagcattttaaagagtcattgccggctcgttcggcaagataggtactgacgggnanctggtctcaagggggttggtttgcagcttcacaagtagaggatgccaagctgccaagagcccatgaagacggtgaattgatgaaataagttaccttggactgggcaaaactaagggtgaaggtggcttcgggggtcgtggtgaaggcagagncgctttgaaggacgaggtggtggtagagaaggccgagnaggatttggtggcagaggccgggnaggctttggagggcgaggaagcttccgaggggaagggaatgtgaccaggtctaggtctggagtttcagcttggacactgagccaagcagacaagcaaagcaagccaggacacaccatcctgccccaggcccagcttctctcctgccttccaacgccatggggagcaatctcagcccccaactctgcctgatgccctttatcttgggcctcttgtctggaggtgtgaccaccactccatggtctttggcccggccccagggatcctgctctctggagggggtagagatcaaaggcggctccttccgacttctccaagagggccaggcactggagtacgtgtgtccttctggcttctacccgtaccctgtgcagacacgtacctgcagatctacggggtcctggagcaccctgaagactcaagaccaaaagactgtcaggaaggcagagtgcagagcaatccactgtccaagaccacacgacttcgagaacggggaatactggccccggtctccctactacaatgtgagtgatgagatctctttccactgctatgacggttacactctccggggctctgccaatcgcacctgccaagtgaatggccggtggagtgggcagacagcgatctgtgacaacggagcggggtactgctccaacccgggcatccccattggcacaaggaaggtgggcagccagtaccgccttgaagacagcgtcacctaccactgcagccgggggcttaccctgcgtggctcccagcggcgaacgtgtcaggaaggtggctcttggagcgggacggagccttcctgccaagactccttcatgtacgacacccctcaagaggtggccgaagctttcctgtcttccctgacagagaccatagaaggagtcgatgctgaggatgggcacggcccaggggaacaacagaagcggaagatcgtcctggacccttcaggctccatgaacatctacctggtgctagatggatcagacagcattggggccagcaacttcacaggagccaaaaagtgtctagtcaacttaattgagaaggtggcaagttatggtgtgaagccaagatatggtctagtgacatatgccacataccccaaaatttgggtcaaagtgtctgaagcagacagcagtaatgcagactgggtcacgaagcagctcaatgaaatcaattatgaagaccacaagttgaagtcagggactaacaccaagaaggccctccaggcagtgtacagcatgatgagctggccagatgacgtccctcctgaaggctggaaccgcacccgccatgtcatcatcctcatgactgatggattgcacaacatgggcggggacccaattactgtcattgatgagatccgggacttgctatacattggcaaggatcgcaaaaacccaagggaggattatctggatgtctatgtgtttggggtcgggcctttggtgaaccaagtgaacatcaatgctttggcttccaagaaagacaatgagcaacatgtgttcaaagtcaaggatatggaaaacctggaagatgttttctaccaaatgatcgatgaaagccagtctctgagtctctgtggcatggtttgggaacacaggaagggtaccgattaccacaagcaaccatggcaggccaagatctcagtcattcgcccttcaaagggacacgagagctgtatgggggctgtggtgtctgagtactttgtgctgacagcagcacattgtttcactgtggatgacaaggaacactcaatcaaggtcagcgtaggaggggagaagcgggacctggagatagaagtagtcctatttcaccccaactacaacattaatgggaaaaaagaagcaggaattcctgaattttatgactatgacgttgccctgatcaagctcaagaataagctgaaatatggccagactatcaggcccatttgtctcccctgcaccgagggaacaactcgagctttgaggcttcctccaactaccacttgccagcaacaaaaggaagagctgctccctgcacaggatatcaaagctctgtttgtgtctgaggaggagaaaaagctgactcggaaggaggtctacatcaagaatggggataagaaaggcagctgtgagagagatgctcaatatgccccaggctatgacaaagtcaaggacatctcagaggtggtcacccctcggttcctttgtactggaggagtgagtccctatgctgaccccaatacttgcagaggtgattctggcggccccttgatagttcacaagagaagtcgtttcattcaagttggtgtaatcagctggggagtagtggatgtctgcaaaaaccagaagcggcaaaagcaggtacctgctcacgcccgagactttcacatcaacctctttcaagtgctgccctggctgaaggagaaactccaagatgaggatttgggttttctataaggggtttcctgctggacaggggcgtgggattgaattaaaacagctgcgaacaaca

SEQ ID NO: 337138 - DNA, 2840 bp, Homo sapiens
  misc_feature (171)..(171): n is a, c, g, or t
  misc_feature (173)..(173): n is a, c, g, or t
  misc_feature (325)..(325): n is a, c, g, or t
  misc_feature (363)..(363): n is a, c, g, or t
  misc_feature (387)..(387): n is a, c, g, or t
ggaccaaaggcaagctcttccttggcaaacaatcggctgagttccagacccagggatcactaatgcagaagcaagcatccaaactctgtttgcaaaggcttgtctagattacactgagagcattttaaagagtcattgccggctcgttcggcaagataggtactgacgggnanctggtctcaagggggttggtttgcagcttcacaagtagaggatgccaagctgccaagagcccatgaagacggtgaattgatgaaataagttaccttggactgggcaaaactaagggtgaaggtggcttcgggggtcgtggtgaaggcagagncgctttgaaggacgaggtggtggtagagaaggccgagnaggatttggtggcagaggccgggnaggctttggagggcgaggaagcttccgaggggaagggaatgtgaccaggtctaggtctggagtttcagcttggacactgagccaagcagacaagcaaagcaagccaggacacaccatcctgccccaggcccagcttctctcctgccttccaacgccatggggagcaatctcagcccccaactctgcctgatgccctttatcttgggcctcttgtctggaggtgtgaccaccactccatggtctttggcccggccccagggatcctgctctctggagggggtagagatcaaaggcggctccttccgacttctccaagagggccaggcactggagtacgtgtgtccttctggcttctacccgtaccctgtgcagacacgtacctgcagatctacggggtcctggagcaccctgaagactcaagaccgacttcgagaacggggaatactggccccggtctccctactacaatgtgagtgatgagatctctttccactgctatgacggttacactctccggggctctgccaatcgcacctgccaagtgaatggccggtggagtgggcagacagcgatctgtgacaacggagcggggtactgctccaacccgggcatccccattggcacaaggaaggtgggcagccagtaccgccttgaagacagcgtcacctaccactgcagccgggggcttaccctgcgtggctcccagcggcgaacgtgtcaggaaggtggctcttggagcgggacggagccttcctgccaagactccttcatgtacgacacccctcaagaggtggccgaagctttcctgtcttccctgacagagaccatagaaggagtcgatgctgaggatgggcacggcccaggggaacaacagaagcggaagatcgtcctggacccttcaggctccatgaacatctacctggtgctagatggatcagacagcattggggccagcaacttcacaggagccaaaaagtgtctagtcaacttaattgagaaggtggcaagttatggtgtgaagccaagatatggtctagtgacatatgccacataccccaaaatttgggtcaaagtgtctgaagcagacagcagtaatgcagactgggtcacgaagcagctcaatgaaatcaattatgaagaccacaagttgaagtcagggactaacaccaagaaggccctccaggcagtgtacagcatgatgagctggccagatgacgtccctcctgaaggctggaaccgcacccgccatgtcatcatcctcatgactgatggattgcacaacatgggcggggacccaattactgtcattgatgagatccgggacttgctatacattggcaaggatcgcaaaaacccaagggaggattatctggatgtctatgtgtttggggtcgggcctttggtgaaccaagtgaacatcaatgctttggcttccaagaaagacaatgagcaacatgtgttcaaagtcaaggatatggaaaacctggaagatgttttctaccaaatgatcgatgaaagccagtctctgagtctctgtggcatggtttgggaacacaggaagggtaccgattaccacaagcaaccatggcaggccaagatctcagtcattcgcccttcaaagggacacgagagctgtatgggggctgtggtgtctgagtactttgtgctgacagcagcacattgtttcactgtggatgacaaggaacactcaatcaaggtcagcgtaggaggggagaagcgggacctggagatagaagtagtcctatttcaccccaactacaacattaatgggaaaaaagaagcaggaattcctgaattttatgactatgacgttgccctgatcaagctcaagaataagctgaaatatggccagactatcaggcccatttgtctcccctgcaccgagggaacaactcgagctttgaggcttcctccaactaccacttgccagcaacaaaaggaagagctgctccctgcacaggatatcaaagctctgtttgtgtctgaggaggagaaaaagctgactcggaaggaggtctacatcaagaatggggataagaaaggcagctgtgagagagatgctcaatatgccccaggctatgacaaagtcaaggacatctcagaggtggtcacccctcggttcctttgtactggaggagtgagtccctatgctgaccccaatacttgcagaggtgattctggcggccccttgatagttcacaagagaagtcgtttcattcaagttggtgtaatcagctggggagtagtggatgtctgcaaaaaccagaagcggcaaaagcaggtacctgctcacgcccgagactttcacatcaacctctttcaagtgctgccctggctgaaggagaaactccaagatgaggatttgggttttctataaggggtttcctgctggacaggggcgtgggattgaattaaaacagctgcgaacaaca

SEQ ID NO: 337139 - DNA, 2832 bp, Homo sapiens
  misc_feature (171)..(171): n is a, c, g, or t
  misc_feature (173)..(173): n is a, c, g, or t
  misc_feature (325)..(325): n is a, c, g, or t
  misc_feature (363)..(363): n is a, c, g, or t
  misc_feature (387)..(387): n is a, c, g, or t
ggaccaaaggcaagctcttccttggcaaacaatcggctgagttccagacccagggatcactaatgcagaagcaagcatccaaactctgtttgcaaaggcttgtctagattacactgagagcattttaaagagtcattgccggctcgttcggcaagataggtactgacgggnanctggtctcaagggggttggtttgcagcttcacaagtagaggatgccaagctgccaagagcccatgaagacggtgaattgatgaaataagttaccttggactgggcaaaactaagggtgaaggtggcttcgggggtcgtggtgaaggcagagncgctttgaaggacgaggtggtggtagagaaggccgagnaggatttggtggcagaggccgggnaggctttggagggcgaggaagcttccgaggggaagggaatgtgaccaggtctaggtctggagtttcagcttggacactgagccaagcagacaagcaaagcaagccaggacacaccatcctgccccaggcccagcttctctcctgccttccaacgccatggggagcaatctcagcccccaactctgcctgatgccctttatcttgggcctcttgtctggaggtgtgaccaccactccatggtctttggcccggccccagggatcctgctctctggagggggtagagatcaaaggcggctccttccgacttctccaagagggccaggcactggagtacgtgtgtccttctggcttctacccgtaccctgtgcagacacgtacctgcagatctacggggtcctggagcaccctgaagactcaagaccaaaagactgtcaggaaggcagagtgcagagcaatccactgtccaagaccacacgacttcgagaacggggaatactggccccggtctccctactacaatgtgagtgatgagatctctttccactgctatgacggttacactctccggggctctgccaatcgcacctgccaagtgaatggccggtggagtgggcagacagcgatctgtgacaacggagcggggtactgctccaacccgggcatccccattggcacaaggaaggtgggcagccagtaccgccttgaagacagcgtcacctaccactgcagccgggggcttaccctgcgtggctcccagcggcgaacgtgtcaggaaggtggctcttggagcgggacggagccttcctgccaagactccttcatgtacgacacccctcaagaggtggccgaagctttcctgtcttccctgacagagaccatagaaggagtcgatgctgaggatgggcacggcccaggggaacaacagaagcggaagatcgtcctggacccttcaggctccatgaacatctacctggtgctagatggatcagacagcattggggccagcaacttcacaggagccaaaaagtgtctagtcaacttaattgagaaggtggcaagttatggtgtgaagccaagatatggtctagtgacatatgccacataccccaaaatttgggtcaaagtgtctgaagcagacagcagtaatgcagactgggtcacgaagcagctcaatgaaatcaattatgaagaccacaagttgaagtcagggactaacaccaagaaggccctccaggcagtgtacagcatgatgagctggccagatgacgtccctcctgaaggctggaaccgcacccgccatgtcatcatcctcatgactgatggattgcacaacatgggcggggacccaattactgtcattgatgagatccgggacttgctatacattggcaaggatcgcaagtgaacatcaatgctttggcttccaagaaagacaatgagcaacatgtgttcaaagtcaaggatatggaaaacctggaagatgttttctaccaaatgatcgatgaaagccagtctctgagtctctgtggcatggtttgggaacacaggaagggtaccgattaccacaagcaaccatggcaggccaagatctcagtcattcgcccttcaaagggacacgagagctgtatgggggctgtggtgtctgagtactttgtgctgacagcagcacattgtttcactgtggatgacaaggaacactcaatcaaggtcagcgtaggaggggagaagcgggacctggagatagaagtagtcctatttcaccccaactacaacattaatgggaaaaaagaagcaggaattcctgaattttatgactatgacgttgccctgatcaagctcaagaataagctgaaatatggccagactatcaggcccatttgtctcccctgcaccgagggaacaactcgagctttgaggcttcctccaactaccacttgccagcaacaaaaggaagagctgctccctgcacaggatatcaaagctctgtttgtgtctgaggaggagaaaaagctgactcggaaggaggtctacatcaagaatggggataagaaaggcagctgtgagagagatgctcaatatgccccaggctatgacaaagtcaaggacatctcagaggtggtcacccctcggttcctttgtactggaggagtgagtccctatgctgaccccaatacttgcagaggtgattctggcggccccttgatagttcacaagagaagtcgtttcattcaagttggtgtaatcagctggggagtagtggatgtctgcaaaaaccagaagcggcaaaagcaggtacctgctcacgcccgagactttcacatcaacctctttcaagtgctgccctggctgaaggagaaactccaagatgaggatttgggttttctataaggggtttcctgctggacaggggcgtgggattgaattaaaacagctgcgaacaaca

SEQ ID NO: 337140 - DNA, 3108 bp, Homo sapiens
  misc_feature (171)..(171): n is a, c, g, or t
  misc_feature (173)..(173): n is a, c, g, or t
  misc_feature (325)..(325): n is a, c, g, or t
  misc_feature (363)..(363): n is a, c, g, or t
  misc_feature (387)..(387): n is a, c, g, or t
ggaccaaaggcaagctcttccttggcaaacaatcggctgagttccagacccagggatcactaatgcagaagcaagcatccaaactctgtttgcaaaggcttgtctagattacactgagagcattttaaagagtcattgccggctcgttcggcaagataggtactgacgggnanctggtctcaagggggttggtttgcagcttcacaagtagaggatgccaagctgccaagagcccatgaagacggtgaattgatgaaataagttaccttggactgggcaaaactaagggtgaaggtggcttcgggggtcgtggtgaaggcagagncgctttgaaggacgaggtggtggtagagaaggccgagnaggatttggtggcagaggccgggnaggctttggagggcgaggaagcttccgaggggaagggaatgtgaccaggtctaggtctggagtttcagcttggacactgagccaagcagacaagcaaagcaagccaggacacaccatcctgccccaggcccagcttctctcctgccttccaacgccatggggagcaatctcagcccccaactctgcctgatgccctttatcttgggcctcttgtctggaggtgtgaccaccactccatggtctttggcccggccccagggatcctgctctctggagggggtagagatcaaaggcggctccttccgacttctccaagagggccaggcactggagtacgtgtgtccttctggcttctacccgtaccctgtgcagacacgtacctgcagatctacggggtcctggagcaccctgaagactcaagaccaaaagactgtcaggaaggcagagtgcagagcaatccactgtccaagaccacacgacttcgagaacggggaatactggccccggtctccctactacaatgtgagtgatgagatctctttccactgctatgacggttacactctccggggctctgccaatcgcacctgccaagtgaatggccggtggagtgggcagacagcgatctgtgacaacggagcggggtactgctccaacccgggcatccccattggcacaaggaaggtgggcagccagtaccgccttgaagacagcgtcacctaccactgcagccgggggcttaccctgcgtggctcccagcggcgaacgtgtcaggaaggtggctcttggagcgggacggagccttcctgccaagactccttcatgtacgacacccctcaagaggtggccgaagctttcctgtcttccctgacagagaccatagaaggagtcgatgctgaggatgggcacggcccaggggaacaacagaagcggaagatcgtcctggacccttcaggctccatgaacatctacctggtgctagatggatcagacagcattggggccagcaacttcacaggagccaaaaagtgtctagtcaacttaattgagaaggtggcaagttatggtgtgaagccaagatatggtctagtgacatatgccacataccccaaaatttgggtcaaagtgtctgaagcagacagcagtaatgcagactgggtcacgaagcagctcaatgaaatcaattatgaagaccacaagttgaagtcagggactaacaccaagaaggccctccaggcagtgtacagcatgatgagctggccagatgacgtccctcctgaaggctggaaccgcacccgccatgtcatcatcctcatgactgatggattgcacaacatgggcggggacccaattactgtcattgatgagatccgggacttgctatacattggcaaggatcgcaaaaacccaagggaggattatctggatgtctatgtgtttggggtcgggcctttggtgaaccaagtgaacatcaatgctttggcttccaagaaagacaatgagcaacatgtgttcaaagtcaaggatatggaaaacctggaagatgttttctaccaaatgatcgatgaaagccagtctctgagtctctgtggcatggtttgggaacacaggaagggtaccgattaccacaagcaaccatggcaggccaagatctcagtcattcgcccttcaaagggacacgagagctgtatgggggctgtggtgtctgagtactttgtgctgacagcagcacattgtttcactgtggatgacaaggaacactcaatcaaggtcagcgtaggtaaggatgcaactgaaggtcctgggctgcacctatgctctccaggcaacacctcccactttctacagatcctacactccacccatcctcaatgcagccccattccttgcaccccagaccagtcagggatgggggaagacgtgaagttaggaatgacacggggccagaggcaggaagctgcccacaaagaggtggtacctactctcctacttcaggaggggagaagcgggacctggagatagaagtagtcctatttcaccccaactacaacattaatgggaaaaaagaagcaggaattcctgaattttatgactatgacgttgccctgatcaagctcaagaataagctgaaatatggccagactatcaggcccatttgtctcccctgcaccgagggaacaactcgagctttgaggcttcctccaactaccacttgccagcaacaaaaggaagagctgctccctgcacaggatatcaaagctctgtttgtgtctgaggaggagaaaaagctgactcggaaggaggtctacatcaagaatggggataagaaaggcagctgtgagagagatgctcaatatgccccaggctatgacaaagtcaaggacatctcagaggtggtcacccctcggttcctttgtactggaggagtgagtccctatgctgaccccaatacttgcagaggtgattctggcggccccttgatagttcacaagagaagtcgtttcattcaagttggtgtaatcagctggggagtagtggatgtctgcaaaaaccagaagcggcaaaagcaggtacctgctcacgcccgagactttcacatcaacctctttcaagtgctgccctggctgaaggagaaactccaagatgaggatttgggttttctataaggggtttcctgctggacaggggcgtgggattgaattaaaacagctgcgaacaaca

SEQ ID NO: 337141 - DNA, 1121 bp, Homo sapiens
tagaggactccccacacaagtgaaacaaggaggatatctggatgtctatgtgtttggggtcgggcctttggtgaaccaagtgaacatcaatgctttggcttccaagaaagacaatgagcaacatgtgttcaaagtcaaggatatggaaaacctggaagatgttttctaccaaatgatcgatgaaagccagtctctgagtctctgtggcatggtttgggaacacaggaagggtaccgattaccacaagcaaccatggcaggccaagatctcagtcattcgcccttcaaagggacacgagagctgtatgggggctgtggtgtctgagtactttgtgctgacagcagcacattgtttcactgtggatgacaaggaacactcaatcaaggtcagcgtaggaggggagaagcgggacctggagatagaagtagtcctatttcaccccaactacaacattaatgggaaaaaagaagcaggaattcctgaattttatgactatgacgttgccctgatcaagctcaagaataagctgaaatatggccagactatcaggcccatttgtctcccctgcaccgagggaacaactcgagctttgaggcttcctccaactaccacttgccagcaacaaaaggaagagctgctccctgcacaggatatcaaagctctgtttgtgtctgaggaggagaaaaagctgactcggaaggaggtctacatcaagaatggggataagaaaggcagctgtgagagagatgctcaatatgccccaggctatgacaaagtcaaggacatctcagaggtggtcacccctcggttcctttgtactggaggagtgagtccctatgctgaccccaatacttgcagaggtgattctggcggccccttgatagttcacaagagaagtcgtttcattcaagttggtgtaatcagctggggagtagtggatgtctgcaaaaaccagaagcggcaaaagcaggtacctgctcacgcccgagactttcacatcaacctctttcaagtgctgccctggctgaaggagaaactccaagatgaggatttgggttttctataaggggtttcctgctggacaggggcgtgggattgaattaaaacagctgcgaacaaca

SEQ ID NO: 337142 - DNA, 1170 bp, Homo sapiens
gaataatttgggaggcgaattgaagtccgggccaggaacaatggtaattgtgggagactcaacaaagagtgagtacagctgaaggagccggggagcagaaagtatgtgtcaggtgtgaggaagaaaatagatttgggaagttatgagaactgtagagagtgagttgagcatagttggtgattttgagggcctctaaaagtattaaagcagcggtagccgttgcacgcagacgtgagggctaggctaaaacagtagggtcaagttgttggcacaggaagggtaccgattaccacaagcaaccatggcaggccaagatctcagtcattcgcccttcaaagggacacgagagctgtatgggggctgtggtgtctgagtactttgtgctgacagcagcacattgtttcactgtggatgacaaggaacactcaatcaaggtcagcgtaggaggggagaagcgggacctggagatagaagtagtcctatttcaccccaactacaacattaatgggaaaaaagaagcaggaattcctgaattttatgactatgacgttgccctgatcaagctcaagaataagctgaaatatggccagactatcaggcccatttgtctcccctgcaccgagggaacaactcgagctttgaggcttcctccaactaccacttgccagcaacaaaaggaagagctgctccctgcacaggatatcaaagctctgtttgtgtctgaggaggagaaaaagctgactcggaaggaggtctacatcaagaatggggataagaaaggcagctgtgagagagatgctcaatatgccccaggctatgacaaagtcaaggacatctcagaggtggtcacccctcggttcctttgtactggaggagtgagtccctatgctgaccccaatacttgcagaggtgattctggcggccccttgatagttcacaagagaagtcgtttcattcaagttggtgtaatcagctggggagtagtggatgtctgcaaaaaccagaagcggcaaaagcaggtacctgctcacgcccgagactttcacatcaacctctttcaagtgctgccctggctgaaggagaaactccaagatgaggatttgggttttctataaggggtttcctgctggacaggggcgtgggattgaattaaaacagctgcgaacaaca

SEQ ID NO: 337143 - DNA, 2935 bp, Homo sapiens
  misc_feature (171)..(171): n is a, c, g, or t
  misc_feature (173)..(173): n is a, c, g, or t
  misc_feature (325)..(325): n is a, c, g, or t
  misc_feature (363)..(363): n is a, c, g, or t
  misc_feature (387)..(387): n is a, c, g, or t
  misc_feature (2898)..(2898): n is a, c, g, or t
  misc_feature (2901)..(2901): n is a, c, g, or t
ggaccaaaggcaagctcttccttggcaaacaatcggctgagttccagacccagggatcactaatgcagaagcaagcatccaaactctgtttgcaaaggcttgtctagattacactgagagcattttaaagagtcattgccggctcgttcggcaagataggtactgacgggnanctggtctcaagggggttggtttgcagcttcacaagtagaggatgccaagctgccaagagcccatgaagacggtgaattgatgaaataagttaccttggactgggcaaaactaagggtgaaggtggcttcgggggtcgtggtgaaggcagagncgctttgaaggacgaggtggtggtagagaaggccgagnaggatttggtggcagaggccgggnaggctttggagggcgaggaagcttccgaggggaagggaatgtgaccaggtctaggtctggagtttcagcttggacactgagccaagcagacaagcaaagcaagccaggacacaccatcctgccccaggcccagcttctctcctgccttccaacgccatggggagcaatctcagcccccaactctgcctgatgccctttatcttgggcctcttgtctggaggtgtgaccaccactccatggtctttggcccggccccagggatcctgctctctggagggggtagagatcaaaggcggctccttccgacttctccaagagggccaggcactggagtacgtgtgtccttctggcttctacccgtaccctgtgcagacacgtacctgcagatctacggggtcctggagcaccctgaagactcaagaccaaaagactgtcaggaaggcagagtgcagagcaatccactgtccaagaccacacgacttcgagaacggggaatactggccccggtctccctactacaatgtgagtgatgagatctctttccactgctatgacggttacactctccggggctctgccaatcgcacctgccaagtgaatggccggtggagtgggcagacagcgatctgtgacaacggagcggggtactgctccaacccgggcatccccattggcacaaggaaggtgggcagccagtaccgccttgaagacagcgtcacctaccactgcagccgggggcttaccctgcgtggctcccagcggcgaacgtgtcaggaaggtggctcttggagcgggacggagccttcctgccaagactccttcatgtacgacacccctcaagaggtggccgaagctttcctgtcttccctgacagagaccatagaaggagtcgatgctgaggatgggcacggcccaggggaacaacagaagcggaagatcgtcctggacccttcaggctccatgaacatctacctggtgctagatggatcagacagcattggggccagcaacttcacaggagccaaaaagtgtctagtcaacttaattgagaaggtggcaagttatggtgtgaagccaagatatggtctagtgacatatgccacataccccaaaatttgggtcaaagtgtctgaagcagacagcagtaatgcagactgggtcacgaagcagctcaatgaaatcaattatgaagaccacaagttgaagtcagggactaacaccaagaaggccctccaggcagtgtacagcatgatgagctggccagatgacgtccctcctgaaggctggaaccgcacccgccatgtcatcatcctcatgactgatggattgcacaacatgggcggggacccaattactgtcattgatgagatccgggacttgctatacattggcaaggatcgcaaaaacccaagggaggattatctggatgtctatgtgtttggggtcgggcctttggtgaaccaagtgaacatcaatgctttggcttccaagaaagacaatgagcaacatgtgttcaaagtcaaggatatggaaaacctggaagatgttttctaccaaatgatcgatgaaagccagtctctgagtctctgtggcatggtttgggaacacaggaagggtaccgattaccacaagcaaccatggcaggccaagatctcagtcattcgcccttcaaagggacacgagagctgtatgggggctgtggtgtctgagtactttgtgctgacagcagcacattgtttcactgtggatgacaaggaacactcaatcaaggtcagcgtaggaggggagaagcgggacctggagatagaagtagtcctatttcaccccaactacaacattaatgggaaaaaagaagcaggaattcctgaattttatgactatgacgttgccctgatcaagctcaagaataagctgaaatatggccagactatcaggcccatttgtctcccctgcaccgagggaacaactcgagctttgaggcttcctccaactaccacttgccagcaacaaaaggaagagctgctccctgcacaggatatcaaagctctgtttgtgtctgaggaggagaaaaagctgactcggaaggaggtctacatcaagaatggggataagaaaggcagctgtgagagagatgctcaatatgccccaggctatgacaaagtcaaggacatctcagaggtggtcacccctcggttcctttgtactggaggagtgagtccctatgctgaccccaatacttgcagaggtgattctggcggccccttgatagttcacaagagaagtcgtttcattcaagttggtgtaatcagctggggagtagtggatgtctgcaaaaaccagaagcggcaaaagcaggtacctgctcacgcccgagactttcacatcaacctctttcaagtgctgccctggctgaaggagaaactccaagatgaggatttgggttttctataaggggtttcctgctggacaggggcgtgggattgaattaaaacagctgcgaacaacaacacnccncaacaaaaccttgcagcccccttcggaccccgaa

SEQ ID NO: 337144 - DNA, 3155 bp, Homo sapiens
  misc_feature (171)..(171): n is a, c, g, or t
  misc_feature (173)..(173): n is a, c, g, or t
  misc_feature (325)..(325): n is a, c, g, or t
  misc_feature (363)..(363): n is a, c, g, or t
  misc_feature (387)..(387): n is a, c, g, or t
  misc_feature (3079)..(3079): n is a, c, g, or t
  misc_feature (3090)..(3090): n is a, c, g, or t
  misc_feature (3130)..(3130): n is a, c, g, or t
  misc_feature (3135)..(3135): n is a, c, g, or t
ggaccaaaggcaagctcttccttggcaaacaatcggctgagttccagacccagggatcactaatgcagaagcaagcatccaaactctgtttgcaaaggcttgtctagattacactgagagcattttaaagagtcattgccggctcgttcggcaagataggtactgacgggnanctggtctcaagggggttggtttgcagcttcacaagtagaggatgccaagctgccaagagcccatgaagacggtgaattgatgaaataagttaccttggactgggcaaaactaagggtgaaggtggcttcgggggtcgtggtgaaggcagagncgctttgaaggacgaggtggtggtagagaaggccgagnaggatttggtggcagaggccgggnaggctttggagggcgaggaagcttccgaggggaagggaatgtgaccaggtctaggtctggagtttcagcttggacactgagccaagcagacaagcaaagcaagccaggacacaccatcctgccccaggcccagcttctctcctgccttccaacgccatggggagcaatctcagcccccaactctgcctgatgccctttatcttgggcctcttgtctggaggtgtgaccaccactccatggtctttggcccggccccagggatcctgctctctggagggggtagagatcaaaggcggctccttccgacttctccaagagggccaggcactggagtacgtgtgtccttctggcttctacccgtaccctgtgcagacacgtacctgcagatctacggggtcctggagcaccctgaagactcaagaccaaaagactgtcaggaaggcagagtgcagagcaatccactgtccaagaccacacgacttcgagaacggggaatactggccccggtctccctactacaatgtgagtgatgagatctctttccactgctatgacggttacactctccggggctctgccaatcgcacctgccaagtgaatggccggtggagtgggcagacagcgatctgtgacaacggagcggggtactgctccaacccgggcatccccattggcacaaggaaggtgggcagccagtaccgccttgaagacagcgtcacctaccactgcagccgggggcttaccctgcgtggctcccagcggcgaacgtgtcaggaaggtggctcttggagcgggacggagccttcctgccaagactccttcatgtacgacacccctcaagaggtggccgaagctttcctgtcttccctgacagagaccatagaaggagtcgatgctgaggatgggcacggcccaggggaacaacagaagcggaagatcgtcctggacccttcaggctccatgaacatctacctggtgctagatggatcagacagcattggggccagcaacttcacaggagccaaaaagtgtctagtcaacttaattgagaaggtggcaagttatggtgtgaagccaagatatggtctagtgacatatgccacataccccaaaatttgggtcaaagtgtctgaagcagacagcagtaatgcagactgggtcacgaagcagctcaatgaaatcaattatgaagaccacaagttgaagtcagggactaacaccaagaaggccctccaggcagtgtacagcatgatgagctggccagatgacgtccctcctgaaggctggaaccgcacccgccatgtcatcatcctcatgactgatggattgcacaacatgggcggggacccaattactgtcattgatgagatccgggacttgctatacattggcaaggatcgcaaaaacccaagggaggattatctggatgtctatgtgtttggggtcgggcctttggtgaaccaagtgaacatcaatgctttggcttccaagaaagacaatgagcaacatgtgttcaaagtcaaggatatggaaaacctggaagatgttttctaccaaatgatcgatgaaagccagtctctgagtctctgtggcatggtttgggaacacaggaagggtaccgattaccacaagcaaccatggcaggccaagatctcagtcattcgcccttcaaagggacacgagagctgtatgggggctgtggtgtctgagtactttgtgctgacagcagcacattgtttcactgtggatgacaaggaacactcaatcaaggtcagcgtaggaggggagaagcgggacctggagatagaagtagtcctatttcaccccaactacaacattaatgggaaaaaagaagcaggaattcctgaattttatgactatgacgttgccctgatcaagctcaagaataagctgaaatatggccagactatcaggcccatttgtctcccctgcaccgagggaacaactcgagctttgaggcttcctccaactaccacttgccagcaacaaaaggaagagctgctccctgcacaggatatcaaagctctgtttgtgtctgaggaggagaaaaagctgactcggaaggaggtctacatcaagaatggggataagaaaggcagctgtgagagagatgctcaatatgccccaggctatgacaaagtcaaggacatctcagaggtggtcacccctcggttcctttgtactggaggagtgagtccctatgctgaccccaatacttgcagaggtgattctggcggccccttgatagttcacaagagaagtcgtttcattcaagttggtgtaatcagctggggagtagtggatgtctgcaaaaaccagaagcggcaaaagcaggtacctgctcacgcccgagactttcacatcaacctctttcaagtgctgccctggctgaaggagaaactccaagatgaggatttgggttttctataaggggtttcctgctggacaggggcgtgggattgaattaaaacagctgcgaacaacaaaaaaaaaaaaaaaaactcgagttttttttttttttttttgggtttaacagtttattaggatttataagtgtcattttaaaaacagtcgatttaaaccatgtagaaataagtatgcaaaaagtctgcaaaaccatactttaaacatgtttaagtagatagattatctgaaattctgatttctcagncacttcattgntatgctatggcagccaagtatccttaacttcagttggagngcctncttccacttcatttgagttc

SEQ ID NO: 337145 - DNA, 3092 bp, Homo sapiens
  misc_feature (171)..(171): n is a, c, g, or t
  misc_feature (173)..(173): n is a, c, g, or t
  misc_feature (325)..(325): n is a, c, g, or t
  misc_feature (363)..(363): n is a, c, g, or t
  misc_feature (387)..(387): n is a, c, g, or t
ggaccaaaggcaagctcttccttggcaaacaatcggctgagttccagacccagggatcactaatgcagaagcaagcatccaaactctgtttgcaaaggcttgtctagattacactgagagcattttaaagagtcattgccggctcgttcggcaagataggtactgacgggnanctggtctcaagggggttggtttgcagcttcacaagtagaggatgccaagctgccaagagcccatgaagacggtgaattgatgaaataagttaccttggactgggcaaaactaagggtgaaggtggcttcgggggtcgtggtgaaggcagagncgctttgaaggacgaggtggtggtagagaaggccgagnaggatttggtggcagaggccgggnaggctttggagggcgaggaagcttccgaggggaagggaatgtgaccaggtctaggtctggagtttcagcttggacactgagccaagcagacaagcaaagcaagccaggacacaccatcctgccccaggcccagcttctctcctgccttccaacgccatggggagcaatctcagcccccaactctgcctgatgccctttatcttgggcctcttgtctggaggtgtgaccaccactccatggtctttggcccggccccagggatcctgctctctggagggggtagagatcaaaggcggctccttccgacttctccaagagggccaggcactggagtacgtgtgtccttctggcttctacccgtaccctgtgcagacacgtacctgcagatctacggggtcctggagcaccctgaagactcaagaccaaaagactgtcaggaaggcagagtgcagagcaatccactgtccaagaccacacgacttcgagaacggggaatactggccccggtctccctactacaatgtgagtgatgagatctctttccactgctatgacggttacactctccggggctctgccaatcgcacctgccaagtgaatggccggtggagtgggcagacagcgatctgtgacaacggagcggggtactgctccaacccgggcatccccattggcacaaggaaggtgggcagccagtaccgccttgaagacagcgtcacctaccactgcagccgggggcttaccctgcgtggctcccagcggcgaacgtgtcaggaaggtggctcttggagcgggacggagccttcctgccaagactccttcatgtacgacacccctcaagaggtggccgaagctttcctgtcttccctgacagagaccatagaaggagtcgatgctgaggatgggcacggcccaggggaacaacagaagcggaagatcgtcctggacccttcaggctccatgaacatctacctggtgctagatggatcagacagcattggggccagcaacttcacaggagccaaaaagtgtctagtcaacttaattgagaaggtggcaagttatggtgtgaagccaagatatggtctagtgacatatgccacataccccaaaatttgggtcaaagtgtctgaagcagacagcagtaatgcagactgggtcacgaagcagctcaatgaaatcaattatgaagaccacaagttgaagtcagggactaacaccaagaaggccctccaggcagtgtacagcatgatgagctggccagatgacgtccctcctgaaggctggaaccgcacccgccatgtcatcatcctcatgactgatggattgcacaacatgggcggggacccaattactgtcattgatgagatccgggacttgctatacattggcaaggatcgcaaaaacccaagggaggattatctggatgtctatgtgtttggggtcgggcctttggtgaaccaagtgaacatcaatgctttggcttccaagaaagacaatgagcaacatgtgttcaaagtcaaggatatggaaaacctggaagatgttttctaccaaatgatcgatgaaagccagtctctgagtctctgtggcatggtttgggaacacaggaagggtaccgattaccacaagcaaccatggcaggccaagatctcagtcattcgcccttcaaagggacacgagagctgtatgggggctgtggtgtctgagtactttgtgctgacagcagcacattgtttcactgtggatgacaaggaacactcaatcaaggtcagcgtaggaggggagaagcgggacctggagatagaagtagtcctatttcaccccaactacaacattaatgggaaaaaagaagcaggaattcctgaattttatgactatgacgttgccctgatcaagctcaagaataagctgaaatatggccagactatcaggcccatttgtctcccctgcaccgagggaacaactcgagctttgaggcttcctccaactaccacttgccagcaacaaagtaagacatacttggcaagaggataaggatgagatcccaagagacaagtggggcatgagagggaggtgcaataggaagagatgatgcctggcccagaacctagctctagaagggcttaggggacatctactgagtgacaaaggcaatggggagatgacagtggtgggagcagctgaagtgacgcagtctattcgtccagaggaagagctgctccctgcacaggatatcaaagctctgtttgtgtctgaggaggagaaaaagctgactcggaaggaggtctacatcaagaatggggataagaaaggcagctgtgagagagatgctcaatatgccccaggctatgacaaagtcaaggacatctcagaggtggtcacccctcggttcctttgtactggaggagtgagtccctatgctgaccccaatacttgcagaggtgattctggcggccccttgatagttcacaagagaagtcgtttcattcaagttggtgtaatcagctggggagtagtggatgtctgcaaaaaccagaagcggcaaaagcaggtacctgctcacgcccgagactttcacatcaacctctttcaagtgctgccctggctgaaggagaaactccaagatgaggatttgggttttctataaggggtttcctgctggacaggggcgtgggattgaattaaaacagctgcgaacaaca

SEQ ID NO: 337146 - DNA, 3165 bp, Homo sapiens
  misc_feature (171)..(171): n is a, c, g, or t
  misc_feature (173)..(173): n is a, c, g, or t
  misc_feature (325)..(325): n is a, c, g, or t
  misc_feature (363)..(363): n is a, c, g, or t
  misc_feature (387)..(387): n is a, c, g, or t
ggaccaaaggcaagctcttccttggcaaacaatcggctgagttccagacccagggatcactaatgcagaagcaagcatccaaactctgtttgcaaaggcttgtctagattacactgagagcattttaaagagtcattgccggctcgttcggcaagataggtactgacgggnanctggtctcaagggggttggtttgcagcttcacaagtagaggatgccaagctgccaagagcccatgaagacggtgaattgatgaaataagttaccttggactgggcaaaactaagggtgaaggtggcttcgggggtcgtggtgaaggcagagncgctttgaaggacgaggtggtggtagagaaggccgagnaggatttggtggcagaggccgggnaggctttggagggcgaggaagcttccgaggggaagggaatgtgaccaggtctaggtctggagtttcagcttggacactgagccaagcagacaagcaaagcaagccaggacacaccatcctgccccaggcccagcttctctcctgccttccaacgccatggggagcaatctcagcccccaactctgcctgatgccctttatcttgggcctcttgtctggaggtgtgaccaccactccatggtctttggcccggccccagggatcctgctctctggagggggtagagatcaaaggcggctccttccgacttctccaagagggccaggcactggagtacgtgtgtccttctggcttctacccgtaccctgtgcagacacgtacctgcagatctacggggtcctggagcaccctgaagactcaagaccaaaagactgtcaggaaggcagagtgcagagcaatccactgtccaagaccacacgacttcgagaacggggaatactggccccggtctccctactacaatgtgagtgatgagatctctttccactgctatgacggttacactctccggggctctgccaatcgcacctgccaagtgaatggccggtggagtgggcagacagcgatctgtgacaacggagcggggtactgctccaacccgggcatccccattggcacaaggaaggtgggcagccagtaccgccttgaagacagcgtcacctaccactgcagccgggggcttaccctgcgtggctcccagcggcgaacgtgtcaggaaggtggctcttggagcgggacggagccttcctgccaagactccttcatgtacgacacccctcaagaggtggccgaagctttcctgtcttccctgacagagaccatagaaggagtcgatgctgaggatgggcacggcccaggggaacaacagaagcggaagatcgtcctggacccttcaggctccatgaacatctacctggtgctagatggatcagacagcattggggccagcaacttcacaggagccaaaaagtgtctagtcaacttaattgagaaggtggcaagttatggtgtgaagccaagatatggtctagtgacatatgccacataccccaaaatttgggtcaaagtgtctgaagcagacagcagtaatgcagactgggtcacgaagcagctcaatgaaatcaattatgaagaccacaagttgaagtcagggactaacaccaagaaggccctccaggcagtgtacagcatgatgagctggccagatgacgtccctcctgaaggctggaaccgcacccgccatgtcatcatcctcatgactgatggattgcacaacatgggcggggacccaattactgtcattgatgagatccgggacttgctatacattggcaaggatcgcaaaaacccaagggaggattatctggatgtctatgtgtttggggtcgggcctttggtgaaccaagtgaacatcaatgctttggcttccaagaaagacaatgagcaacatgtgttcaaagtcaaggatatggaaaacctggaagatgttttctaccaaatgatcgatgaaagccagtctctgagtctctgtggcatggtttgggaacacaggaagggtaccgattaccacaagcaaccatggcaggccaagatctcagtcattcgcccttcaaagggacacgagagctgtatgggggctgtggtgtctgagtactttgtgctgacagcagcacattgtttcactgtggatgacaaggaacactcaatcaaggtcagcgtaggaggggagaagcgggacctggagatagaagtagtcctatttcaccccaactacaacattaatgggaaaaaagaagcaggaattcctgaattttatgactatgacgttgccctgatcaagctcaagaataagctgaaatatggccagactatcaggcccatttgtctcccctgcaccgagggaacaactcgagctttgaggcttcctccaactaccacttgccagcaacaaaaggaagagctgctccctgcacaggatatcaaagctctgtttgtgtctgaggaggagaaaaagctgactcggaaggaggtctacatcaagaatggggataagaaaggcagctgtgagagagatgctcaatatgccccaggctatgacaaagtcaaggacatctcagaggtggtcacccctcggttcctttgtactggaggagtgagtccctatgctgaccccaatacttgcagaggtgattctggcggccccttgatagttcacaagagaagtcgtttcattcaagttggtgtaatcagctggggagtagtggatgtctgcaaaaaccagaagcggcaaaagcaggtacctgctcacgcccgagactttcacatcaacctctttcaagtgctgtctataaggggtttcctgctggacaggggcgtgggattgaattaaaacagctgcgaacaacaaaaaaaaaaaaaaaaactcgagttttttttttttttttgtgtggctcaataaacttttattgttttgttatttatttttattcaaaagaatttgtttccctatcacaaaaattagataacaccaccaagagcagcaatgtccatggagttacattgatggtggagagttggctgggtattcccaatgtcccaaaggtcataaaggagggaaaagaaaaaaagaaaaaaatattcaaaacaaatccaaaacccatgatgactttggggagagacatcacatgacattttctgtttcttctctcattgtcagctg

SEQ ID NO: 337147 - DNA, 3163 bp, Homo sapiens
  misc_feature (171)..(171): n is a, c, g, or t
  misc_feature (173)..(173): n is a, c, g, or t
  misc_feature (325)..(325): n is a, c, g, or t
  misc_feature (363)..(363): n is a, c, g, or t
  misc_feature (387)..(387): n is a, c, g, or t
ggaccaaaggcaagctcttccttggcaaacaatcggctgagttccagacccagggatcactaatgcagaagcaagcatccaaactctgtttgcaaaggcttgtctagattacactgagagcattttaaagagtcattgccggctcgttcggcaagataggtactgacgggnanctggtctcaagggggttggtttgcagcttcacaagtagaggatgccaagctgccaagagcccatgaagacggtgaattgatgaaataagttaccttggactgggcaaaactaagggtgaaggtggcttcgggggtcgtggtgaaggcagagncgctttgaaggacgaggtggtggtagagaaggccgagnaggatttggtggcagaggccgggnaggctttggagggcgaggaagcttccgaggggaagggaatgtgaccaggtctaggtctggagtttcagcttggacactgagccaagcagacaagcaaagcaagccaggacacaccatcctgccccaggcccagcttctctcctgccttccaacgccatggggagcaatctcagcccccaactctgcctgatgccctttatcttgggcctcttgtctggaggtgtgaccaccactccatggtctttggcccggccccagggatcctgctctctggagggggtagagatcaaaggcggctccttccgacttctccaagagggccaggcactggagtacgtgtgtccttctggcttctacccgtaccctgtgcagacacgtacctgcagatctacggggtcctggagcaccctgaagactcaagaccaaaagactgtcaggaaggcagagtgcagagcaatccactgtccaagaccacacgacttcgagaacggggaatactggccccggtctccctactacaatgtgagtgatgagatctctttccactgctatgacggttacactctccggggctctgccaatcgcacctgccaagtgaatggccggtggagtgggcagacagcgatctgtgacaacggagcggggtactgctccaacccgggcatccccattggcacaaggaaggtgggcagccagtaccgccttgaagacagcgtcacctaccactgcagccgggggcttaccctgcgtggctcccagcggcgaacgtgtcaggaaggtggctcttggagcgggacggagccttcctgccaagactccttcatgtacgacacccctcaagaggtggccgaagctttcctgtcttccctgacagagaccatagaaggagtcgatgctgaggatgggcacggcccaggggaacaacagaagcggaagatcgtcctggacccttcaggctccatgaacatctacctggtgctagatggatcagacagcattggggccagcaacttcacaggagccaaaaagtgtctagtcaacttaattgagaaggtggcaagttatggtgtgaagccaagatatggtctagtgacatatgccacataccccaaaatttgggtcaaagtgtctgaagcagacagcagtaatgcagactgggtcacgaagcagctcaatgaaatcaattatgaagaccacaagttgaagtcagggactaacaccaagaaggccctccaggcagtgtacagcatgatgagctggccagatgacgtccctcctgaaggctggaaccgcacccgccatgtcatcatcctcatgactgatggattgcacaacatgggcggggacccaattactgtcattgatgagatccgggacttgctatacattggcaaggatcgcaaaaacccaagggaggattatctggatgtctatgtgtttggggtcgggcctttggtgaaccaagtgaacatcaatgctttggcttccaagaaagacaatgagcaacatgtgttcaaagtcaaggatatggaaaacctggaagatgttttctaccaaatgatcgatgaaagccagtctctgagtctctgtggcatggtttgggaacacaggaagggtaccgattaccacaagcaaccatggcaggccaagatctcagtcattcgcccttcaaagggacacgagagctgtatgggggctgtggtgtctgagtactttgtgctgacagcagcacattgtttcactgtggatgacaaggaacactcaatcaaggtcagcgtaggaggggagaagcgggacctggagatagaagtagtcctatttcaccccaactacaacattaatgggaaaaaagaagcaggaattcctgaattttatgactatgacgttgccctgatcaagctcaagaataagctgaaatatggccagactatcaggcccatttgtctcccctgcaccgagggaacaactcgagctttgaggcttcctccaactaccacttgccagcaacaaaaggaagagctgctccctgcacaggatatcaaagctctgtttgtgtctgaggaggagaaaaagctgactcggaaggaggtctacatcaagaatggggataagaaaggcagctgtgagagagatgctcaatatgccccaggctatgacaaagtcaaggacatctcagaggtggtcacccctcggttcctttgtactggaggagtgagtccctatgctgaccccaatacttgcagaggtgattctggcggccccttgatagttcacaagagaagtcgtttcattcaagtgagtcctccctttcctatctggggagatgccaagtggtcagcatgggccccaaagcaggaaagctcaatgcatgtggctagtaattcgaggtaggcagagcctgcctcaccttaggaccgcatgtcttgcctgcgtgtgtcaagaacgaggctgagctgggtccctagtctgattcctttaggtcagctaagacacaagcaggaacagccatgcttccaggattaggaattctactgaatgatccatggcaccccactgcctctgcaggttggtgtaatcagctggggagtagtggatgtctgcaaaaaccagaagcggcaaaagcaggtacctgctcacgcccgagactttcacatcaacctctttcaagtgctgccctggctgaaggagaaactccaagatgaggatttgggttttctataaggggtttcctgctggacaggggcgtgggattgaattaaaacagctgcgaacaaca

SEQ ID NO: 337148 - DNA, 3188 bp, Homo sapiens
  misc_feature (171)..(171): n is a, c, g, or t
  misc_feature (173)..(173): n is a, c, g, or t
  misc_feature (325)..(325): n is a, c, g, or t
  misc_feature (363)..(363): n is a, c, g, or t
  misc_feature (387)..(387): n is a, c, g, or t
ggaccaaaggcaagctcttccttggcaaacaatcggctgagttccagacccagggatcactaatgcagaagcaagcatccaaactctgtttgcaaaggcttgtctagattacactgagagcattttaaagagtcattgccggctcgttcggcaagataggtactgacgggnanctggtctcaagggggttggtttgcagcttcacaagtagaggatgccaagctgccaagagcccatgaagacggtgaattgatgaaataagttaccttggactgggcaaaactaagggtgaaggtggcttcgggggtcgtggtgaaggcagagncgctttgaaggacgaggtggtggtagagaaggccgagnaggatttggtggcagaggccgggnaggctttggagggcgaggaagcttccgaggggaagggaatgtgaccaggtctaggtctggagtttcagcttggacactgagccaagcagacaagcaaagcaagccaggacacaccatcctgccccaggcccagcttctctcctgccttccaacgccatggggagcaatctcagcccccaactctgcctgatgccctttatcttgggcctcttgtctggaggtgtgaccaccactccatggtctttggcccggccccagggatcctgctctctggagggggtagagatcaaaggcggctccttccgacttctccaagagggccaggcactggagtacgtgtgtccttctggcttctacccgtaccctgtgcagacacgtacctgcagatctacggggtcctggagcaccctgaagactcaagaccaaaagactgtcaggaaggcagagtgcagagcaatccactgtccaagaccacacgacttcgagaacggggaatactggccccggtctccctactacaatgtgagtgatgagatctctttccactgctatgacggttacactctccggggctctgccaatcgcacctgccaagtgaatggccggtggagtgggcagacagcgatctgtgacaacggagcggggtactgctccaacccgggcatccccattggcacaaggaaggtgggcagccagtaccgccttgaagacagcgtcacctaccactgcagccgggggcttaccctgcgtggctcccagcggcgaacgtgtcaggaaggtggctcttggagcgggacggagccttcctgccaagactccttcatgtacgacacccctcaagaggtggccgaagctttcctgtcttccctgacagagaccatagaaggagtcgatgctgaggatgggcacggcccaggggaacaacagaagcggaagatcgtcctggacccttcaggctccatgaacatctacctggtgctagatggatcagacagcattggggccagcaacttcacaggagccaaaaagtgtctagtcaacttaattgagaaggtggcaagttatggtgtgaagccaagatatggtctagtgacatatgccacataccccaaaatttgggtcaaagtgtctgaagcagacagcagtaatgcagactgggtcacgaagcagctcaatgaaatcaattatgaagaccacaagttgaagtcagggactaacaccaagaaggccctccaggcagtgtacagcatgatgagctggccagatgacgtccctcctgaaggctggaaccgcacccgccatgtcatcatcctcatgactgatggattgcacaacatgggcggggacccaattactgtcattgatgagatccgggacttgctatacattggcaaggatcgcaaaaacccaagggaggattatctggatgtctatgtgtttggggtcgggcctttggtgaaccaagtgaacatcaatgctttggcttccaagaaagacaatgagcaacatgtgttcaaagtcaaggatatggaaaacctggaagatgttttctaccaaatgatcgatgaaagccagtctctgagtctctgtggcatggtttgggaacacaggaagggtaccgattaccacaagcaaccatggcaggccaagatctcagtcattcgcccttcaaagggacacgagagctgtatgggggctgtggtgtctgagtactttgtgctgacagcagcacattgtttcactgtggatgacaaggaacactcaatcaaggtcagcgtaggaggggagaagcgggacctggagatagaagtagtcctatttcaccccaactacaacattaatgggaaaaaagaagcaggaattcctgaattttatgactatgacgttgccctgatcaagctcaagaataagctgaaatatggccagactatcaggcccatttgtctcccctgcaccgagggaacaactcgagctttgaggcttcctccaactaccacttgccagcaacaaagtaagacatacttggcaagaggataaggatgagatcccaagagacaagtggggcatgagagggaggtgcaataggaagagatgatgcctggcccagaacctagctctagaagggcttaggggacatctactgagtgacaaaggcaatggggagatgacagtggtgggagcagctgaagtgacgcagtctattcgtccagaggaagagctgctccctgcacaggatatcaaagctctgtttgtgtctgaggaggagaaaaagctgactcggaaggaggtctacatcaagaatggggataaggtgagaaacgggcatcctaaggaggcactctaggccccaatccttcctaagccacttctgttcattacttctccatgcttcccacctcccctacagaaaggcagctgtgagagagatgctcaatatgccccaggctatgacaaagtcaaggacatctcagaggtggtcacccctcggttcctttgtactggaggagtgagtccctatgctgaccccaatacttgcagaggtgattctggcggccccttgatagttcacaagagaagtcgtttcattcaagttggtgtaatcagctggggagtagtggatgtctgcaaaaaccagaagcggcaaaagcaggtacctgctcacgcccgagactttcacatcaacctctttcaagtgctgccctggctgaaggagaaactccaagatgaggatttgggttttctataaggggtttcctgctggacaggggcgtgggattgaattaaaacagctgcgaacaaca

SEQ ID NO: 337149 - DNA, 2986 bp, Homo sapiens
  misc_feature (171)..(171): n is a, c, g, or t
  misc_feature (173)..(173): n is a, c, g, or t
  misc_feature (325)..(325): n is a, c, g, or t
  misc_feature (363)..(363): n is a, c, g, or t
  misc_feature (387)..(387): n is a, c, g, or t
ggaccaaaggcaagctcttccttggcaaacaatcggctgagttccagacccagggatcactaatgcagaagcaagcatccaaactctgtttgcaaaggcttgtctagattacactgagagcattttaaagagtcattgccggctcgttcggcaagataggtactgacgggnanctggtctcaagggggttggtttgcagcttcacaagtagaggatgccaagctgccaagagcccatgaagacggtgaattgatgaaataagttaccttggactgggcaaaactaagggtgaaggtggcttcgggggtcgtggtgaaggcagagncgctttgaaggacgaggtggtggtagagaaggccgagnaggatttggtggcagaggccgggnaggctttggagggcgaggaagcttccgaggggaagggaatgtgaccaggtctaggtctggagtttcagcttggacactgagccaagcagacaagcaaagcaagccaggacacaccatcctgccccaggcccagcttctctcctgccttccaacgccatggggagcaatctcagcccccaactctgcctgatgccctttatcttgggcctcttgtctggaggtgtgaccaccactccatggtctttggcccggccccagggatcctgctctctggagggggtagagatcaaaggcggctccttccgacttctccaagagggccaggcactggagtacgtgtgtccttctggcttctacccgtaccctgtgcagacacgtacctgcagatctacggggtcctggagcaccctgaagactcaagaccaaaagactgtcaggaaggcagagtgcagagcaatccactgtccaagaccacacgacttcgagaacggggaatactggccccggtctccctactacaatgtgagtgatgagatctctttccactgctatgacggttacactctccggggctctgccaatcgcacctgccaagtgaatggccggtggagtgggcagacagcgatctgtgacaacggagcggggtactgctccaacccgggcatccccattggcacaaggaaggtgggcagccagtaccgccttgaagacagcgtcacctaccactgcagccgggggcttaccctgcgtggctcccagcggcgaacgtgtcaggaaggtggctcttggagcgggacggagccttcctgccaagactccttcatgtacgacacccctcaagaggtggccgaagctttcctgtcttccctgacagagaccatagaaggagtcgatgctgaggatgggcacggcccaggggaacaacagaagcggaagatcgtcctggacccttcaggctccatgaacatctacctggtgctagatggatcagacagcattggggccagcaacttcacaggagccaaaaagtgtctagtcaacttaattgagaaggtggcaagttatggtgtgaagccaagatatggtctagtgacatatgccacataccccaaaatttgggtcaaagtgtctgaagcagacagcagtaatgcagactgggtcacgaagcagctcaatgaaatcaattatgaagaccacaagttgaagtcagggactaacaccaagaaggccctccaggcagtgtacagcatgatgagctggccagatgacgtccctcctgaaggctggaaccgcacccgccatgtcatcatcctcatgactgatggattgcacaacatgggcggggacccaattactgtcattgatgagatccgggacttgctatacattggcaaggatcgcaaaaacccaagggaggattatctggatgtctatgtgtttggggtcgggcctttggtgaaccaagtgaacatcaatgctttggcttccaagaaagacaatgagcaacatgtgttcaaagtcaaggatatggaaaacctggaagatgttttctaccaaatgatcgatgaaagccagtctctgagtctctgtggcatggtttgggaacacaggaagggtaccgattaccacaagcaaccatggcaggccaagatctcagtcattcgcccttcaaagggacacgagagctgtatgggggctgtggtgtctgagtactttgtgctgacagcagcacattgtttcactgtggatgacaaggaacactcaatcaaggtcagcgtaggaggggagaagcgggacctggagatagaagtagtcctatttcaccccaactacaacattaatgggaaaaaagaagcaggaattcctgaattttatgactatgacgttgccctgatcaagctcaagaataagctgaaatatggccagactatcaggcccatttgtctcccctgcaccgagggaacaactcgagctttgaggcttcctccaactaccacttgccagcaacaaaaggaagagctgctccctgcacaggatatcaaagctctgtttgtgtctgaggaggagaaaaagctgactcggaaggaggtctacatcaagaatggggataaggtgagaaacgggcatcctaaggaggcactctaggccccaatccttcctaagccacttctgttcattacttctccatgcttcccacctcccctacagaaaggcagctgtgagagagatgctcaatatgccccaggctatgacaaagtcaaggacatctcagaggtggtcacccctcggttcctttgtactggaggagtgagtccctatgctgaccccaatacttgcagaggtgattctggcggccccttgatagttcacaagagaagtcgtttcattcaagttggtgtaatcagctggggagtagtggatgtctgcaaaaaccagaagcggcaaaagcaggtacctgctcacgcccgagactttcacatcaacctctttcaagtgctgagcgtacaagcaccgatgtcaggtagtcggttttctgttaggcgaaatgtgttggacatgtgcgaaggactggcattaaccgagcgcagacgccaaaagg

SEQ ID NO: 337150 - DNA, 1997 bp, Homo sapiens
  misc_feature (171)..(171): n is a, c, g, or t
  misc_feature (173)..(173): n is a, c, g, or t
  misc_feature (325)..(325): n is a, c, g, or t
  misc_feature (363)..(363): n is a, c, g, or t
  misc_feature (387)..(387): n is a, c, g, or t
ggaccaaaggcaagctcttccttggcaaacaatcggctgagttccagacccagggatcactaatgcagaagcaagcatccaaactctgtttgcaaaggcttgtctagattacactgagagcattttaaagagtcattgccggctcgttcggcaagataggtactgacgggnanctggtctcaagggggttggtttgcagcttcacaagtagaggatgccaagctgccaagagcccatgaagacggtgaattgatgaaataagttaccttggactgggcaaaactaagggtgaaggtggcttcgggggtcgtggtgaaggcagagncgctttgaaggacgaggtggtggtagagaaggccgagnaggatttggtggcagaggccgggnaggctttggagggcgaggaagcttccgaggggaagggaatgtgaccaggtctaggtctggagtttcagcttggacactgagccaagcagacaagcaaagcaagccaggacacaccatcctgccccaggcccagcttctctcctgccttccaacgccatggggagcaatctcagcccccaactctgcctgatgccctttatcttgggcctcttgtctggaggtgtgaccaccactccatggtctttggcccggccccagggatcctgctctctggagggggtagagatcaaaggcggctccttccgacttctccaagagggccaggcactggagtacgtgtgtccttctggcttctacccgtaccctgtgcagacacgtacctgcagatctacggggtcctggagcaccctgaagactcaagaccaaaagactgtcaggaaggcagagtgcagagcaatccactgtccaagaccacacgacttcgagaacggggaatactggccccggtctccctactacaatgtgagtgatgagatctctttccactgctatgacggttacactctccggggctctgccaatcgcacctgccaagtgaatggccggtggagtgggcagacagcgatctgtgacaacggagcggggtactgctccaacccgggcatccccattggcacaaggaaggtgggcagccagtaccgccttgaagacagcgtcacctaccactgcagccgggggcttaccctgcgtggctcccagcggcgaacgtgtcaggaaggtggctcttggagcgggacggagccttcctgccaagactccttcatgtacgacacccctcaagaggtggccgaagctttcctgtcttccctgacagagaccatagaaggagtcgatgctgaggatgggcacggcccaggggaacaacagaagcggaagatcgtcctggacccttcaggctccatgaacatctacctggtgctagatggatcagacagcattggggccagcaacttcacaggagccaaaaagtgtctagtcaacttaattgagaaggtggcaagttatggtgtgaagccaagatatggtctagtgacatatgccacataccccaaaatttgggtcaaagtgtctgaagcagacagcagtaatgcagactgggtcacgaagcagctcaatgaaatcaattatgaagaccacaagttgaagtcagggactaacaccaagaaggccctccaggcagtgtacagcatgatgagctggccagatgacgtccctcctgaaggctggaaccgcacccgccatgtcatcatcctcatgactgatggattgcacaacatgggcggggacccaattactgtcattgatgagatccgggacttgctatacattggcaaggatcgcaaaaacccaagggaggattatctggatgtctatgtgtttggggtcgggcctttggtgaaccaagtgaacatcaatgctttggcttccaagaaagacaatgagcaacatgtgttcaaagtcaaggatatggaaaacctggaagatgttttctaccaaatgatcggtagggagatacaagggaataaagaacacaactctcctcaggttcc

SEQ ID NO: 337151 - DNA, 1565 bp, Homo sapiens
  misc_feature (171)..(171): n is a, c, g, or t
  misc_feature (173)..(173): n is a, c, g, or t
  misc_feature (325)..(325): n is a, c, g, or t
  misc_feature (363)..(363): n is a, c, g, or t
  misc_feature (387)..(387): n is a, c, g, or t
ggaccaaaggcaagctcttccttggcaaacaatcggctgagttccagacccagggatcactaatgcagaagcaagcatccaaactctgtttgcaaaggcttgtctagattacactgagagcattttaaagagtcattgccggctcgttcggcaagataggtactgacgggnanctggtctcaagggggttggtttgcagcttcacaagtagaggatgccaagctgccaagagcccatgaagacggtgaattgatgaaataagttaccttggactgggcaaaactaagggtgaaggtggcttcgggggtcgtggtgaaggcagagncgctttgaaggacgaggtggtggtagagaaggccgagnaggatttggtggcagaggccgggnaggctttggagggcgaggaagcttccgaggggaagggaatgtgaccaggtctaggtctggagtttcagcttggacactgagccaagcagacaagcaaagcaagccaggacacaccatcctgccccaggcccagcttctctcctgccttccaacgccatggggagcaatctcagcccccaactctgcctgatgccctttatcttgggcctcttgtctggaggtgtgaccaccactccatggtctttggcccggccccagggatcctgctctctggagggggtagagatcaaaggcggctccttccgacttctccaagagggccaggcactggagtacgtgtgtccttctggcttctacccgtaccctgtgcagacacgtacctgcagatctacggggtcctggagcaccctgaagactcaagaccaaaagactgtcaggaaggcagagtgcagagcaatccactgtccaagaccacacgacttcgagaacggggaatactggccccggtctccctactacaatgtgagtgatgagatctctttccactgctatgacggttacactctccggggctctgccaatcgcacctgccaagtgaatggccggtggagtgggcagacagcgatctgtgacaacggagcggggtactgctccaacccgggcatccccattggcacaaggaaggtgggcagccagtaccgccttgaagacagcgtcacctaccactgcagccgggggcttaccctgcgtggctcccagcggcgaacgtgtcaggaaggtggctcttggagcgggacggagccttcctgccaagactccttcatgtacgacacccctcaagaggtggccgaagctttcctgtcttccctgacagagaccatagaaggatccctatgctgaccccaatacttgcagaggtgattctggcggccccttgatagttcacaagagaagtcgtttcattcaagttggtgtaatcagctggggagtagtggatgtctgcaaaaaccagaagcggcaaaagcaggtacctgctcacgcccgagactttcacatcaacctctttcaagtgctgccctggctgaaggagaaactccaagatgaggatttgggttttctataaggggtttcctgctggacaggggcgtgggattgaattaaaacagctgcgaacaaca

SEQ ID NO: 337152 - DNA, 262 bp, Homo sapiens
gtgagagcgtccagatccctgaggaaaggctgggaaaggctggaggactggggtgaggagcaggcctggtttgctgttctccttgtcctttataggcccatttgtctcccctgcaccgagggaacaactcgagctttgaggcttcctccaactaccacttgccagcaacaaagtaagacatacttggcaagaggataaggatgagatcccaagagacaagtggggcatgagagggaggtgcaataggaagagatgatgcctg

SEQ ID NO: 337153 - DNA, 520 bp, Homo sapiens
cttcataaggaattcttcctaagccctgtgatcaactatctctaacccttcctcaacttgctcaccctgccatgtgtatccctgcctttagccagtttatcttccttatctcctaccctcatggtcctgtctcttctgcaggattgcacaacatgggcggggacccaattactgtcattgatgagatccgggacttgctatacattggcaaggatcgcaaaaacccaagggaggattatctgggtgagtaacctgcctaggacccagcaccccacttcctcagggcttggaccctcatccttcctttttatccctcagatgtctatgtgtttggggtcgggcctttggtgaaccaagtgaacatcaatgctttggcttccaagaaagacaatgagcaacatgtgttcaaagtcaaggatatggaaaacctggaagatgttttctaccaaatgatcggtagggagatacaagggaataaagaacacaactctcctcaggttcccctgaagtaattcattct

SEQ ID NO: 337154 - DNA, 911 bp, Homo sapiens
  misc_feature (171)..(171): n is a, c, g, or t
  misc_feature (173)..(173): n is a, c, g, or t
  misc_feature (325)..(325): n is a, c, g, or t
  misc_feature (363)..(363): n is a, c, g, or t
  misc_feature (387)..(387): n is a, c, g, or t
ggaccaaaggcaagctcttccttggcaaacaatcggctgagttccagacccagggatcactaatgcagaagcaagcatccaaactctgtttgcaaaggcttgtctagattacactgagagcattttaaagagtcattgccggctcgttcggcaagataggtactgacgggnanctggtctcaagggggttggtttgcagcttcacaagtagaggatgccaagctgccaagagcccatgaagacggtgaattgatgaaataagttaccttggactgggcaaaactaagggtgaaggtggcttcgggggtcgtggtgaaggcagagncgctttgaaggacgaggtggtggtagagaaggccgagnaggatttggtggcagaggccgggnaggctttggagggcgaggaagcttccgaggggaagggaatgtgaccaggtctaggtctggagtttcagcttggacactgagccaagcagacaagcaaagcaagccaggacacaccatcctgccccaggcccagcttctctcctgccttccaacgccatggggagcaatctcagcccccaactctgcctgatgccctttatcttgggcctcttgtctggaggtgtgaccaccactccatggtctttggcccggccccagggatcctgctctctggagggggtagagatcaaaggcggctccttccgacttctccaagagggccaggcactggagtacgtgtgtccttctggcttctacccgtaccctgtgcagacacgtacctgcagatctacggggtcctggagcaccctgaagactcaagaccaaaagactgtcaggaaggcagagtgcagaggtttgagggcaatgagtgtgggcagtggcctaaggcagaaacagggcaggcggcagcaaggtcaggacta

SEQ ID NO: 337155 - DNA, 704 bp, Homo sapiens
tttgcaaaggggttttctttggtcttttttaaagggcgagaaagaagaaaaaaagggtaattttttcttccaccgtgtaaaaacccacaccttaaaaaaaaaaaaaaaagctctagaacggggtttcctctcggtccggattcggggccaagcaccaaggaaccacccgaagtttagagcttccttccaacaaccccttgcaaccaccaaaagaaaaactgcttcctgccccagaaaacaaaagccctgttggtgtttaagaagaagaaaaagttgactcgaaagaaggtttcatccaagaatggggataaaaggcagctgtgagagagatgctcaatatgccccaggctatgacaaagtcaaggacatctcagaggtggtcacccctcggttcctttgtactggaggagtgagtccctatgctgaccccaatacttgcagaggtgattctggcggccccttgatagttcacaagagaagtcgtttcattcaagttggtgtaatcagctggggagtagtggatgtctgcaaaaaccagaagcggcaaaagcaggtacctgctcacgcccgagactttcacatcaacctctttcaagtgctgccctggctgaaggagaaactccaagatgaggatttgggttttctataaggggtttcctgctggacaggggcgtgggattgaattaaaacagctgcgaacaaca

SEQ ID NO: 337156 - DNA, 2830 bp, Homo sapiens
  misc_feature (171)..(171): n is a, c, g, or t
  misc_feature (173)..(173): n is a, c, g, or t
  misc_feature (325)..(325): n is a, c, g, or t
  misc_feature (363)..(363): n is a, c, g, or t
  misc_feature (387)..(387): n is a, c, g, or t
ggaccaaaggcaagctcttccttggcaaacaatcggctgagttccagacccagggatcactaatgcagaagcaagcatccaaactctgtttgcaaaggcttgtctagattacactgagagcattttaaagagtcattgccggctcgttcggcaagataggtactgacgggnanctggtctcaagggggttggtttgcagcttcacaagtagaggatgccaagctgccaagagcccatgaagacggtgaattgatgaaataagttaccttggactgggcaaaactaagggtgaaggtggcttcgggggtcgtggtgaaggcagagncgctttgaaggacgaggtggtggtagagaaggccgagnaggatttggtggcagaggccgggnaggctttggagggcgaggaagcttccgaggggaagggaatgtgaccaggtctaggtctggagtttcagcttggacactgagccaagcagacaagcaaagcaagccaggacacaccatcctgccccaggcccagcttctctcctgccttccaacgccatggggagcaatctcagcccccaactctgcctgatgccctttatcttgggcctcttgtctggaggtgtgaccaccactccatggtctttggcccggccccagggatcctgctctctggagggggtagagatcaaaggcggctccttccgacttctccaagagggccaggcactggagtacgtgtgtccttctggcttctacccgtaccctgtgcagacacgtacctgcagatctacggggtcctggagcaccctgaagactcaagaccaaaagactgtcaggaaggcagagtgcagagcaatccactgtccaagaccacacgacttcgagaacggggaatactggccccggtctccctactacaatgtgagtgatgagatctctttccactgctatgacggttacactctccggggctctgccaatcgcacctgccaagtgaatggccggtggagtgggcagacagcgatctgtgacaacggagcggggtactgctccaacccgggcatccccattggcacaaggaaggtgggcagccagtaccgccttgaagacagcgtcacctaccactgcagccgggggcttaccctgcgtggctcccagcggcgaacgtgtcaggaaggtggctcttggagcgggacggagccttcctgccaagactccttcatgtacgacacccctcaagaggtggccgaagctttcctgtcttccctgacagagaccatagaaggagtcgatgctgaggatgggcacggcccaggggaacaacagaagcggaagatcgtcctggacccttcaggctccatgaacatctacctggtgctagatggatcagacagcattggggccagcaacttcacaggagccaaaaagtgtctagtcaacttaattgagaaggtggcaagttatggtgtgaagccaagatatggtctagtgacatatgccacataccccaaaatttgggtcaaagtgtaccacaagttgaagtcagggactaacaccaagaaggccctccaggcagtgtacagcatgatgagctggccagatgacgtccctcctgaaggctggaaccgcacccgccatgtcatcatcctcatgactgatggattgcacaacatgggcggggacccaattactgtcattgatgagatccgggacttgctatacattggcaaggatcgcaaaaacccaagggaggattatctggatgtctatgtgtttggggtcgggcctttggtgaaccaagtgaacatcaatgctttggcttccaagaaagacaatgagcaacatgtgttcaaagtcaaggatatggaaaacctggaagatgttttctaccaaatgatcgatgaaagccagtctctgagtctctgtggcatggtttgggaacacaggaagggtaccgattaccacaagcaaccatggcaggccaagatctcagtcattcgcccttcaaagggacacgagagctgtatgggggctgtggtgtctgagtactttgtgctgacagcagcacattgtttcactgtggatgacaaggaacactcaatcaaggtcagcgtaggaggggagaagcgggacctggagatagaagtagtcctatttcaccccaactacaacattaatgggaaaaaagaagcaggaattcctgaattttatgactatgacgttgccctgatcaagctcaagaataagctgaaatatggccagactatcaggcccatttgtctcccctgcaccgagggaacaactcgagctttgaggcttcctccaactaccacttgccagcaacaaaaggaagagctgctccctgcacaggatatcaaagctctgtttgtgtctgaggaggagaaaaagctgactcggaaggaggtctacatcaagaatggggataagaaaggcagctgtgagagagatgctcaatatgccccaggctatgacaaagtcaaggacatctcagaggtggtcacccctcggttcctttgtactggaggagtgagtccctatgctgaccccaatacttgcagaggtgattctggcggccccttgatagttcacaagagaagtcgtttcattcaagttggtgtaatcagctggggagtagtggatgtctgcaaaaaccagaagcggcaaaagcaggtacctgctcacgcccgagactttcacatcaacctctttcaagtgctgccctggctgaaggagaaactccaagatgaggatttgggttttctataaggggtttcctgctggacaggggcgtgggattgaattaaaacagctgcgaacaaca

SEQ ID NO: 337157 - DNA, 2599 bp, Homo sapiens
  misc_feature (171)..(171): n is a, c, g, or t
  misc_feature (173)..(173): n is a, c, g, or t
  misc_feature (325)..(325): n is a, c, g, or t
  misc_feature (363)..(363): n is a, c, g, or t
  misc_feature (387)..(387): n is a, c, g, or t
ggaccaaaggcaagctcttccttggcaaacaatcggctgagttccagacccagggatcactaatgcagaagcaagcatccaaactctgtttgcaaaggcttgtctagattacactgagagcattttaaagagtcattgccggctcgttcggcaagataggtactgacgggnanctggtctcaagggggttggtttgcagcttcacaagtagaggatgccaagctgccaagagcccatgaagacggtgaattgatgaaataagttaccttggactgggcaaaactaagggtgaaggtggcttcgggggtcgtggtgaaggcagagncgctttgaaggacgaggtggtggtagagaaggccgagnaggatttggtggcagaggccgggnaggctttggagggcgaggaagcttccgaggggaagggaatgtgaccaggtctaggtctggagtttcagcttggacactgagccaagcagacaagcaaagcaagccaggacacaccatcctgccccaggcccagcttctctcctgccttccaacgccatggggagcaatctcagcccccaactctgcctgatgccctttatcttgggcctcttgtctggaggtgtgaccaccactccatggtctttggcccggccccagggatcctgctctctggagggggtagagatcaaaggcggctccttccgacttctccaagagggccaggcactggagtacgtgtgtccttctggcttctacccgtaccctgtgcagacacgtacctgcagatctacggggtcctggagcaccctgaagactcaagaccaaaagactgtcaggaaggcagagtgcagagcaatccactgtccaagaccacacgacttcgagaacggggaatactggccccggtctccctactacaatgtgagtgatgagatctctttccactgctatgacggttacactctccggggctctgccaatcgcacctgccaagtgaatggccggtggagtgggcagacagcgatctgtgacaacggagcggggtactgctccaacccgggcatccccattggcacaaggaaggtgggcagccagtaccgccttgaagacagcgtcacctaccactgcagccgggggcttaccctgcgtggctcccagcggcgaacgtgtcaggaaggtggctcttggagcgggacggagccttcctgccaagactccttcatgtacgacacccctcaagaggtggccgaagctttcctgtcttccctgacagagaccatagaaggagtcgatgctgaggatgggcacggcccaggggaacaacagaagcggaagatcgtcctggacccttcaggctccatgaacatctacctggtgctagatggatcagacagcattggggccagcaacttcacaggagccaaaaagtgtctagtcaacttaattgagaaggtggcaagttatggtgtgaagccaagatatggtctagtgacatatgccacataccccaaaatttgggtcaaagtgtctgaagcagacagcagtaatgcagactgggtcacgaagcaagtgaacatcaatgctttggcttccaagaaagacaatgagcaacatgtgttcaaagtcaaggatatggaaaacctggaagatgttttctaccaaatgatcgatgaaagccagtctctgagtctctgtggcatggtttgggaacacaggaagggtaccgattaccacaagcaaccatggcaggccaagatctcagtcattcgcccttcaaagggacacgagagctgtatgggggctgtggtgtctgagtactttgtgctgacagcagcacattgtttcactgtggatgacaaggaacactcaatcaaggtcagcgtaggaggggagaagcgggacctggagatagaagtagtcctatttcaccccaactacaacattaatgggaaaaaagaagcaggaattcctgaattttatgactatgacgttgccctgatcaagctcaagaataagctgaaatatggccagactatcaggcccatttgtctcccctgcaccgagggaacaactcgagctttgaggcttcctccaactaccacttgccagcaacaaaaggaagagctgctccctgcacaggatatcaaagctctgtttgtgtctgaggaggagaaaaagctgactcggaaggaggtctacatcaagaatggggataagaaaggcagctgtgagagagatgctcaatatgccccaggctatgacaaagtcaaggacatctcagaggtggtcacccctcggttcctttgtactggaggagtgagtccctatgctgaccccaatacttgcagaggtgattctggcggccccttgatagttcacaagagaagtcgtttcattcaagttggtgtaatcagctggggagtagtggatgtctgcaaaaaccagaagcggcaaaagcaggtacctgctcacgcccgagactttcacatcaacctctttcaagtgctgccctggctgaaggagaaactccaagatgaggatttgggttttctataaggggtttcctgctggacaggggcgtgggattgaattaaaacagctgcgaacaaca

SEQ ID NO: 337158 - DNA, 2860 bp, Homo sapiens
  misc_feature (171)..(171): n is a, c, g, or t
  misc_feature (173)..(173): n is a, c, g, or t
  misc_feature (325)..(325): n is a, c, g, or t
  misc_feature (363)..(363): n is a, c, g, or t
  misc_feature (387)..(387): n is a, c, g, or t
ggaccaaaggcaagctcttccttggcaaacaatcggctgagttccagacccagggatcactaatgcagaagcaagcatccaaactctgtttgcaaaggcttgtctagattacactgagagcattttaaagagtcattgccggctcgttcggcaagataggtactgacgggnanctggtctcaagggggttggtttgcagcttcacaagtagaggatgccaagctgccaagagcccatgaagacggtgaattgatgaaataagttaccttggactgggcaaaactaagggtgaaggtggcttcgggggtcgtggtgaaggcagagncgctttgaaggacgaggtggtggtagagaaggccgagnaggatttggtggcagaggccgggnaggctttggagggcgaggaagcttccgaggggaagggaatgtgaccaggtctaggtctggagtttcagcttggacactgagccaagcagacaagcaaagcaagccaggacacaccatcctgccccaggcccagcttctctcctgccttccaacgccatggggagcaatctcagcccccaactctgcctgatgccctttatcttgggcctcttgtctggaggtgtgaccaccactccatggtctttggcccggccccagggatcctgctctctggagggggtagagatcaaaggcggctccttccgacttctccaagagggccaggcactggagtacgtgtgtccttctggcttctacccgtaccctgtgcagacacgtacctgcagatctacggggtcctggagcaccctgaagactcaagaccaaaagactgtcaggaaggcagagtgcagagcaatccactgtccaagaccacacgacttcgagaacggggaatactggccccggtctccctactacaatgtgagtgatgagatctctttccactgctatgacggttacactctccggggctctgccaatcgcacctgccaagtgaatggccggtggagtgggcagacagcgatctgtgacaacggagcggggtactgctccaacccgggcatccccattggcacaaggaaggtgggcagccagtaccgccttgaagacagcgtcacctaccactgcagccgggggcttaccctgcgtggctcccagcggcgaacgtgtcaggaaggtggctcttggagcgggacggagccttcctgccaagactccttcatgtacgacacccctcaagaggtggccgaagctttcctgtcttccctgacagagaccatagaaggagtcgatgctgaggatgggcacggcccaggggaacaacagaagcggaagatcgtcctggacccttcaggctccatgaacatctacctggtgctagatggatcagacagcattggggccagcaacttcacaggagccaaaaagtgtctagtcaacttaattgagaaggtggcaagttatggtgtgaagccaagatatggtctagtgacatatgccacataccccaaaatttgggtcaaagtgtctgaagcagacagcagtaatgcagactgggtcacgaagcagctcaatgaaatcaattatgaagaccacaagttgaagtcagggactaacaccaagaaggccctccaggcagtgtacagcatgatgagctggccagatgacgtccctcctgaaggctggaaccgcacccgccatgtcatcatcctcatgactgatggattgcacaacatgggcggggacccaattactgtcattgatgagatccgggacttgctatacattggcaaggatcgcaaaaacccaagggaggattatctggatgtctatgtgtttggggtcgggcctttggtgaaccaagtgaacatcaatgctttggcttccaagaaagacaatgagcaacatgtgttcaaagtcaaggatatggatgaaagccagtctctgagtctctgtggcatggtttgggaacacaggaagggtaccgattaccacaagcaaccatggcaggccaagatctcagtcattcgcccttcaaagggacacgagagctgtatgggggctgtggtgtctgagtactttgtgctgacagcagcacattgtttcactgtggatgacaaggaacactcaatcaaggtcagcgtaggaggggagaagcgggacctggagatagaagtagtcctatttcaccccaactacaacattaatgggaaaaaagaagcaggaattcctgaattttatgactatgacgttgccctgatcaagctcaagaataagctgaaatatggccagactatcaggcccatttgtctcccctgcaccgagggaacaactcgagctttgaggcttcctccaactaccacttgccagcaacaaaaggaagagctgctccctgcacaggatatcaaagctctgtttgtgtctgaggaggagaaaaagctgactcggaaggaggtctacatcaagaatggggataagaaaggcagctgtgagagagatgctcaatatgccccaggctatgacaaagtcaaggacatctcagaggtggtcacccctcggttcctttgtactggaggagtgagtccctatgctgaccccaatacttgcagaggtgattctggcggccccttgatagttcacaagagaagtcgtttcattcaagttggtgtaatcagctggggagtagtggatgtctgcaaaaaccagaagcggcaaaagcaggtacctgctcacgcccgagactttcacatcaacctctttcaagtgctgccctggctgaaggagaaactccaagatgaggatttgggttttctataaggggtttcctgctggacaggggcgtgggattgaattaaaacagctgcgaacaaca

SEQ ID NO: 337159 - DNA, 1020 bp, Homo sapiens
tactcaagcaaacatggcaggccaagatctcagtcattcgcccttcaaagggacacgagagctgtatgggggctgtagatgaaagccagtctctgagtctctgtggcatggtttgggaacacaggaagggtaccgattaccacaagcaaccatggcaggccaagatctcagtcattcgcccttcaaagggacacgagagctgtatgggggctgtggtgtctgagtactttgtgctgacagcagcacattgtttcactgtggatgacaaggaacactcaatcaaggtcagcgtaggaggggagaagcgggacctggagatagaagtagtcctatttcaccccaactacaacattaatgggaaaaaagaagcaggaattcctgaattttatgactatgacgttgccctgatcaagctcaagaataagctgaaatatggccagactatcaggcccatttgtctcccctgcaccgagggaacaactcgagctttgaggcttcctccaactaccacttgccagcaacaaaaggaagagctgctccctgcacaggatatcaaagctctgtttgtgtctgaggaggagaaaaagctgactcggaaggaggtctacatcaagaatggggataagaaaggcagctgtgagagagatgctcaatatgccccaggctatgacaaagtcaaggacatctcagaggtggtcacccctcggttcctttgtactggaggagtgagtccctatgctgaccccaatacttgcagaggtgattctggcggccccttgatagttcacaagagaagtcgtttcattcaagttggtgtaatcagctggggagtagtggatgtctgcaaaaaccagaagcggcaaaagcaggtacctgctcacgcccgagactttcacatcaacctctttcaagtgctgccctggctgaaggagaaactccaagatgaggatttgggttttctataaggggtttcctgctggacaggggcgtgggattgaattaaaacagctgcgaacaaca

SEQ ID NO: 337160 - DNA, 3102 bp, Homo sapiens
  misc_feature (171)..(171): n is a, c, g, or t
  misc_feature (173)..(173): n is a, c, g, or t
  misc_feature (325)..(325): n is a, c, g, or t
  misc_feature (363)..(363): n is a, c, g, or t
  misc_feature (387)..(387): n is a, c, g, or t
  misc_feature (3026)..(3026): n is a, c, g, or t
  misc_feature (3037)..(3037): n is a, c, g, or t
  misc_feature (3077)..(3077): n is a, c, g, or t
  misc_feature (3082)..(3082): n is a, c, g, or t
ggaccaaaggcaagctcttccttggcaaacaatcggctgagttccagacccagggatcactaatgcagaagcaagcatccaaactctgtttgcaaaggcttgtctagattacactgagagcattttaaagagtcattgccggctcgttcggcaagataggtactgacgggnanctggtctcaagggggttggtttgcagcttcacaagtagaggatgccaagctgccaagagcccatgaagacggtgaattgatgaaataagttaccttggactgggcaaaactaagggtgaaggtggcttcgggggtcgtggtgaaggcagagncgctttgaaggacgaggtggtggtagagaaggccgagnaggatttggtggcagaggccgggnaggctttggagggcgaggaagcttccgaggggaagggaatgtgaccaggtctaggtctggagtttcagcttggacactgagccaagcagacaagcaaagcaagccaggacacaccatcctgccccaggcccagcttctctcctgccttccaacgccatggggagcaatctcagcccccaactctgcctgatgccctttatcttgggcctcttgtctggaggtgtgaccaccactccatggtctttggcccggccccagggatcctgctctctggagggggtagagatcaaaggcggctccttccgacttctccaagagggccaggcactggagtacgtgtgtccttctggcttctacccgtaccctgtgcagacacgtacctgcagatctacggggtcctggagcaccctgaagactcaagaccaaaagactgtcaggaaggcagagtgcagagcaatccactgtccaagaccacacgacttcgagaacggggaatactggccccggtctccctactacaatgtgagtgatgagatctctttccactgctatgacggttacactctccggggctctgccaatcgcacctgccaagtgaatggccggtggagtgggcagacagcgatctgtgacaacggagcggggtactgctccaacccgggcatccccattggcacaaggaaggtgggcagccagtaccgccttgaagacagcgtcacctaccactgcagccgggggcttaccctgcgtggctcccagcggcgaacgtgtcaggaaggtggctcttggagcgggacggagccttcctgccaagactccttcatgtacgacacccctcaagaggtggccgaagctttcctgtcttccctgacagagaccatagaaggagtcgatgctgaggatgggcacggcccaggggaacaacagaagcggaagatcgtcctggacccttcaggctccatgaacatctacctggtgctagatggatcagacagcattggggccagcaacttcacaggagccaaaaagtgtctagtcaacttaattgagaaggtggcaagttatggtgtgaagccaagatatggtctagtgacatatgccacataccccaaaatttgggtcaaagtgtctgaagcagacagcagtaatgcagactgggtcacgaagcagctcaatgaaatcaattatgaagaccacaagttgaagtcagggactaacaccaagaaggccctccaggcagtgtacagcatgatgagctggccagatgacgtccctcctgaaggctggaaccgcacccgccatgtcatcatcctcatgactgatggattgcacaacatgggcggggacccaattactgtcattgatgagatccgggacttgctatacattggcaaggatcgcaaaaacccaagggaggattatctggatgtctatgtgtttggggtcgggcctttggtgaaccaagtgaacatcaatgctttggcttccaagaaagacaatgagcaacatgtgttcaaagtcaaggatatggaaaacctggaagatgttttctaccaaatgatcgatgaaagccagtctctgagtctctgtggcatggtttgggaacacaggaagggtaccgattaccacaagcaaccatggcaggccaagatctcagtcattcgcccttcaaagggacacgagagctgtatgggggctgtggtgtctgagtactttgtgctgacagcagcacattgtttcactgtggatgacaaggaacactcaatcaaggtcagcgtaggaggggagaagcgggacctggagatagaagtagtcctatttcaccccaactacaacattaatgggaaaaaagaagcaggaattcctgaattttatgactatgacgttgccctgatcaagctcaagaataagctgaaatatggccagactatcaggcccatttgtctcccctgcaccgagggaacaactcgagctttgaggcttcctccaactaccacttgccagcaacaaaaggaagagctgctccctgcacaggatatcaaagctctgtttgtgtctgaggaggagaaaaagctgactcggaaggaggtctacatcaagaatggggataagaaaggcagctgtgagagagatgctcaatatgccccaggctatgacaaagtcaaggacatctcagaggtggtcacccctcggttcctttgtactggaggagtgagtccctatgctgaccccaatacttgcagaggtgattctggcggccccttgatagttcacaagagaagtcgtttcattcaagttggtgtaatcagctggggagtagtggatgtctgcaaaaaccagaagcggcaaaagcaggtacctgctcacgcccgagactttcacatcaacctctttcaagtgctgccctggctgaaggagaaactccaagatgaggatttgggttttctataaggggtttcctgctggacaggggcgtgggattgaattaaaacagctgcgaacaacaaaaaaaaaaaaaaaaactcgagttttttttttttttttttgggtttaacagtttattaggatttataagtgtcattttaaaaacagtcgatttaaaccatgtagaaataagtatgcaaaaagtctgcctcagncacttcattgntatgctatggcagccaagtatccttaacttcagttggagngcctncttccacttcatttgagttc

SEQ ID NO: 337161 - DNA, 2950 bp, Homo sapiens
  misc_feature (171)..(171): n is a, c, g, or t
  misc_feature (173)..(173): n is a, c, g, or t
  misc_feature (325)..(325): n is a, c, g, or t
  misc_feature (363)..(363): n is a, c, g, or t
  misc_feature (387)..(387): n is a, c, g, or t
ggaccaaaggcaagctcttccttggcaaacaatcggctgagttccagacccagggatcactaatgcagaagcaagcatccaaactctgtttgcaaaggcttgtctagattacactgagagcattttaaagagtcattgccggctcgttcggcaagataggtactgacgggnanctggtctcaagggggttggtttgcagcttcacaagtagaggatgccaagctgccaagagcccatgaagacggtgaattgatgaaataagttaccttggactgggcaaaactaagggtgaaggtggcttcgggggtcgtggtgaaggcagagncgctttgaaggacgaggtggtggtagagaaggccgagnaggatttggtggcagaggccgggnaggctttggagggcgaggaagcttccgaggggaagggaatgtgaccaggtctaggtctggagtttcagcttggacactgagccaagcagacaagcaaagcaagccaggacacaccatcctgccccaggcccagcttctctcctgccttccaacgccatggggagcaatctcagcccccaactctgcctgatgccctttatcttgggcctcttgtctggaggtgtgaccaccactccatggtctttggcccggccccagggatcctgctctctggagggggtagagatcaaaggcggctccttccgacttctccaagagggccaggcactggagtacgtgtgtccttctggcttctacccgtaccctgtgcagacacgtacctgcagatctacggggtcctggagcaccctgaagactcaagaccaaaagactgtcaggaaggcagagtgcagagcaatccactgtccaagaccacacgacttcgagaacggggaatactggccccggtctccctactacaatgtgagtgatgagatctctttccactgctatgacggttacactctccggggctctgccaatcgcacctgccaagtgaatggccggtggagtgggcagacagcgatctgtgacaacggagcggggtactgctccaacccgggcatccccattggcacaaggaaggtgggcagccagtaccgccttgaagacagcgtcacctaccactgcagccgggggcttaccctgcgtggctcccagcggcgaacgtgtcaggaaggtggctcttggagcgggacggagccttcctgccaagactccttcatgtacgacacccctcaagaggtggccgaagctttcctgtcttccctgacagagaccatagaaggagtcgatgctgaggatgggcacggcccaggggaacaacagaagcggaagatcgtcctggacccttcaggctccatgaacatctacctggtgctagatggatcagacagcattggggccagcaacttcacaggagccaaaaagtgtctagtcaacttaattgagaaggtggcaagttatggtgtgaagccaagatatggtctagtgacatatgccacataccccaaaatttgggtcaaagtgtctgaagcagacagcagtaatgcagactgggtcacgaagcagctcaatgaaatcaattatgaagaccacaagttgaagtcagggactaacaccaagaaggccctccaggcagtgtacagcatgatgagctggccagatgacgtccctcctgaaggctggaaccgcacccgccatgtcatcatcctcatgactgatggattgcacaacatgggcggggacccaattactgtcattgatgagatccgggacttgctatacattggcaaggatcgcaaaaacccaagggaggattatctggatgtctatgtgtttggggtcgggcctttggtgaaccaagtgaacatcaatgctttggcttccaagaaagacaatgagcaacatgtgttcaaagtcaaggatatggaaaacctggaagatgttttctaccaaatgatcgatgaaagccagtctctgagtctctgtggcatggtttgggaacacaggaagggtaccgattaccacaagcaaccatggcaggccaagatctcagtcattcgcccttcaaagggacacgagagctgtatgggggctgtggtgtctgagtactttgtgctgacagcagcacattgtttcactgtggatgacaaggaacactcaatcaaggtcagcgtaggaggggagaagcgggacctggagatagaagtagtcctatttcaccccaactacaacattaatgggaaaaaagaagcaggaattcctgaattttatgactatgacgttgccctgatcaagctcaagaataagctgaaatatggccagactatcaggcccatttgtctcccctgcaccgagggaacaactcgagctttgaggcttcctccaactaccacttgccagcaacaaaaggaagagctgctccctgcacaggatatcaaagctctgtttgtgtctgaggaggagaaaaagctgactcggaaggaggtctacatcaagaatggggataagaaaggcagctgtgagagagatgctcaatatgccccaggctatgacaaagtcaaggacatctcagaggtggtcacccctcggttcctttgtactggaggagtgagtccctatgctgaccccaatacttgcagaggtgattctggcggccccttgatagttcacaagagaagtcgtttcattcaagttggtgtaatcagctggggagtagtggatgtctgcaaaaaccagaagcggcaaaagcaggtacctgctcacgcccgagactttcacatcaacctctttcaagtgctgccctggctgaaggagaaactccaagatgaggatttgggttttctataaggggtttcctgctggacaggggcgtgggattgaattaaaacagctgcgaacaacaaagaaaaagagatcataaaacacgaaaagagcaacaaacacagacgaacacaggggg

SEQ ID NO: 337162 - DNA, 4981 bp, Homo sapiens
  misc_feature (171)..(171): n is a, c, g, or t
  misc_feature (173)..(173): n is a, c, g, or t
  misc_feature (325)..(325): n is a, c, g, or t
  misc_feature (363)..(363): n is a, c, g, or t
  misc_feature (387)..(387): n is a, c, g, or t
ggaccaaaggcaagctcttccttggcaaacaatcggctgagttccagacccagggatcactaatgcagaagcaagcatccaaactctgtttgcaaaggcttgtctagattacactgagagcattttaaagagtcattgccggctcgttcggcaagataggtactgacgggnanctggtctcaagggggttggtttgcagcttcacaagtagaggatgccaagctgccaagagcccatgaagacggtgaattgatgaaataagttaccttggactgggcaaaactaagggtgaaggtggcttcgggggtcgtggtgaaggcagagncgctttgaaggacgaggtggtggtagagaaggccgagnaggatttggtggcagaggccgggnaggctttggagggcgaggaagcttccgaggggaagggaatgtgaccaggtctaggtctggagtttcagcttggacactgagccaagcagacaagcaaagcaagccaggacacaccatcctgccccaggcccagcttctctcctgccttccaacgccatggggagcaatctcagcccccaactctgcctgatgccctttatcttgggcctcttgtctggaggtgtgaccaccactccatggtctttggcccggccccagggatcctgctctctggagggggtagagatcaaaggcggctccttccgacttctccaagagggccaggcactggagtacgtgtgtccttctggcttctacccgtaccctgtgcagacacgtacctgcagatctacggggtcctggagcaccctgaagactcaagaccaaaagactgtcaggaaggcagagtgcagagcaatccactgtccaagaccacacgacttcgagaacggggaatactggccccggtctccctactacaatgtgagtgatgagatctctttccactgctatgacggttacactctccggggctctgccaatcgcacctgccaagtgaatggccggtggagtgggcagacagcgatctgtgacaacggagcggggtactgctccaacccgggcatccccattggcacaaggaaggtgggcagccagtaccgccttgaagacagcgtcacctaccactgcagccgggggcttaccctgcgtggctcccagcggcgaacgtgtcaggaaggtggctcttggagcgggacggagccttcctgccaagactccttcatgtacgacacccctcaagaggtggccgaagctttcctgtcttccctgacagagaccatagaaggagtcgatgctgaggatgggcacggcccaggggaacaacagaagcggaagatcgtcctggacccttcaggctccatgaacatctacctggtgctagatggatcagacagcattggggccagcaacttcacaggagccaaaaagtgtctagtcaacttaattgagaaggtggcaagttatggtgtgaagccaagatatggtctagtgacatatgccacataccccaaaatttgggtcaaagtgtctgaagcagacagcagtaatgcagactgggtcacgaagcagctcaatgaaatcaattatgaagaccacaagttgaagtcagggactaacaccaagaaggccctccaggcagtgtacagcatgatgagctggccagatgacgtccctcctgaaggctggaaccgcacccgccatgtcatcatcctcatgactgatggattgcacaacatgggcggggacccaattactgtcattgatgagatccgggacttgctatacattggcaaggatcgcaaaaacccaagggaggattatctggatgtctatgtgtttggggtcgggcctttggtgaaccaagtgaacatcaatgctttggcttccaagaaagacaatgagcaacatgtgttcaaagtcaaggatatggaaaacctggaagatgttttctaccaaatgatcgatgaaagccagtctctgagtctctgtggcatggtttgggaacacaggaagggtaccgattaccacaagcaaccatggcaggccaagatctcagtcattcgcccttcaaagggacacgagagctgtatgggggctgtggtgtctgagtactttgtgctgacagcagcacattgtttcactgtggatgacaaggaacactcaatcaaggtcagcgtaggaggggagaagcgggacctggagatagaagtagtcctatttcaccccaactacaacattaatgggaaaaaagaagcaggaattcctgaattttatgactatgacgttgccctgatcaagctcaagaataagctgaaatatggccagactatcaggcccatttgtctcccctgcaccgagggaacaactcgagctttgaggcttcctccaactaccacttgccagcaacaaaaggaagagctgctccctgcacaggatatcaaagctctgtttgtgtctgaggaggagaaaaagctgactcggaaggaggtctacatcaagaatggggataagaaaggcagctgtgagagagatgctcaatatgccccaggctatgacaaagtcaaggacatctcagaggtggtcacccctcggttcctttgtactggaggagtgagtccctatgctgaccccaatacttgcagagttctggcggccccttgatagttcacaagattcctgagagtagcatcacataaagagatgtggacaatttggataagcaaaatgtggcatatgcttacagtggaatattaatcagccttaaaaaggaaggagattctaatacatgcttcaatttgcttcaagcaaattgtaaaaatgtaatttggttaagataaagatataggtgtaaattctgctccttagctataaaagcaccttgaggacattatgcaaaatgaaataagcccatcacaaaaagacaaaacaccagatgatttcacttatatgaggttcttagagtaagtcagattcatagagacagaaagtagagcggtgattgcccccacctgaggagaggtgggaatggggagttgtttaatgtgattcagtactacaggagattggttgcccagcagtgtgagtggacttaatgctgcagaactgtacgtttaaaatggttaagacactaaattttatgtgtactttaccgcaatttaaaaaaattttaaagggattcagacaacttggaatactattttaatagtagaattttacatgaaacctttcttttgatggttgagaatggagagaatgctgatgtgaaacctagaatacttaaaaaatgtaaatagagaattatgaattattgataattcatgagtgaattatcatataatatgagttatcacatttgagttcataattttcagttactgcttttctattttatgctttatttattaaaatgccttttagatctggcctttctcgtctcacctgttgtatgggctgtaacacatctggcaaatggatggattgatttttagatgaaggtctgctttaatcgagtgagagtgtgaagtgtcaactctacagactttgacaaaagcacagctggggaagcagaacaattgtgtttattaaaaattacctgtatcagctgggcatggtagctcatacctgtaatcctagccctttgggaggatgagatgggaggattgcttaaggacagcttaaagaccagcctgggcaacatagcaagatcccatctctaacaacaacaacaacaaaaatcaaaaaattaggcatggtggctcatgcctgtaaacctagctactcaggaggctgaggtgggaggattgcttgtgctaaggagtttgaggcagtgatgagccgtgattatgccatggcaacagagcaagaccctgggcaacagagcaaagaaaatatctatatgtattttttaaaaataattcaaactcagccaggccagatgcctcatgcctataatcccagccctttggaatgctgagatgggcagatcacttgggctcaggagttcaagagcagcctggacaacatggcgaaaccctgtctctacaaaaattacaaaagttagccgggtgtgttggtgtgcccctgtagtcccagctgtggcggcaggctgaggtgggaggattacttgagctgaggaagtcgaggctgcagtgagctgagattgtaccactgcactctggccgagggtgactgagtgagaccctgtctcaaataataataataataataataataataataataataatcatccaaactctaagatttctatagtttttttaaatttgtaattatttcattaaagtttaggagattttagcaatgacttagctttctttaaatttgaaaacatagaaaggtttctcagtgtctccaataaaattcagtatttccatttaaaggctcctgtatgcagaaatttggaactcagcactgaaagcctgctttcacctcacacattaaagcactgtgtcatctcaggattttattttaaataacatgaagctaagtttaacatcaccttatacttatatgacctttgttgtgttagaacgctttcatgtttcataatagcagtaatatttgaaaattgttttctttctataccttcatgttataaccataattaaaagtctcattatcatctatgtttctaacaatgtgttatattattgagtacttatcttcatgtaatagtataattttttgtgatagtataaggtgctaataattgaaacaaattgccctcagcatacttagatgttaggaaagtgaaatactattttttccatgtctgttacctaaatgcaaaacagattttctgtttgagttgcccatatcatgtgcatttaggattagtcctgtataatttatagtggtgttagcggaaataaagcataaaatgtataaatcctgtattttaattgccagatgtagaaatccttaacattttcctcgtagttcttttttttttttttgacactttatgcttttt

SEQ ID NO: 337163 - DNA, 2835 bp, Homo sapiens
  misc_feature (171)..(171): n is a, c, g, or t
  misc_feature (173)..(173): n is a, c, g, or t
  misc_feature (325)..(325): n is a, c, g, or t
  misc_feature (363)..(363): n is a, c, g, or t
  misc_feature (387)..(387): n is a, c, g, or t
ggaccaaaggcaagctcttccttggcaaacaatcggctgagttccagacccagggatcactaatgcagaagcaagcatccaaactctgtttgcaaaggcttgtctagattacactgagagcattttaaagagtcattgccggctcgttcggcaagataggtactgacgggnanctggtctcaagggggttggtttgcagcttcacaagtagaggatgccaagctgccaagagcccatgaagacggtgaattgatgaaataagttaccttggactgggcaaaactaagggtgaaggtggcttcgggggtcgtggtgaaggcagagncgctttgaaggacgaggtggtggtagagaaggccgagnaggatttggtggcagaggccgggnaggctttggagggcgaggaagcttccgaggggaagggaatgtgaccaggtctaggtctggagtttcagcttggacactgagccaagcagacaagcaaagcaagccaggacacaccatcctgccccaggcccagcttctctcctgccttccaacgccatggggagcaatctcagcccccaactctgcctgatgccctttatcttgggcctcttgtctggaggtgtgaccaccactccatggtctttggcccggccccagggatcctgctctctggagggggtagagatcaaaggcggctccttccgacttctccaagagggccaggcactggagtacgtgtgtccttctggcttctacccgtaccctgtgcagacacgtacctgcagatctacggggtcctggagcaccctgaagactcaagaccaaaagactgtcaggaaggcagagtgcagagcaatccactgtccaagaccacacgacttcgagaacggggaatactggccccggtctccctactacaatgtgagtgatgagatctctttccactgctatgacggttacactctccggggctctgccaatcgcacctgccaagtgaatggccggtggagtgggcagacagcgatctgtgacaacggagcggggtactgctccaacccgggcatccccattggcacaaggaaggtgggcagccagtaccgccttgaagacagcgtcacctaccactgcagccgggggcttaccctgcgtggctcccagcggcgaacgtgtcaggaaggtggctcttggagcgggacggagccttcctgccaagactccttcatgtacgacacccctcaagaggtggccgaagctttcctgtcttccctgacagagaccatagaaggagtcgatgctgaggatgggcacggcccaggggaacaacagaagcggaagatcgtcctggacccttcaggctccatgaacatctacctggtgctagatggatcagacagcattggggccagcaacttcacaggagccaaaaagtgtctagtcaacttaattgagaaggtggcaagttatggtgtgaagccaagatatggtctagtgacatatgccacataccccaaaatttgggtcaaagtgtctgaagcagacagcagtaatgcagactgggtcacgaagcagctcaatgaaatcaattatgaagaccacaagttgaagtcagggactaacaccaagaaggccctccaggcagtgtacagcatgatgagctggccagatgacgtccctcctgaaggctggaaccgcacccgccatgtcatcatcctcatgactgatggattgcacaacatgggcggggacccaattactgtcattgatgagatccgggacttgctatacattggcaaggatcgcaaaaacccaagggaggattatctggatgtctatgtgtttggggtcgggcctttggtgaaccaagtgaacatcaatgctttggcttccaagaaagacaatgagcaacatgtgttcaaagtcaaggatatggaaaacctggaagatgttttctaccaaatgatcgatgaaagccagtctctgagtctctgtggcatggtttgggaacacaggaagggtaccgattaccacaagcaaccatggcaggccaagatctcagtcattcgcccttcaaagggacacgagagctgtatgggggctgtggtgtctgagtactttgtgctgacagcagcacattgtttcactgtggatgacaaggaacactcaatcaaggtcagcgtaggaggggagaagcgggacctggagatagaagtagtcctatttcaccccaactacaacattaatgggaaaaaagaagcaggaattcctgaattttatgactatgacgttgccctgatcaagctcaagaataagctgaaatatggccagactatcaggcccatttgtctcccctgcaccgagggaacaactcgagctttgaggcttcctccaactaccacttgccagcaacaaaaggaagagctgctccctgcacaggatatcaaagctctgtttgtgtctgaggaggagaaaaagctgactcggaaggaggtctacatcaagaatggggataagaaaggcagctgtgagagagatgctcaatatgccccaggctatgacaaagtcaaggacatctcagaggtggtcacccctcggttcctttgtactggaggagtgagtccctatgctgaccccaatacttgcagaggtgattctggcggccccttgatagttcacaagagaagtcgtttcattcaagttggtgtaatcagctggggagtagtggatgtctgcaaaaaccagaagcgccctggctgaaggagaaactccaagatgaggatttgggttttctataaggggtttcctgctggacaggggcgtgggattgaattaaaacagctgcgaacaaca

SEQ ID NO: 337164 - DNA, 4937 bp, Homo sapiens
  misc_feature (171)..(171): n is a, c, g, or t
  misc_feature (173)..(173): n is a, c, g, or t
  misc_feature (325)..(325): n is a, c, g, or t
  misc_feature (363)..(363): n is a, c, g, or t
  misc_feature (387)..(387): n is a, c, g, or t
ggaccaaaggcaagctcttccttggcaaacaatcggctgagttccagacccagggatcactaatgcagaagcaagcatccaaactctgtttgcaaaggcttgtctagattacactgagagcattttaaagagtcattgccggctcgttcggcaagataggtactgacgggnanctggtctcaagggggttggtttgcagcttcacaagtagaggatgccaagctgccaagagcccatgaagacggtgaattgatgaaataagttaccttggactgggcaaaactaagggtgaaggtggcttcgggggtcgtggtgaaggcagagncgctttgaaggacgaggtggtggtagagaaggccgagnaggatttggtggcagaggccgggnaggctttggagggcgaggaagcttccgaggggaagggaatgtgaccaggtctaggtctggagtttcagcttggacactgagccaagcagacaagcaaagcaagccaggacacaccatcctgccccaggcccagcttctctcctgccttccaacgccatggggagcaatctcagcccccaactctgcctgatgccctttatcttgggcctcttgtctggaggtgtgaccaccactccatggtctttggcccggccccagggatcctgctctctggagggggtagagatcaaaggcggctccttccgacttctccaagagggccaggcactggagtacgtgtgtccttctggcttctacccgtaccctgtgcagacacgtacctgcagatctacggggtcctggagcaccctgaagactcaagaccaaaagactgtcaggaaggcagagtgcagagcaatccactgtccaagaccacacgacttcgagaacggggaatactggccccggtctccctactacaatgtgagtgatgagatctctttccactgctatgacggttacactctccggggctctgccaatcgcacctgccaagtgaatggccggtggagtgggcagacagcgatctgtgacaacggagcggggtactgctccaacccgggcatccccattggcacaaggaaggtgggcagccagtaccgccttgaagacagcgtcacctaccactgcagccgggggcttaccctgcgtggctcccagcggcgaacgtgtcaggaaggtggctcttggagcgggacggagccttcctgccaagactccttcatgtacgacacccctcaagaggtggccgaagctttcctgtcttccctgacagagaccatagaaggagtcgatgctgaggatgggcacggcccaggggaacaacagaagcggaagatcgtcctggacccttcaggctccatgaacatctacctggtgctagatggatcagacagcattggggccagcaacttcacaggagccaaaaagtgtctagtcaacttaattgagaaggtggcaagttatggtgtgaagccaagatatggtctagtgacatatgccacataccccaaaatttgggtcaaagtgtctgaagcagacagcagtaatgcagactgggtcacgaagcagctcaatgaaatcaattatgaagaccacaagttgaagtcagggactaacaccaagaaggccctccaggcagtgtacagcatgatgagctggccagatgacgtccctcctgaaggctggaaccgcacccgccatgtcatcatcctcatgactgatggattgcacaacatgggcggggacccaattactgtcattgatgagatccgggacttgctatacattggcaaggatcgcaaaaacccaagggaggattatctggatgtctatgtgtttggggtcgggcctttggtgaaccaagtgaacatcaatgctttggcttccaagaaagacaatgagcaacatgtgttcaaagtcaaggatatggaaaacctggaagatgttttctaccaaatgatcgatgaaagccagtctctgagtctctgtggcatggtttgggaacacaggaagggtaccgattaccacaagcaaccatggcaggccaagatctcagtcattcgcccttcaaagggacacgagagctgtatgggggctgtggtgtctgagtactttgtgctgacagcagcacattgtttcactgtggatgacaaggaacactcaatcaaggtcagcgtaggaggggagaagcgggacctggagatagaagtagtcctatttcaccccaactacaacattaatgggaaaaaagaagcaggaattcctgaattttatgactatgacgttgccctgatcaagctcaagaataagctgaaatatggccagactatcaggcccatttgtctcccctgcaccgagggaacaactcgagctttgaggcttcctccaactaccacttgccagcaacaaaaggaagagctgctccctgcacaggatatcaaagctctgtttgtgtctgaggaggagaaaaggcagctgtgagagagatgctcaatatgccccaggctatgacaaagtcaaggacatctcagaggtggtcacccctcggttcctttgtactggaggagtgagtccctatgctgaccccaatacttgcagagttctggcggccccttgatagttcacaagattcctgagagtagcatcacataaagagatgtggacaatttggataagcaaaatgtggcatatgcttacagtggaatattaatcagccttaaaaaggaaggagattctaatacatgcttcaatttgcttcaagcaaattgtaaaaatgtaatttggttaagataaagatataggtgtaaattctgctccttagctataaaagcaccttgaggacattatgcaaaatgaaataagcccatcacaaaaagacaaaacaccagatgatttcacttatatgaggttcttagagtaagtcagattcatagagacagaaagtagagcggtgattgcccccacctgaggagaggtgggaatggggagttgtttaatgtgattcagtactacaggagattggttgcccagcagtgtgagtggacttaatgctgcagaactgtacgtttaaaatggttaagacactaaattttatgtgtactttaccgcaatttaaaaaaattttaaagggattcagacaacttggaatactattttaatagtagaattttacatgaaacctttcttttgatggttgagaatggagagaatgctgatgtgaaacctagaatacttaaaaaatgtaaatagagaattatgaattattgataattcatgagtgaattatcatataatatgagttatcacatttgagttcataattttcagttactgcttttctattttatgctttatttattaaaatgccttttagatctggcctttctcgtctcacctgttgtatgggctgtaacacatctggcaaatggatggattgatttttagatgaaggtctgctttaatcgagtgagagtgtgaagtgtcaactctacagactttgacaaaagcacagctggggaagcagaacaattgtgtttattaaaaattacctgtatcagctgggcatggtagctcatacctgtaatcctagccctttgggaggatgagatgggaggattgcttaaggacagcttaaagaccagcctgggcaacatagcaagatcccatctctaacaacaacaacaacaaaaatcaaaaaattaggcatggtggctcatgcctgtaaacctagctactcaggaggctgaggtgggaggattgcttgtgctaaggagtttgaggcagtgatgagccgtgattatgccatggcaacagagcaagaccctgggcaacagagcaaagaaaatatctatatgtattttttaaaaataattcaaactcagccaggccagatgcctcatgcctataatcccagccctttggaatgctgagatgggcagatcacttgggctcaggagttcaagagcagcctggacaacatggcgaaaccctgtctctacaaaaattacaaaagttagccgggtgtgttggtgtgcccctgtagtcccagctgtggcggcaggctgaggtgggaggattacttgagctgaggaagtcgaggctgcagtgagctgagattgtaccactgcactctggccgagggtgactgagtgagaccctgtctcaaataataataataataataataataataataataataatcatccaaactctaagatttctatagtttttttaaatttgtaattatttcattaaagtttaggagattttagcaatgacttagctttctttaaatttgaaaacatagaaaggtttctcagtgtctccaataaaattcagtatttccatttaaaggctcctgtatgcagaaatttggaactcagcactgaaagcctgctttcacctcacacattaaagcactgtgtcatctcaggattttattttaaataacatgaagctaagtttaacatcaccttatacttatatgacctttgttgtgttagaacgctttcatgtttcataatagcagtaatatttgaaaattgttttctttctataccttcatgttataaccataattaaaagtctcattatcatctatgtttctaacaatgtgttatattattgagtacttatcttcatgtaatagtataattttttgtgatagtataaggtgctaataattgaaacaaattgccctcagcatacttagatgttaggaaagtgaaatactattttttccatgtctgttacctaaatgcaaaacagattttctgtttgagttgcccatatcatgtgcatttaggattagtcctgtataatttatagtggtgttagcggaaataaagcataaaatgtataaatcctgtattttaattgccagatgtagaaatccttaacattttcctcgtagttcttttttttttttttgacactttatgcttttt

SEQ ID NO: 337165 - DNA, 2559 bp, Homo sapiens
  misc_feature (171)..(171): n is a, c, g, or t
  misc_feature (173)..(173): n is a, c, g, or t
  misc_feature (325)..(325): n is a, c, g, or t
  misc_feature (363)..(363): n is a, c, g, or t
  misc_feature (387)..(387): n is a, c, g, or t
  misc_feature (2329)..(2329): n is a, c, g, or t
  misc_feature (2468)..(2468): n is a, c, g, or t
ggaccaaaggcaagctcttccttggcaaacaatcggctgagttccagacccagggatcactaatgcagaagcaagcatccaaactctgtttgcaaaggcttgtctagattacactgagagcattttaaagagtcattgccggctcgttcggcaagataggtactgacgggnanctggtctcaagggggttggtttgcagcttcacaagtagaggatgccaagctgccaagagcccatgaagacggtgaattgatgaaataagttaccttggactgggcaaaactaagggtgaaggtggcttcgggggtcgtggtgaaggcagagncgctttgaaggacgaggtggtggtagagaaggccgagnaggatttggtggcagaggccgggnaggctttggagggcgaggaagcttccgaggggaagggaatgtgaccaggtctaggtctggagtttcagcttggacactgagccaagcagacaagcaaagcaagccaggacacaccatcctgccccaggcccagcttctctcctgccttccaacgccatggggagcaatctcagcccccaactctgcctgatgccctttatcttgggcctcttgtctggaggtgtgaccaccactccatggtctttggcccggccccagggatcctgctctctggagggggtagagatcaaaggcggctccttccgacttctccaagagggccaggcactggagtacgtgtgtccttctggcttctacccgtaccctgtgcagacacgtacctgcagatctacggggtcctggagcaccctgaagactcaagaccaaaagactgtcaggaaggcagagtgcagagcaatccactgtccaagaccacacgacttcgagaacggggaatactggccccggtctccctactacaatgtgagtgatgagatctctttccactgctatgacggttacactctccggggctctgccaatcgcacctgccaagtgaatggccggtggagtgggcagacagcgatctgtgacaacggagcggggtactgctccaacccgggcatccccattggcacaaggaaggtgggcagccagtaccgccttgaagacagcgtcacctaccactgcagccgggggcttaccctgcgtggctcccagcggcgaacgtgtcaggaaggtggctcttggagcgggacggagccttcctgccaagactccttcatgtacgacacccctcaagaggtggccgaagctttcctgtcttccctgacagagaccatagaaggagtcgatgctgaggatgggcacggcccaggggaacaacagaagcggaagatcgtcctggacccttcaggctccatgaacatctacctggtgctagatggatcagacagcattggggccagcaacttcacaggagccaaaaagtgtctagtcaacttaattgagaaggtggcaagttatggtgtgaagccaagatatggtctagtgacatatgccacataccccaaaatttgggtcaaagtgtctgaagcagacagcagtaatgcagactgggtcacgaagcagctcaatgaaatcaattatgaagaccacaagttgaagtcagggactaacaccaagaaggccctccaggcagtgtacagcatgatgagctggccagatgacgtccctcctgaaggctggaaccgcacccgccatgtcatcatcctcatgactgatggattgcacaacatgggcggggacccaattactgtcattgatgagatccgggacttgctatacattggcaaggatcgcaaaaacccaagggaggattatctggatgtctatgtgtttggggtcgggcctttggtgaaccaagtgaacatcaatgctttggcttccaagaaagacaatgagcaacatgtgttcaaagtcaaggatatggaaaacctggaagatgttttctaccaaatgatcgatgaaagccagtctctgagtctctgtggcatggtttgggaacacaggaagggtaccgattaccacaagcaaccatggcaggccaagatctcagtcattcgcccttcaaagggacacgagagctgtatgggggctgtggtgtctgagtactttgtgctgacagcagcacattgtttcactgtggatgacaaggaacactcaatcaaggtcagcgtaggaggggagaagcgggacctggagatagaagtagtcctatttcaccccaactacaacattaatgggaaaaaagaagcaggaattcctgaattttatgactatgacgttgccctgatcaagccgggcctttggtgaaccaagtgaacatcaatgctttggcttncaagaaagacaatgagcaacatgtgttcaaagtcaaggatatggaaaacctggaagatgttttctaccaaatgatcgatgaaagccagtctctgagtctctgtggcatggtttgggaacacaggaagggtaccgattancacaagcaaccatggcaggccaagatctcagtcaattcgcccttcaaagggacacgagagctgtttgggggcttgggtgtttgagtacttt

SEQ ID NO: 337166 - DNA, 1539 bp, Homo sapiens
  misc_feature (171)..(171): n is a, c, g, or t
  misc_feature (173)..(173): n is a, c, g, or t
  misc_feature (325)..(325): n is a, c, g, or t
  misc_feature (363)..(363): n is a, c, g, or t
  misc_feature (387)..(387): n is a, c, g, or t
ggaccaaaggcaagctcttccttggcaaacaatcggctgagttccagacccagggatcactaatgcagaagcaagcatccaaactctgtttgcaaaggcttgtctagattacactgagagcattttaaagagtcattgccggctcgttcggcaagataggtactgacgggnanctggtctcaagggggttggtttgcagcttcacaagtagaggatgccaagctgccaagagcccatgaagacggtgaattgatgaaataagttaccttggactgggcaaaactaagggtgaaggtggcttcgggggtcgtggtgaaggcagagncgctttgaaggacgaggtggtggtagagaaggccgagnaggatttggtggcagaggccgggnaggctttggagggcgaggaagcttccgaggggaagggaatgtgaccaggtctaggtctggagtttcagcttggacactgagccaagcagacaagcaaagcaagccaggacacaccatcctgccccaggcccagcttctctcctgccttccaacgccatggggagcaatctcagcccccaactctgcctgatgccctttatcttgggcctcttgtctggaggtgtgaccaccactccatggtctttggcccggccccagggatcctgctctctggagggggtagagatcaaaggcggctccttccgacttctccaagagggccaggcactggagtacgtgtgtccttctggcttctacccgtaccctgtgcagacacgtacctgcagatctacggggtcctggagcaccctgaagactcaagaccaaaagactgtcaggaaggcagagtgcagagcaatccactgtccaagaccacacgacttcgagaacggggaatactggccccggtctccctactacaatgtgagtgatgagatctctttccactgctatgacggttacactctccggggctctgccaatcgcacctgccaagtgaatggccggtggagtgggcagacagcgatctgtgacaacggagcggggtactgctccaacccgggcatccccattggcacaaggaaggtgggcagccagtaccgccttgaagacagcgtcacctaccactgcagccgggggcttaccctgcgtggctcccagcggcgaacgtgtcaggaaggtggctcttggagcgggacggagccttcctgccaagactccttcatgtacgacacccctcaagaggtggccgaagctttcctgtcttccctgacagagaccatagaaggagtcgatgctgaggatgggcacggcccaggggaacaacagaagcggaagatcgtcctggacccttcaggctccatgaacatctacctggtgctagatggatcagacagcattggggccagcaacttcacaggagccaaaaagtgtctagtcaacttaattgagaaggtggaatcctcctatccctgaactcgggggaatggaatctcgctgatcttccaggactagctccctgatcattccagcccctctgaaccagggccccgg

SEQ ID NO: 337167 - DNA, 194 bp, Homo sapiens
cgggctttgggaggccacggcaagaggatctcttgaggccaagagtttgagacaatagagcaacatagataggcaatatagcaagactgccgtctctacaagaaaatttttaaaaattgccaggcatggtggtgcatctgtggtcccaactactcaggaggctgaggcaggaggatctctcgagcctgggattt

SEQ ID NO: 337168 - DNA, 303 bp, Homo sapiens
ttcagaaccacctgacagacacaggggtcatatggggctaggtcgaaagatcagcttgattaataatggattggtggatgtagcctgggtatacagcttcctagtactagactcctacatcagagacatccattctccaaccattcacgagaagaactggccagacaccgtaggctttctcattagggcaggagctcagcacatggcatgtccacactgaaagaatgagaggaaaaaatgaatggaaaatacaggtggtattgaagaaagagcactcttcctgtggggggtcagatccaaaat

SEQ ID NO: 337169 - DNA, 371 bp, Homo sapiens
ccaggaggcagaggttgcagtgagccgagatcgcaccactgcactccagcctagtcgacaaagcgagactcagtctcaaaaattaataaacacacacaaagttagtcatatttatttcatttgtatacatgggaaaatttggagagacaatttagaaagaactaccattttaggctgggtgcagtggctcacgcctgtaatcccagtactttaggaggccaaggcgggcggatcacgaggtcaggagatcgagaccatcctggccaacatggtgaaaccccgtctctactaaaaatacaaaaaattagccaggcatgatggcgggcgcctgtagtcccagctactcaggaggctgaggcaggagaaccgcg

SEQ ID NO: 337170 - DNA, 805 bp, Homo sapiens
cagaggatccccaaagccatgtctctaaagccatctctgctaaaaatatgaaaattagctgggattacaggtgtgcgccactaccacccggctaatttctttatttttagtagaaacggggtttcaccatattggccaggctggtctctaactcctgacctcaaatgattcacctgcctcagcctcgaaaactgctgggattacaggcgtgagccaccacgtctgacctatccattcatatgttgatggacgtttggattatttccaaggtatgctacttttttatagctcttaaaatttttccaaattcctctccagaaatgtactttatcatcacctgtggtacatcagggtattttccactttagacattcttgatctattgtctgagtacttgaagtggtgtgactgtaggctgactgttgaatgaagctgaaaggggggttttaatagcaggtcacaaacttggatagaagaggagatgtctctcgggctggttggatatataataagttctggaaggccacatgctggtgatgatgtcatccagaaagggtttggtactgaatttctgttcaggaacgttccttgtcagggatgttagggatctgccttgtcaactgtagtccttcgtcagcctcttcagaagttgatgcccacttagctcttgaagcaggtgttctaagtaaataatattttgtactcttatattctgtggattagttgtaggtacatgctgttgtgaaaataaattcatttgacttctctgtatcttgattgtggaggtgatcacacaactgttatt

SEQ ID NO: 337171 - DNA, 365 bp, Homo sapiens
gagtggggaacagacttgggtggaaaatgtaaagaaatagcatgttgagaagaaattaaaaagttaaagtgccctaccaataaatcactaaagaatttcactggctgggtgcagtggctcacacctgtaatcccagcactttgggaggccaaggtggatatcacttgagctcaggagtttgagaccaacctggccatcatggccaaaccctgtctctactaaaaatacaaaattagccgagcttggtggtgtgcacctctcgtctcagctactcaggaggctaaggcaggagaatcacttgaacccaggaggcagaggttacagtgagccgagattgctccattgcactccagccttggcaacaa

SEQ ID NO: 337172 - DNA, 524 bp, Homo sapiens
ggacatggttctggtttcaaattctagacttccctgttctaccactgggctacctgtagaacttgggtaagtgacctaacctttgtgagtcttaattacagtagttacctcatacagtggttgacaggtttaaatgtacaaaaaacagtgtagagttctctacataatgtaatcactctgacagccaagccattctctttactctactcatcattatcaatttctgtgattactattacattatggttattactggtatttgttgttattgtgtagtccttcctttttctctgtctcttcattctatattccttctttccttttacctctacctcttcttcctcccatctttcttcctcttactccttcacaccctcctgtgctgggccttgtattgggagatctctctgaaggtgaaccacattctcaagtcagaaaggaagacccttagatttccatccatctctgtaggaagccaatcacaggaaaattgcttagaccccaatctttcctgcaaaaacaag

SEQ ID NO: 337173 - DNA, 471 bp, Homo sapiens
tagagaacagaaaagaaagaacaaaacacagctgttttccatgttcttagaacaattactgccaaagtttcctcgaattgcaagaggctgaggtcctatgcagtgaaggcttaagcaaacaaaggttagggatttctcttagttaatgagatggcagatgtcagctcaattgtgtgcatacgttaggctgatctgatcgctgggcggtacatccacaaagctcaaaatcggtgccacagtgtctccttaatttcctccgaggaagaaaactagtccatttagactaattcccatataaaatttacacaacaatcaatacaaataatgccttaacctagaaacaaaagcaataaaatctagaactggaaagaactacctttctttatcccttaaaaaaaaattccgctttagaatgtgtggaaaaaggcaataaaatttttttttaaagaaaaagaaggccgggtgcagtgg

SEQ ID NO: 337174 - DNA, 308 bp, Homo sapiens
catggggcatcttcccccgagtgcaggcctggctccacttcttcctgccggtgaccctggacaaggattttaccgtttgtcctgtcttcctagctttttgagaaccactggcagaggtgggtgtgaaagcgatagtaaaacatccataagggactgaggagcttactgtgaattggacttgaaaaggaaacctcagaaattatccacacacagggatttatacacaaacctacaggatacacacgtgccgaggcttaaaggaggctgtactttttacaccctctgcagagtcggacgtgaccaacccg

SEQ ID NO: 337175 - DNA, 444 bp, Homo sapiens
cctattgcccaaattgtttggattaactccactagtagatatatttccacagcagtgaattttcagtcaatagaattacagaggaacctaataaggaagtaagtaatgtgggaagatcgagataagacagggtaggtatttcacttgaccagtgaaacatgaaaatgctcttgggaagccagggcaattctgaattacgttaatggaagactctattcaatgtacttgactactcttcttgcccattttattctctgacttatgaggattaattataactctactaacctgtattttcttgtttagcctattccaggtccttaattctggactaggcatataatttcacaatatacaccaaaaaggctttaatgaagtataaagggatgtaaaaaattcttctaaatcttccctttccctgtaggatatttgtttaaaaatcat

SEQ ID NO: 337176 - DNA, 316 bp, Homo sapiens
cggtaccccctagttttagaagtttcaatagcaagaaaaaattagccaggcatggtggcacgtgcctgtaatcgtagatagtcgggaatctgaggcacgagggtcgcttgagccctagttttagaagtttcaataccagagatttcctgcagagacttgacttgcagattaagttatcaacacaggcagccaagaagctaaaagaagagagcagagatgaagaaagtccatcttaaaatcataactaggtagtttaggtgttggcctcagcctaaccctctaggacgaaagccttgtctgtggggaattttggatg

SEQ ID NO: 337177 - DNA, 2132 bp, Homo sapiens
gcaatacggggcagggagatgcgatttcagggtgtcaaagaataaactgacgaagagaagatgaatgcagacagtaaattccaactactgagcctggagaatgaattgtatgtggccagcctttcgaggcagccaggacttaaattggcactagtgtacaaagtgtgaaacccgaacaactaggggggttattttgaggccacccattaggccttagaagcactatccctcctagtgcaatgttgaaaggactggactctgaggctgttgagatggacctggagaagctgtctgtgtgtgtttgatgatcttaagttttactgtgacgtggactttgaggtcactggggtggggggagggaagtacccttggcattggcagagctggaaggtctgtgcaagctggctcctgctggggaatcaataaaggaggcagagcaacgctttttttttttttcgccgtggccagggcagggttctgccagggctctatcgccaatggagcaggggtccacctggggcctaggacgcctgcagatagccctctcttagccccaacggccgcgggcttcagcgctccccggctccctcgctctgcagggtcttcccggtaccggcaggccgcggcgggagctgctttcgctcttaaccttgcaggtgcgtgtgccgcgggacgcccggggcaggcaggacgcagaggaggaggcgcccgccatgcccggcctgcggctccccgcctcggcttcccgtccgccgcccccgcggaacggcctgctgcagcccctgtgaagaggaagaggcggcggcggcggcggaggaggaggaggcgccgcccccttggcaagctccccgacccggcggcctcggcaggacccatggcggattcctcgcccgcactgtccctgcgggaaggcggcccccgcgcgccgcggccctcggccccctcgccgccgccgcgctcgcgctccggctccgagtccgaggaggccgagctgtcgctgagcctggcccgcaccaagacccgctcgtacggcagcaccgccagcgtgcgggcgccgctgggcgccggcgtcatcgagcgccatgtggagcaccgggtccgcgcgggcgacacgctgcagggcatcgcgctcaagtacggtgtcacgatggaacagattaaaagggccaataaactgtttaccaatgattgtatatttctgaagaaaactttgaacatcccagttatatcagagaagcctttgttgtttaatggacttaactccattgattctccagaaaatgaaactgctgataacagtttttctcaggaagaggagccagtggtggccggggaagacctccctcctcccagtcctcaagaatctgatgttcagcctgtgcagcctgaggaagtgtcagccagagatttcctgcagagacttgacttgcagattaagttatcaacacaggcagccaagaagctaaaagaagagagcagagatgaagaaagtccctatgcaacttccctctatcacagttaggtgatttgggggcataactctaaccaaaattaagatatgtttggaccataaagaatccaacaactgaagattcaaaaacatcccttctggattcctatagtgtccatcttaaaatcataactaggtagttctacctgctgcagttgcactgaagtgattagttccctctggctttctataattttaagtctttattatggcatgatggcaaggttgtagcctaaagctcatcacttttgtaggtggtgttagtttttagactagcttttataaatactaattgacataaagcatcaaagattatttatatatttaggctaaaaataatgtttatctccttatgcaatcctgattatgtgaaaatatggttgctgtttaagtgatgctgaatttgctgtgtgtttataacttaagtgctatatatatatttcgatatgtcttacatattctctattaatataaagaaccaaattttgtctgctattttgtaaaaataaactacaaaagcctgaatgagaaaataaactatgttttcaaacttgagtctcctttttttttttaacaaatgagaaaataaaattgacttttaaattatacatttaaatgctga

SEQ ID NO: 337178 - DNA, 1304 bp, Homo sapiens
agcgggccgggcgcggcgccggggcgcgcggctgcagcggagcaggctgggaagcgtagttcccggctgagcctcgccgcggccccgcagtcccccagccccgcccttccccgacaggtgtcctctcccggaatcggggtctgaaccccgccacagctctgcaggggaggaagcacctgggtcggggagaagcctgggcaggctctttggagacgctcggggctccggagagcgtggatggcaaaggctttcaagcctgtgatgagcattcctgtgagcgagcatcctgacacggaagccgcgttgagagcggtctcagatggaacagattaaaagggccaataaactgtttaccaatgattgtatatttctgaagaaaactttgaacatcccagttatatcagagaagcctttgttgtttaatggacttaactccattgattctccagaaaatgaaactgctgataacagtttttctcaggaagaggagccagtggtggccggggaagacctccctcctcccagtcctcaagaatctgatgttcagcctgtgcagcctgaggaagtgtcagccagagatttcctgcagagacttgacttgcagattaagttatcaacacaggcagccaagaagctaaaagaagagagcagagatgaagaaagtccctatgcaacttccctctatcacagttaggtgatttgggggcataactctaaccaaaattaagatatgtttggaccataaagaatccaacaactgaagattcaaaaacatcccttctggattcctatagtgtccatcttaaaatcataactaggtagttctacctgctgcagttgcactgaagtgattagttccctctggctttctataattttaagtctttattatggcatgatggcaaggttgtagcctaaagctcatcacttttgtaggtggtgttagtttttagactagcttttataaatactaattgacataaagcatcaaagattatttatatatttaggctaaaaataatgtttatctccttatgcaatcctgattatgtgaaaatatggttgctgtttaagtgatgctgaatttgctgtgtgtttataacttaagtgctatatatatatttcgatatgtcttacatattctctattaatataaagaaccaaattttgtctgctattttgtaaaaataaactacaaaagcctgaatgagaaaataaactatgttttcaaacttgagtctcctttttttttttaacaaatgagaaaataaaattgacttttaaattatacatttaaatgctga

SEQ ID NO: 337179 - DNA, 1046 bp, Homo sapiens
  misc_feature (31)..(31): n is a, c, g, or t
atgaatttatattagattatataaaaacaanaaactccccccccaacctactaggcacagcatggaacagattaaaagggccaataaactgtttaccaatgattgtatatttctgaagaaaactttgaacatcccagttatatcagagaagcctttgttgtttaatggacttaactccattgattctccagaaaatgaaactgctgataacagtttttctcaggaagaggagccagtggtggccggggaagacctccctcctcccagtcctcaagaatctgatgttcagcctgtgcagcctgaggaagtgtcagccagagatttcctgcagagacttgacttgcagattaagttatcaacacaggcagccaagaagctaaaagaagagagcagagatgaagaaagtccctatgcaacttccctctatcacagttaggtgatttgggggcataactctaaccaaaattaagatatgtttggaccataaagaatccaacaactgaagattcaaaaacatcccttctggattcctatagtgtccatcttaaaatcataactaggtagttctacctgctgcagttgcactgaagtgattagttccctctggctttctataattttaagtctttattatggcatgatggcaaggttgtagcctaaagctcatcacttttgtaggtggtgttagtttttagactagcttttataaatactaattgacataaagcatcaaagattatttatatatttaggctaaaaataatgtttatctccttatgcaatcctgattatgtgaaaatatggttgctgtttaagtgatgctgaatttgctgtgtgtttataacttaagtgctatatatatatttcgatatgtcttacatattctctattaatataaagaaccaaattttgtctgctattttgtaaaaataaactacaaaagcctgaatgagaaaataaactatgttttcaaacttgagtctcctttttttttttaacaaatgagaaaataaaattgacttttaaattatacatttaaatgctga

SEQ ID NO: 337180 - DNA, 2468 bp, Homo sapiens
gcaatacggggcagggagatgcgatttcagggtgtcaaagaataaactgacgaagagaagatgaatgcagacagtaaattccaactactgagcctggagaatgaattgtatgtggccagcctttcgaggcagccaggacttaaattggcactagtgtacaaagtgtgaaacccgaacaactaggggggttattttgaggccacccattaggccttagaagcactatccctcctagtgcaatgttgaaaggactggactctgaggctgttgagatggacctggagaagctgtctgtgtgtgtttgatgatcttaagttttactgtgacgtggactttgaggtcactggggtggggggagggaagtacccttggcattggcagagctggaaggtctgtgcaagctggctcctgctggggaatcaataaaggaggcagagcaacgctttttttttttttcgccgtggccagggcagggttctgccagggctctatcgccaatggagcaggggtccacctggggcctaggacgcctgcagatagccctctcttagccccaacggccgcgggcttcagcgctccccggctccctcgctctgcagggtcttcccggtaccggcaggccgcggcgggagctgctttcgctcttaaccttgcaggtgcgtgtgccgcgggacgcccggggcaggcaggacgcagaggaggaggcgcccgccatgcccggcctgcggctccccgcctcggcttcccgtccgccgcccccgcggaacggcctgctgcagcccctgtgaagaggaagaggcggcggcggcggcggaggaggaggaggcgccgcccccttggcaagctccccgacccggcggcctcggcaggacccatggcggattcctcgcccgcactgtccctgcgggaaggcggcccccgcgcgccgcggccctcggccccctcgccgccgccgcgctcgcgctccggctccgagtccgaggaggccgagctgtcgctgagcctggcccgcaccaagacccgctcgtacggcagcaccgccagcgtgcgggcgccgctgggcgccggcgtcatcgagcgccatgtggagcaccgggtccgcgcgggcgacacgctgcagggcatcgcgctcaagtacggtgtcacgatggaacagattaaaagggccaataaactgtttaccaatgattgtatatttctgaagaaaactttgaacatcccagttatatcagagaagcctttgttgtttaatggacttaactccattgattctccagaaaatgaaactgctgataacagtttttctcaggaagaggagccagtggtggccggggaagacctccctcctcccagtcctcaagaatctgatgttcagcctgtgcagcctgaggaagtgtcagccagagatttcctgcagagacttgacttgcagattaagttatcaacacaggcagccaagaagctaaaagaagagagcagagatgaagaaagtccctatgcaacttccctctatcacagttaggtgatttgggggcataactctaaccaaaattaagatatgtttggaccataaagaatccaacaactgaagattcaaaaacatcccttctggattcctatagtgtccatcttaaaatcataactaggtagttctacctgctgcagttgcactgaagtgattagttccctctggctttctataattttaagtctttattatggcatgatggcaaggttgtagcctaaagctcatcacttttgtaggtggtgttagtttttagactagcttttataaatactaattgacataaagcatcaaagattatttatatatttaggctaaaaataatgtttatctccttatgcaatcctgattatgtgaaaatatggttgctgtttaagtgatgctgaatttgctgtgtgtttataacttaagtgctatatatatatttcgatatgtcttacatattctctattaatataaagaaccaaattttgtctgctattttgtaaaaataaactacaaaagcctgaatgagaaaataaactatgttttcaaaaaaaaaaaaaaaaaaaaaaaaaacaaaaaaaaaaaacacaaacaacaaaaaaaagcaacgaaaaaacacaaaaaaaaaaaaaagaagaggaacaacacgggggcgggggccgccatgacagacgcggggcccacaccgcggacaataaaaatacatatatatcagaaaaaagacgtcataaataataatcagaggtgctgcttataagaagatttaagatagagagtagagtatattataagggctatagttatggaatttaatatggtgaaaatatatttcaaagaaacaaaactcaggatgagtagtacaagaataatctcacaacgttgtcaagatttatacgagatagagctagaataaatctaaggttgtatagtgtttacaatctagttaataaagtatatg

SEQ ID NO: 337181 - DNA, 2205 bp, Homo sapiens
gcaatacggggcagggagatgcgatttcagggtgtcaaagaataaactgacgaagagaagatgaatgcagacagtaaattccaactactgagcctggagaatgaattgtatgtggccagcctttcgaggcagccaggacttaaattggcactagtgtacaaagtgtgaaacccgaacaactaggggggttattttgaggccacccattaggccttagaagcactatccctcctagtgcaatgttgaaaggactggactctgaggctgttgagatggacctggagaagctgtctgtgtgtgtttgatgatcttaagttttactgtgacgtggactttgaggtcactggggtggggggagggaagtacccttggcattggcagagctggaaggtctgtgcaagctggctcctgctggggaatcaataaaggaggcagagcaacgctttttttttttttcgccgtggccagggcagggttctgccagggctctatcgccaatggagcaggggtccacctggggcctaggacgcctgcagatagccctctcttagccccaacggccgcgggcttcagcgctccccggctccctcgctctgcagggtcttcccggtaccggcaggccgcggcgggagctgctttcgctcttaaccttgcaggtgcgtgtgccgcgggacgcccggggcaggcaggacgcagaggaggaggcgcccgccatgcccggcctgcggctccccgcctcggcttcccgtccgccgcccccgcggaacggcctgctgcagcccctgtgaagaggaagaggcggcggcggcggcggaggaggaggaggcgccgcccccttggcaagctccccgacccggcggcctcggcaggacccatggcggattcctcgcccgcactgtccctgcgggaaggcggcccccgcgcgccgcggccctcggccccctcgccgccgccgcgctcgcgctccggctccgagtccgaggaggccgagctgtcgctgagcctggcccgcaccaagacccgctcgtacggcagcaccgccagcgtgcgggcgccgctgggcgccggcgtcatcgagcgccatgtggagcaccgggtccgcgcgggcgacacgctgcaggggacattcggcggcttcaaggtccggggtggtcacggattgggaaccaggaatttagagggggggccaattaaacctgttttacccacagttgactgggtactattttcctgaaacgaaaactcttttgtggaaccattccccaggtttatattccaggaggaaagcctttgtgtggtttacacgtgggacttaacgctccatgtgatttcttccgagagagaagtggacaacggggtgtgattacagcagtttttctcaggaagaggagccagtggtggccggggaagacctccctcctcccagtcctcaagaatctgatgttcagcctgtgcagcctgaggaagtgtcagccagagatttcctgcagagacttgacttgcagattaagttatcaacacaggcagccaagaagctaaaagaagagagcagagatgaagaaagtccctatgcaacttccctctatcacagttaggtgatttgggggcataactctaaccaaaattaagatatgtttggaccataaagaatccaacaactgaagattcaaaaacatcccttctggattcctatagtgtccatcttaaaatcataactaggtagttctacctgctgcagttgcactgaagtgattagttccctctggctttctataattttaagtctttattatggcatgatggcaaggttgtagcctaaagctcatcacttttgtaggtggtgttagtttttagactagcttttataaatactaattgacataaagcatcaaagattatttatatatttaggctaaaaataatgtttatctccttatgcaatcctgattatgtgaaaatatggttgctgtttaagtgatgctgaatttgctgtgtgtttataacttaagtgctatatatatatttcgatatgtcttacatattctctattaatataaagaaccaaattttgtctgctattttgtaaaaataaactacaaaagcctgaatgagaaaataaactatgttttcaaacttgagtctcctttttttttttaacaaatgagaaaataaaattgacttttaaattatacatttaaatgctga

SEQ ID NO: 337182 - DNA, 495 bp, Homo sapiens
tagtgttgtaatagatttatttgcttccattgttctgatagcattctggatggatggtgagaatatgaaatccatttcctcccaaagcattcaatggtgttttggtgtttagaaagaaaaagctgcaagttttgtggtcttcctctccaacataccaacttccctccccacttaacacccatgggagtgggcaggagtggtgtctcagtccaatttctggcattatgacagaataccaaagacgggataatttataaagaaagatttatttggatcacagttctggaggctgggaagtccaggagcatggcactggcatctggtgaagtcatcccatggtggaaggcatcacatggcaagcaagcatgcaagacagaggaaaaaggggccaaacacgcaaaagctaacccactctcaaggtaatggcattaattttttcatgagggtgaagcccttatgacccaatcacctccaaaaggcctcacctcttcacat

SEQ ID NO: 337183 - DNA, 360 bp, Homo sapiens
ctgggcgcggtggctcacgcctgtaatcctagcactttgggaggccaaagtggacggattgcctgagctcaagagttcaagaccactctgggcaacgtagcaaaaccccatctctactaaaaatacaaaaaaaaattagctgggcgtggtggtgtgcagctgtagtcccagctactcaggaggctgaggcactagaattacttgaacctgggaggtggaggttgcagtgagctgagatcgcgccactgccctccagcctaggcgacacagtgagactgtctctaaaacaaaaacaaaacaacagaaaaaacagactttcctattcactgaaatatctcattgaatatcagtccccaacgt

SEQ ID NO: 337184 - DNA, 468 bp, Homo sapiens
aggccgtttaggcgtgtctttgatgctgacacttccacacccagcactctggtgccccttactaactggtttatctctgcacactgccctcccaggaacctaattaagttgtaggcctgtgtgaggccagctgctgctggaccatcagcatctctcttccaggacccctaggtctctccaaatggcacagagttccctggggcagaaagacgggctaatcccattgttgggaagtcaggtgcggagtgtctgtgttgaatgattacaagcatgaagatgatttttgaatctcacagagggatgctctgcatatttcctctctgctttcagccatttcctaggttatacacagtttggctctgctccaaaaagagaaaacataagtaataggacagtaggcctgttttcaatttgtaatgcatttttttctgccacccgtcacaattagatttcactcatcgcctcctg

SEQ ID NO: 337185 - DNA, 331 bp, Homo sapiens
ctccctaagaggttgtaatttatactccaagcgagcaatgtgcctccttctacatacgtaatactcaacttatatagccaaagtaagccaactgtatggtgggggagataacagaaaaaaaaagtgttcatttttatgtaagagaagtaggatttttctcatgatttaatgtcatattaaacatttaaaattaaaatattatttctacaaagtttcagcaaatgagttaagtaaacaaagctaagtgattaggaaaactcctagttattaaaagactgtggaaaaattagtgtatttaaaaagccatgtatttctctggaggttatggcat

SEQ ID NO: 337186 - DNA, 123 bp, Homo sapiens
ctgacctattgcatcagtctgatgcgggaagtgctgtaattttcattttacatgaagctgaggccagggaggaagttgtcatttgtgtaaggtgatggaacttaatgaatgactcctagggtt

SEQ ID NO: 337187 - DNA, 165 bp, Homo sapiens
ggaccaggcaattatattagggaaaacagataagtttgtgggttgccaaataaagaagcaatcacagagataaaagcaggcactttccccaaacggaaagcataactaaatcattcatcagcttcccatgcagagctcaggcacctgatctggagacaaataagg

SEQ ID NO: 337188 - DNA, 303 bp, Homo sapiens
gaaatcagaaatttggatgactagaagtcctttaacatttgagagggattcttatccatcattcagctggcggagtgaccatcaattggtggacgtaaatggaaggagcagtgggaatgtgcttcactgctgcagggatctgatgcaaaggaggttttggggatgcacccgtgttctcatgaccgagggggctcctagcaccgagtcatgaggcctctcactcccagcagaaaagcttttcgccctaatggacagtgccaggactcacagcatggccattgttctgaaactccagctctgcca

SEQ ID NO: 337189 - DNA, 301 bp, Homo sapiens
ctcttcaagcagtccctgcccccgatgtattacagacgaagtagttcctctccctttcagacacagctctggagccaggattctgggaataaggccacttaaacacgccctgtttcccctctgctcccaactgtgacctgctactactgcctgagtcaagcagaggctggggcagtgggtgggtgggacctggctgccacaggtgagaggctatgtctgaggtggaggctcccaggggaaccctggggcaggctggcccatcatgggaccccagggagaaggcagtgtggcttttgtatcc

SEQ ID NO: 337190 - DNA, 389 bp, Homo sapiens
ctgttttttctttaaaactaacattataatgactcaaatgaggaacagggatttgaatgctcagcaatctcttctgtgtaaaaacaaagactgatgctcagcagcacatgcttaagaatttaaattaatgacactttcagtctcctagtatttaaaaacagcagagaaagccaaggagaggaacgacttcaaacatcagaatcccctcccatccactggaattctttcctttcaggtctgttgttcattgtcaagctaactgaaggagcagagacgggacagggtggctttaaggtggagagcacagcttaccacccaggttttccaacaaccagttccaaagtgacaattcccaatcctcagtttttctggtgctatccattctacgg

SEQ ID NO: 337191 - DNA, 460 bp, Homo sapiens
cggactgagagttgatgcggcctattggctgggagctcagctggacagttggtcagagagtctatgtatctcttctcctgcatggtggtctcagagtagtataacattttacatggtggctgacttcccccaaggaaggtaactcatgagaaccaaggatagtatggcctttactgacctagcttggaatttcatagccctacttctgcttaattctattagtaaaaagcacatcactggccgggtgcagtggctcacacctgtaatcccagcactttgggaggccaaggtgggctgatcatctgaggtcaggcgttcgagaccagcctgaccaacatggagaaaccccgtctcttctaaaaatacaaaattagctgggtatggtggcgcatgcctgtaatcccagctacttgggaggctgaggcaggagaatcactcgaacccttggggtggaggttgc

SEQ ID NO: 337192 - DNA, 6254 bp, Homo sapiens
ctccccgccagtccgggcgaacgcggccgggcccttggggaccgagtctcggcgccgccggggaacgggcgcgggccgcgccacagccggagcggggcagggccccgccaccgccttcttccgccggccccgccgccggccatgcattcttccggctcctctgactcccaaagccccggctggggcccggccagcccgagaaagacaggacggagtccagtgtgagaatggctataactttggaagaagctccgtggctgggctggctcttggtgaaagcactgatgaggtttgccttcatggtcgtcaacaacctggttgctattccatcctacatctgctatgtaattatacttcagccccttcgagtgctggacagtaagcggttctggtatatcgaaggaatcatgtataaatggcttttaggaatggtagcttcctggggatggtatgctggatatacagtgatggaatggggagaagatattaaagcagtttcaaaagatgaagcagtgatgttggtgaatcatcaggcaacaggagatgtgtgcacactgatgatgtgcctccaggacaaaggactggttgttgctcagatgatgtggttgatggatcatatttttaagtacacaaactttggaattgtttctctagttcatggagacttctttataagacagggaagatcttatcgtgaccaacagctgctgcttctcaagaagcacttagaaaataattacaggagcagagatcgaaaatggattgttttgtttccagaagggggcttcctcaggaagaggcgagaaacaagtcaggcatttgccaagaaaaataacttgccatttcttacaaatgttactctgccaaggtctggggcaacaaaaattattttgaatgcacttgtagcacaacagaaaaatggaagtccagcaggaggagatgctaaagaattagacagcaaatcaaaaggcctccagtggataatagatacaacgatagcttatcccaaagctgaacctatagatattcaaacctggatccttggatacaggaaaccaacagtcacacatgtacattacaggatctttccaattaaagatgtacccctggagactgatgaccttaccacttggctctatcagcggtttgttgaaaaagaagacctcttatcacatttttatgaaacaggagcttttccaccttccaagggccataaggaagctgtttccagggagatgaccctcagcaacttgtggatatttctcatacagtcttttgcatttttgtcaggctatatgtggtacaacatcattcagtatttttaccattgcctgttttaggaattgacgtggacttgtcaaggtcaccgtaggagttcagactttctttcataagtgtgcattattttacatgtgcaaatcagaatatatttaaaaaaaagcaaaagaaattcaatggatggattaatatttatccccctttgggatattttaaaatctactaaaatgaggattagtaatataatgacctgctaatatattttaagaacatgttttaaaaagatacactctatcacatatttaagcaaacatcacatttggagaagaggaaatcataaaatcatcctagaagactatctgagagaaattctgttgccaccagttatacttgacaatttagttgaagctcagaaagttatattcatccctcttagctgtagtctatattagggcagttctctagaacgcccacatttccaccaactcagtaaacttgaggggagctggttggcacctcgtgaagaactctttccctgtcgtttgcagtaacaaactccagtctgttgcagtaacaaactccagtctgttgcagtaacaaactctagaatattgacattctctgtgggggaaaagcagtgtccactggaccccttctggtactggatgtgttctttacaaaggctagctcagtccaacattgtgtttacatacactcgtgcttttccttatctgacttctcattttgtatcagaggcatatcataaattgataattttgcaaaatgcacttttttgagatgcagatatagcaaaggattagtaatatagcctgaaaacaaatgggagcatagcagtgtgtgaggttctcgagaactgtcttgtctctgtgtgtttatttgcctgccagtgctctccagcgccatcctgccctggacaccaccctgacgtgatgcctctattgcagctcagaggctttattttttccattttgacattggcactaaatgcatttggggatggttaaaacaaattactatagaacatttaaatgatcagtttaaggggaaataggctagtttatagaaaaataagagctagtggcttataatggtgacaggttctcatgtggcacccctaggacctgtgcagacagtagtctgttgaatcattacatcaaggagctgcccctgtcagggtgagtgtaattaggaacgataccagcacataaggctccccccaatctcttccagttgctttttcttttttcttttttttttagacaggtcttactctgtcacccaggctgtagtgcagtggcataatctcagctcactgcagtctctgcctcccgggttcgagcgattctcctgcctcagcctcccgagtagctgggactacaggcacccaccatcatgcttggctaatttttgtatttttagtagagatggggtttcaccatgttggccaggctggcctcgaactcctgacctcaggtgatctgcccacctcggcttcctaaagtgctgggattgcaggcgtgagccaccacgcccggcctccagttgcttttgaagagggtaaagtcaagtttctatttctagaaaacattttttagaaatttgttgcgatgtttgtacaatttacctcataagagaaccacacccttctccaaaagtgctggtactgcatcagtgagatgagtagggtttttgtttgggattgtaagactattaagatcctagtaagtcagtggtagtttactgtgatgtgagcattgtagattcccccgttgtcactaatcacacaacaattttgagaagtaggctataaaacaaaaaaaggttgctgttttctatttttaaataaaccaaaaaaaaacagaaaagatgtgaattttccccagttatgtgggaaaggtaaagcaacaccaaataaaagcccacagcagcttcatctttacgataactcagtgcatatgtgaaagagaatgatgcattaactgaaatacctcattgaatattatactactactggtaaaatgcagaagacagtgttaatgtgtttggtttgggtactggttgttataaaatgcaatttttttttaaatctaagcatttcattatgtgttctacagtgtcggtgaataaatgaaaccaatctcaatttagaggtatggatgatgacagaaagcccaatagaagcttaatgatgcttctgtttgaggcccagcaagcaccactaaattactggatgaaatgaaattgttcacttgagggattagtcaaccatctgggggagaagttgctcactgtcaaatacagcatgcacggtcctagctgatagaccttttcctcattgctacagcaagccacagggtagagtgaccagttctcctatccaaaaataaatgcgaacatgcatacataaatgtggctgagggccacttttgccatcactgtgctccaaaggaacatgatattgttaaatatactgtacacattaaactattctataagatgctttacttttcaagtacggtgtcattttcacagtctccagggtgacaaatgccaatagatatgtgagttaatttttttaaatatctccgtgagttgtaaatagatgtgtatttgatctgccctatccttctttgattctttaacatgttctctctcttttgtttgcaaaatatgtttgaaagcattggtagtgctttccttatcagtaactggagttctcctgcttgcactagagaaggtaaagagagaatcagtattcttatatggcaatctggggaagcagcaatatgccactgtacaaaactgaagaaaagttcctaatttgtactttgtgaagggagatgaaaggacgtttaaagtatatatattttgtcaagaggaaagaagataaaactatgccagttttatatcaatagcttgtagaagctcagctcttcttggtcttggctagactgcctagattcccacagcagacaaggttgagaatccattgctggaatcttggtattgatgagttacagtgatggaacatgtgcttggccacaggcaggtccagtcactgcaaaagtgaccaagccagcaggtcacccttaacttcagaaacaattattggtggtgaactgtacttaaattgcagagaaacctgtaagtaatggaaggtaaagaaaaattacagaatggaaaataatattttgggcaagcaaacaaattcactgagaattccaaaagtatattaaaaaagaagatagctatgagttcagatctatcttattggtctttaatattacaaccaatccttaactttccactataaaggaaggattactagattgattactttctggatagataatctggtaataaatgataggtaaatcaaaaattacttttatttaggagtttgaattcttactctcatcagacattttttttctagggacgcttactaattaaatgatttaagttgtttcttaggggttttttgcctatatatttatgactgtgttaatgagtagtgaaatgatgcggaaagacagctatcaggaagaggaaatacagaagcctgaataatctatgggttagaaaagcatccctgaataatcaaaaattggcagtattggcattgttctcaagcctttttatgaaaatgaaatctgaaatcaccaaatgtaaacctgggaacattattctagtgttgctgtcttggattcatgttaagaagcgtcttcattctttgctcatgttgcccacttcttgtggatttgtctgagtgttttttgacaatcacttccttaaagactcttctgaactagttggacctggttaatcatagagagtagcctttaatcatggatagtcttcttggattatttttatatttgaaaagaaaatgttttatttgcactactgagtaggaagagttaattgttttctttgttctttttttgaagtcattacacaggacttcactccagagttaccattatgagtgtgttcagctctggtccacagaggatggataaaaatggtttgttatgtttttttgctctgcagtgctatgagccttatatctgttaatatgaaggacaaagtcaaaagcagcagtggatagcaggaagggtagagactaatatgtttgggaccaaaaccatctaagttagagatttccagatcacagaggggctgggcattctctggagcagtcattggttggtgctttattgtaatcattttgcgccaatccccaacaattaggaactggaccctgggaataagctgagggtgctgaactgttggggaagggtgactgtagccacatggaagataaaatatgggtttttctgcaaaatttccatctgagggtttttacatttaatatttttttaagacagtttaaagagcaaacgttttttaagtgtattctagttgcaaagtatgcacacatatcttgaatggctttatttttattgtgtaaaactgttgaacacatgactgtgatgcacaaattctttacgtgtaaggagtctatgcattttacagtaacttattttatgatcgggtgatgagacagttatactttcaactgccattatttttattaagtgctttcattttctttacagttattataaaattgtatttattttatacagatgggttttcattttcctgatgctgtaatgtttacttcagcttgttgacctttctttgtgttatctgcatgttgtaacgtgtgataagaatgaatgtaaaggctgtggcaactgtaattaatttttgtaaagggctggtcacacgtggatctggtttatgaatgcatttgggatgattttggtaaccagatcaccttttcagaaatttagatgtgaacaccaaaagaagcattttctcaacaaaaattaatagctggttctattttttttaaacctagaaaaaataaagttgatttttttcaa

SEQ ID NO: 337193 - DNA, 8803 bp, Homo sapiens
ctccccgccagtccgggcgaacgcggccgggcccttggggaccgagtctcggcgccgccggggaacgggcgcgggccgcgccacagccggagcggggcagggccccgccaccgccttcttccgccggccccgccgccggccatgcattcttccggctcctctgactcccaaagccccggctggggcccggccagcccgagaaaggcagccgcgaggggagtagggcgccagcgcgcccgctcgcgcagcgcctcgggccgcttgggccgccaccgcgtccatgaccgcgacccctcggcgggggacacccgcccccgctctccgcagccgcccgccgtccgcgcccgccgaggtgagcccggcgcgcgggccgcgcccgccgccacgacccttccacatccgcggaaaccgctgcaggctccaccggctccccgcgctgcggtcgcctcttctctgcccctttcatcatcccctgcttccttgccctctggtcggaaatctcattctcttcatccccagttccttggcttttacctctttctggcttttgctcccttccccctactcctgtccttcctctttttcgcattataaccccctactttcttcctctcaccttgtaagctttttttctaggccccccattttttttcttaaaaaaaaaagggaaacaaaaaccctattgctacaaatgagaattttgagggtaactcttcgctagagccagagaccttttaaaggaatgcatcggtgtgcaggaatcgtggtggtgaggagactgaggtcctcagtatctgggaaatcttattgaggggaccctgtttcggtcatgtcacttgtgtcttcagtttggagatcctgaggttgtctgaagcgagtggatctatttttctaagtccaatagacgaccgcagtgagacacggtgcggggacggccaccgattactgaatgggaattgtgttatcatttgctaaatatattgtgacatacttcgtgcctcggtgaacagctcccttgaccttgtgcggctcctcctccctcgctctctgtccccctctggaatttcccctgagagatcaccgaggtactacacccggaaagcttcgaccctcgctgttttattttgtgctgggggcgatttctatgttggtgactgtttagatgtatttaatgaattttcctttttaagtgaatttttctttcaccccagaaagacaggacggagtccagtgtgagaatggctataactttggaagaagctccgtggctgggctggctcttggtgaaagcactgatgaggtttgccttcatggtcgtcaacaacctggttgctattccatcctacatctgctatgtaattatacttcagccccttcgagtgctggacagtaagcggttctggtatatcgaaggaatcatgtataaatggcttttaggaatggtagcttcctggggatggtatgctggatatacagtgatggaatggggagaagatattaaagcagtttcaaaagatgaagcagtgatgttggtgaatcatcaggcaacaggagatgtgtgcacactgatgatgtgcctccaggacaaaggactggttgttgctcagatgatgtggttgatggatcatatttttaagtacacaaactttggaattgtttctctagttcatggagacttctttataagacagggaagatcttatcgtgaccaacagctgctgcttctcaagaagcacttagaaaataattacaggagcagagatcgaaaatggattgttttgtttccagaagggggcttcctcaggaagaggcgagaaacaagtcaggcatttgccaagaaaaataacttgccatttcttacaaatgttactctgccaaggtctggggcaacaaaaattattttgaatgcacttgtagcacaacagaaaaatggaagtccagcaggaggagatgctaaagaattagacagcaaatcaaaaggcctccagtggataatagatacaacgatagcttatcccaaagctgaacctatagatattcaaacctggatccttggatacaggaaaccaacagtcacacatgtacattacaggatctttccaattaaagatgtacccctggagactgatgaccttaccacttggctctatcagcggtttgttgaaaaagaagacctcttatcacatttttatgaaacaggagcttttccaccttccaagggccataaggaagctgtttccagggagatgaccctcagcaacttgtggatatttctcatacagtcttttgcatttttgtcaggctatatgtggtacaacatcattcagtatttttaccattgcctgttttaggaattgacgtggacttgtcaaggtcaccgtaggagttcagactttctttcataagtgtgcattattttacatgtgcaaatcagaatatatttaaaaaaaagcaaaagaaattcaatggatggattaatatttatccccctttgggatattttaaaatctactaaaatgaggattagtaatataatgacctgctaatatattttaagaacatgttttaaaaagatacactctatcacatatttaagcaaacatcacatttggagaagaggaaatcataaaatcatcctagaagactatctgagagaaattctgttgccaccagttatacttgacaatttagttgaagctcagaaagttatattcatccctcttagctgtagtctatattagggcagttctctagaacgcccacatttccaccaactcagtaaacttgaggggagctggttggcacctcgtgaagaactctttccctgtcgtttgcagtaacaaactccagtctgttgcagtaacaaactccagtctgttgcagtaacaaactctagaatattgacattctctgtgggggaaaagcagtgtccactggaccccttctggtactggatgtgttctttacaaaggctagctcagtccaacattgtgtttacatacactcgtgcttttccttatctgacttctcattttgtatcagaggcatatcataaattgataattttgcaaaatgcacttttttgagatgcagatatagcaaaggattagtaatatagcctgaaaacaaatgggagcatagcagtgtgtgaggttctcgagaactgtcttgtctctgtgtgtttatttgcctgccagtgctctccagcgccatcctgccctggacaccaccctgacgtgatgcctctattgcagctcagaggctttattttttccattttgacattggcactaaatgcatttggggatggttaaaacaaattactatagaacatttaaatgatcagtttaaggggaaataggctagtttatagaaaaataagagctagtggcttataatggtgacaggttctcatgtggcacccctaggacctgtgcagacagtagtctgttgaatcattacatcaaggagctgcccctgtcagggtgagtgtaattaggaacgataccagcacataaggctccccccaatctcttccagttgctttttcttttttcttttttttttagacaggtcttactctgtcacccaggctgtagtgcagtggcataatctcagctcactgcagtctctgcctcccgggttcgagcgattctcctgcctcagcctcccgagtagctgggactacaggcacccaccatcatgcttggctaatttttgtatttttagtagagatggggtttcaccatgttggccaggctggcctcgaactcctgacctcaggtgatctgcccacctcggcttcctaaagtgctgggattgcaggcgtgagccaccacgcccggcctccagttgcttttgaagagggtaaagtcaagtttctatttctagaaaacattttttagaaatttgttgcgatgtttgtacaatttacctcataagagaaccacacccttctccaaaagtgctggtactgcatcagtgagatgagtagggtttttgtttgggattgtaagactattaagatcctagtaagtcagtggtagtttactgtgatgtgagcattgtagattcccccgttgtcactaatcacacaacaattttgagaagtaggctataaaacaaaaaaaggttgctgttttctatttttaaataaaccaaaaaaaaacagaaaagatgtgaattttccccagttatgtgggaaaggtaaagcaacaccaaataaaagcccacagcagcttcatctttacgataactcagtgcatatgtgaaagagaatgatgcattaactgaaatacctcattgaatattatactactactggtaaaatgcagaagacagtgttaatgtgtttggtttgggtactggttgttataaaatgcaatttttttttaaatctaagcatttcattatgtgttctacagtgtcggtgaataaatgaaaccaatctcaatttagaggtatggatgatgacagaaagcccaatagaagcttaatgatgcttctgtttgaggcccagcaagcaccactaaattactggatgaaatgaaattgttcacttgagggattagtcaaccatctgggggagaagttgctcactgtcaaatacagcatgcacggtcctagctgatagaccttttcctcattgctacagcaagccacagggtagagtgaccagttctcctatccaaaaataaatgcgaacatgcatacataaatgtggctgagggccacttttgccatcactgtgctccaaaggaacatgatattgttaaatatactgtacacattaaactattctataagatgctttacttttcaagtacggtgtcattttcacagtctccagggtgacaaatgccaatagatatgtgagttaatttttttaaatatctccgtgagttgtaaatagatgtgtatttgatctgccctatccttctttgattctttaacatgttctctctcttttgtttgcaaaatatgtttgaaagcattggtagtgctttccttatcagtaactggagttctcctgcttgcactagagaaggtaaagagagaatcagtattcttatatggcaatctggggaagcagcaatatgccactgtacaaaactgaagaaaagttcctaatttgtactttgtgaagggagatgaaaggacgtttaaagtatatatattttgtcaagaggaaagaagataaaactatgccagttttatatcaatagcttgtagaagctcagctcttcttggtcttggctagactgcctagattcccacagcagacaaggttgagaatccattgctggaatcttggtattgatgagttacagtgatggaacatgtgcttggccacaggcaggtccagtcactgcaaaagtgaccaagccagcaggtcacccttaacttcagaaacaattattggtggtgaactgtacttaaattgcagagaaacctgtaagtaatggaaggtaaagaaaaattacagaatggaaaataatattttgggcaagcaaacaaattcactgagaattccaaaagtatattaaaaaagaagatagctatgagttcagatctatcttattggtctttaatattacaaccaatccttaactttccactataaaggaaggattactagattgattactttctggatagataatctggtaataaatgataggtaaatcaaaaattacttttatttaggagtttgaattcttactctcatcagacattttttttctagggacgcttactaattaaatgatttaagttgtttcttaggggttttttgcctatatatttatgactgtgttaatgagtagtgaaatgatgcggaaagacagctatcaggaagaggaaatacagaagcctgaataatctatgggttagaaaagcatccctgaataatcaaaaattggcagtattggcattgttctcaagcctttttatgaaaatgaaatctgaaatcaccaaatgtaaacctgggaacattattctagtgttgctgtcttggattcatgttaagaagcgtcttcattctttgctcatgttgcccacttcttgtggatttgtctgagtgttttttgacaatcacttccttaaagactcttctgaactagttggacctggttaatcatagagagtagcctttaatcatggatagtcttcttggattatttttatatttgaaaagaaaatgttttatttgcactactgagtaggaagagttaattgttttctttgttctttttttgaagtcattacacaggacttcactccagagttaccattatgagtgtgttcagctctggtccacagaggatggataaaaatggtttgttatgtttttttgctctgcagtgctatgagccttatatctgttaatatgaaggacaaagtcaaaagcagcagtggatagcaggaagggtagagactaatatgtttgggaccaaaaccatctaagttagagatttccagatcacagaggggctgggcattctctggagcagtcattggttggtgctttattgtaatcattttgcgccaatccccaacaattaggaactggaccctgggaataagctgagggtgctgaactgttggggaagggtgactgtagccacatggaagataaaatatgggtttttctgcaaaatttccatctgagggtttttacatttaatatttttttaagacagtttaaagagcaaacgttttttaagtgtattctagttgcaaagtatgcacacatatcttgaatggctttatttttattgtgtaaaactgttgaacacatgactgtgatgcacaaattctttacgtgtaaggagtctatgcattttacagtaacttattttatgatcgggtgatgagacagttatactttcaactgccattatttttattaagtgctttcattttctttacagttattataaaattgtatttattttatacagatgggttttcattttcctgatgctgtaatgtttacttcagcttgttgacctttctttgtgttatctgcatgttgtaacgtgtgataagaatgaatgtaaaggctgtggcaactgtaattaatttttgtaaagggctggtcacacgtggatctggtttatgaatgcatttgggatgattttggtaaccagatcaccttttcagaaatttagatgtgaacaccaaaagaagcattttctcaacaaaaattaatagctggttctattttttttaaacctagaaaaaataaagttgatttttttcaataaaagtgcttttaattcttagcagtggggatggggcatgtgtgttttaccagagctatttgggcattaatatctgcaggcaagtacttaaagcacactgtggcagttggatgctgaaggcaaactgaaaaaccaaatgaaaaaacatcagacttccttctttggtttaaaaatatttccccctttctccccattctcccaatccagtggtgtgctggtaaatgtttagcagttcactcttctgggagaaaattatgtattcaactatacatgtttgttataaattttgctgatagcaagaacatataacacaattaacaaataataagatacaaatactttattgtaaatcccatatagccagttgattctcacagtatacttagttgctcaggaaagaactaaaatgcttttttaaaaggatacttaattgctttttgctcaactcctacagtcaacctatgattgattgtctttcaactgtgatttgaaaaatggcagactgtccaaatctaactcatttcccaataaatttattatcattcaatctgatacgtgatctactgttaaaactgtttcttaccatggtacatattagactcattaagccgaaaccacttttagctttaacattaattgtaaatttatatgattcaattttcataaccaatgcttaacaactgcaggcaaaattctaaaatgtgaccactgggtcttgggaatcagtaggggctgtatccagcacaccactgccccatcctttttttcttaactattagtgttgaataaacttctcatagttaatctacttgctgaactcaggaaattcctatcactgaccctggccagggctttaaagggtaggaaaagcattaatgtcagtcctacacagcgaacttttgatttagaagaatgtgacagaaagaaaacatttactgaaatacatgggaagcttgcatatttctaaagttgtctttatacttttcatttctcaaagctaagtaaactgtggtataggcatctctaagatgttagcatttaaaacatcaattgttttattgatgtttaaacaattgtttaaatcccactgaaaaatttaaatattaaaatatcttgcacagtctaccaaatgagttaaatcgttacagtcgtgtctacctcttatttttctatctgtatttaggctgctgttttggtgagattctaatttctttttcccctggaactactttctgtggaagacaaggaacagactggggacagaggcctgaaaacaaattggaagcactcagagatctattgctgaccagccctattcctcatgagttggcggggggaaagccattgtttttaatttccacttaatatgaaaatgcttgtttttaaaatgttttttcctgctgaacaaatgtatttttaaaaggaaaaaaaattctcttttggctctaagaagtcagctgtatgagcaggcgtgaccatatcataacatgctgatatgatagaaatcaataaatttttacctctcaggaaaaaaaaaa

SEQ ID NO: 337194 - DNA, 7940 bp, Homo sapiens
ctccccgccagtccgggcgaacgcggccgggcccttggggaccgagtctcggcgccgccggggaacgggcgcgggccgcgccacagccggagcggggcagggccccgccaccgccttcttccgccggccccgccgccggccatgcattcttccggctcctctgactcccaaagccccggctggggcccggccagcccgagaaaggcagccgcgaggggagtagggcgccagcgcgcccgctcgcgcagcgcctcgggccgcttgggccgccaccgcgtccatgaccgcgacccctcggcgggggacacccgcccccgctctccgcagccgcccgccgtccgcgcccgccgagacaggacggagtccagtgtgagaatggctataactttggaagaagctccgtggctgggctggctcttggtgaaagcactgatgaggtttgccttcatggtcgtcaacaacctggttgctattccatcctacatctgctatgtaattatacttcagccccttcgagtgctggacagtaagcggttctggtatatcgaaggaatcatgtataaatggcttttaggaatggtagcttcctggggatggtatgctggatatacagtgatggaatggggagaagatattaaagcagtttcaaaagatgaagcagtgatgttggtgaatcatcaggcaacaggagatgtgtgcacactgatgatgtgcctccaggacaaaggactggttgttgctcagatgatgtggttgatggatcatatttttaagtacacaaactttggaattgtttctctagttcatggagacttctttataagacagggaagatcttatcgtgaccaacagctgctgcttctcaagaagcacttagaaaataattacaggagcagagatcgaaaatggattgttttgtttccagaagggggcttcctcaggaagaggcgagaaacaagtcaggcatttgccaagaaaaataacttgccatttcttacaaatgttactctgccaaggtctggggcaacaaaaattattttgaatgcacttgtagcacaacagaaaaatggaagtccagcaggaggagatgctaaagaattagacagcaaatcaaaaggcctccagtggataatagatacaacgatagcttatcccaaagctgaacctatagatattcaaacctggatccttggatacaggaaaccaacagtcacacatgtacattacaggatctttccaattaaagatgtacccctggagactgatgaccttaccacttggctctatcagcggtttgttgaaaaagaagacctcttatcacatttttatgaaacaggagcttttccaccttccaagggccataaggaagctgtttccagggagatgaccctcagcaacttgtggatatttctcatacagtcttttgcatttttgtcaggctatatgtggtacaacatcattcagtatttttaccattgcctgttttaggaattgacgtggacttgtcaaggtcaccgtaggagttcagactttctttcataagtgtgcattattttacatgtgcaaatcagaatatatttaaaaaaaagcaaaagaaattcaatggatggattaatatttatccccctttgggatattttaaaatctactaaaatgaggattagtaatataatgacctgctaatatattttaagaacatgttttaaaaagatacactctatcacatatttaagcaaacatcacatttggagaagaggaaatcataaaatcatcctagaagactatctgagagaaattctgttgccaccagttatacttgacaatttagttgaagctcagaaagttatattcatccctcttagctgtagtctatattagggcagttctctagaacgcccacatttccaccaactcagtaaacttgaggggagctggttggcacctcgtgaagaactctttccctgtcgtttgcagtaacaaactccagtctgttgcagtaacaaactccagtctgttgcagtaacaaactctagaatattgacattctctgtgggggaaaagcagtgtccactggaccccttctggtactggatgtgttctttacaaaggctagctcagtccaacattgtgtttacatacactcgtgcttttccttatctgacttctcattttgtatcagaggcatatcataaattgataattttgcaaaatgcacttttttgagatgcagatatagcaaaggattagtaatatagcctgaaaacaaatgggagcatagcagtgtgtgaggttctcgagaactgtcttgtctctgtgtgtttatttgcctgccagtgctctccagcgccatcctgccctggacaccaccctgacgtgatgcctctattgcagctcagaggctttattttttccattttgacattggcactaaatgcatttggggatggttaaaacaaattactatagaacatttaaatgatcagtttaaggggaaataggctagtttatagaaaaataagagctagtggcttataatggtgacaggttctcatgtggcacccctaggacctgtgcagacagtagtctgttgaatcattacatcaaggagctgcccctgtcagggtgagtgtaattaggaacgataccagcacataaggctccccccaatctcttccagttgctttttcttttttcttttttttttagacaggtcttactctgtcacccaggctgtagtgcagtggcataatctcagctcactgcagtctctgcctcccgggttcgagcgattctcctgcctcagcctcccgagtagctgggactacaggcacccaccatcatgcttggctaatttttgtatttttagtagagatggggtttcaccatgttggccaggctggcctcgaactcctgacctcaggtgatctgcccacctcggcttcctaaagtgctgggattgcaggcgtgagccaccacgcccggcctccagttgcttttgaagagggtaaagtcaagtttctatttctagaaaacattttttagaaatttgttgcgatgtttgtacaatttacctcataagagaaccacacccttctccaaaagtgctggtactgcatcagtgagatgagtagggtttttgtttgggattgtaagactattaagatcctagtaagtcagtggtagtttactgtgatgtgagcattgtagattcccccgttgtcactaatcacacaacaattttgagaagtaggctataaaacaaaaaaaggttgctgttttctatttttaaataaaccaaaaaaaaacagaaaagatgtgaattttccccagttatgtgggaaaggtaaagcaacaccaaataaaagcccacagcagcttcatctttacgataactcagtgcatatgtgaaagagaatgatgcattaactgaaatacctcattgaatattatactactactggtaaaatgcagaagacagtgttaatgtgtttggtttgggtactggttgttataaaatgcaatttttttttaaatctaagcatttcattatgtgttctacagtgtcggtgaataaatgaaaccaatctcaatttagaggtatggatgatgacagaaagcccaatagaagcttaatgatgcttctgtttgaggcccagcaagcaccactaaattactggatgaaatgaaattgttcacttgagggattagtcaaccatctgggggagaagttgctcactgtcaaatacagcatgcacggtcctagctgatagaccttttcctcattgctacagcaagccacagggtagagtgaccagttctcctatccaaaaataaatgcgaacatgcatacataaatgtggctgagggccacttttgccatcactgtgctccaaaggaacatgatattgttaaatatactgtacacattaaactattctataagatgctttacttttcaagtacggtgtcattttcacagtctccagggtgacaaatgccaatagatatgtgagttaatttttttaaatatctccgtgagttgtaaatagatgtgtatttgatctgccctatccttctttgattctttaacatgttctctctcttttgtttgcaaaatatgtttgaaagcattggtagtgctttccttatcagtaactggagttctcctgcttgcactagagaaggtaaagagagaatcagtattcttatatggcaatctggggaagcagcaatatgccactgtacaaaactgaagaaaagttcctaatttgtactttgtgaagggagatgaaaggacgtttaaagtatatatattttgtcaagaggaaagaagataaaactatgccagttttatatcaatagcttgtagaagctcagctcttcttggtcttggctagactgcctagattcccacagcagacaaggttgagaatccattgctggaatcttggtattgatgagttacagtgatggaacatgtgcttggccacaggcaggtccagtcactgcaaaagtgaccaagccagcaggtcacccttaacttcagaaacaattattggtggtgaactgtacttaaattgcagagaaacctgtaagtaatggaaggtaaagaaaaattacagaatggaaaataatattttgggcaagcaaacaaattcactgagaattccaaaagtatattaaaaaagaagatagctatgagttcagatctatcttattggtctttaatattacaaccaatccttaactttccactataaaggaaggattactagattgattactttctggatagataatctggtaataaatgataggtaaatcaaaaattacttttatttaggagtttgaattcttactctcatcagacattttttttctagggacgcttactaattaaatgatttaagttgtttcttaggggttttttgcctatatatttatgactgtgttaatgagtagtgaaatgatgcggaaagacagctatcaggaagaggaaatacagaagcctgaataatctatgggttagaaaagcatccctgaataatcaaaaattggcagtattggcattgttctcaagcctttttatgaaaatgaaatctgaaatcaccaaatgtaaacctgggaacattattctagtgttgctgtcttggattcatgttaagaagcgtcttcattctttgctcatgttgcccacttcttgtggatttgtctgagtgttttttgacaatcacttccttaaagactcttctgaactagttggacctggttaatcatagagagtagcctttaatcatggatagtcttcttggattatttttatatttgaaaagaaaatgttttatttgcactactgagtaggaagagttaattgttttctttgttctttttttgaagtcattacacaggacttcactccagagttaccattatgagtgtgttcagctctggtccacagaggatggataaaaatggtttgttatgtttttttgctctgcagtgctatgagccttatatctgttaatatgaaggacaaagtcaaaagcagcagtggatagcaggaagggtagagactaatatgtttgggaccaaaaccatctaagttagagatttccagatcacagaggggctgggcattctctggagcagtcattggttggtgctttattgtaatcattttgcgccaatccccaacaattaggaactggaccctgggaataagctgagggtgctgaactgttggggaagggtgactgtagccacatggaagataaaatatgggtttttctgcaaaatttccatctgagggtttttacatttaatatttttttaagacagtttaaagagcaaacgttttttaagtgtattctagttgcaaagtatgcacacatatcttgaatggctttatttttattgtgtaaaactgttgaacacatgactgtgatgcacaaattctttacgtgtaaggagtctatgcattttacagtaacttattttatgatcgggtgatgagacagttatactttcaactgccattatttttattaagtgctttcattttctttacagttattataaaattgtatttattttatacagatgggttttcattttcctgatgctgtaatgtttacttcagcttgttgacctttctttgtgttatctgcatgttgtaacgtgtgataagaatgaatgtaaaggctgtggcaactgtaattaatttttgtaaagggctggtcacacgtggatctggtttatgaatgcatttgggatgattttggtaaccagatcaccttttcagaaatttagatgtgaacaccaaaagaagcattttctcaacaaaaattaatagctggttctattttttttaaacctagaaaaaataaagttgatttttttcaataaaagtgcttttaattcttagcagtggggatggggcatgtgtgttttaccagagctatttgggcattaatatctgcaggcaagtacttaaagcacactgtggcagttggatgctgaaggcaaactgaaaaaccaaatgaaaaaacatcagacttccttctttggtttaaaaatatttccccctttctccccattctcccaatccagtggtgtgctggtaaatgtttagcagttcactcttctgggagaaaattatgtattcaactatacatgtttgttataaattttgctgatagcaagaacatataacacaattaacaaataataagatacaaatactttattgtaaatcccatatagccagttgattctcacagtatacttagttgctcaggaaagaactaaaatgcttttttaaaaggatacttaattgctttttgctcaactcctacagtcaacctatgattgattgtctttcaactgtgatttgaaaaatggcagactgtccaaatctaactcatttcccaataaatttattatcattcaatctgatacgtgatctactgttaaaactgtttcttaccatggtacatattagactcattaagccgaaaccacttttagctttaacattaattgtaaatttatatgattcaattttcataaccaatgcttaacaactgcaggcaaaattctaaaatgtgaccactgggtcttgggaatcagtaggggctgtatccagcacaccactgccccatcctttttttcttaactattagtgttgaataaacttctcatagttaatctacttgctgaactcaggaaattcctatcactgaccctggccagggctttaaagggtaggaaaagcattaatgtcagtcctacacagcgaacttttgatttagaagaatgtgacagaaagaaaacatttactgaaatacatgggaagcttgcatatttctaaagttgtctttatacttttcatttctcaaagctaagtaaactgtggtataggcatctctaagatgttagcatttaaaacatcaattgttttattgatgtttaaacaattgtttaaatcccactgaaaaatttaaatattaaaatatcttgcacagtctaccaaatgagttaaatcgttacagtcgtgtctacctcttatttttctatctgtatttaggctgctgttttggtgagattctaatttctttttcccctggaactactttctgtggaagacaaggaacagactggggacagaggcctgaaaacaaattggaagcactcagagatctattgctgaccagccctattcctcatgagttggcggggggaaagccattgtttttaatttccacttaatatgaaaatgcttgtttttaaaatgttttttcctgctgaacaaatgtatttttaaaaggaaaaaaaattctcttttggctctaagaagtcagctgtatgagcaggcgtgaccatatcataacatgctgatatgatagaaatcaataaatttttacctctcaggaaaaaaaaaa

SEQ ID NO: 337195 - DNA, 8778 bp, Homo sapiens
ctccccgccagtccgggcgaacgcggccgggcccttggggaccgagtctcggcgccgccggggaacgggcgcgggccgcgccacagccggagcggggcagggccccgccaccgccttcttccgccggccccgccgccggccatgcattcttccggctcctctgactcccaaagccccggctggggcccggccagcccgagaaaggcagccgcgaggggagtagggcgccagcgcgcccgctcgcgcagcgcctcgggccgcttgggccgccaccgcgtccatgaccgcgacccctcggcgggggacacccgcccccgctctccgcagccgcccgccgtccgcgcccgccgaggtgagcccggcgcgcgggccgcgcccgccgccacgacccttccacatccgcggaaaccgctgcaggctccaccggctccccgcgctgcggtcgcctcttctctgcccctttcatcatcccctgcttccttgccctctggtcggaaatctcattctcttcatccccagttccttggcttttacctctttctggcttttgctcccttccccctactcctgtccttcctctttttcgcattataaccccctactttcttcctctcaccttgtaagctttttttctaggccccccattttttttcttaaaaaaaaaagggaaacaaaaaccctattgctacaaatgagaattttgagggtaactcttcgctagagccagagaccttttaaaggaatgcatcggtgtgcaggaatcgtggtggtgaggagactgaggtcctcagtatctgggaaatcttattgaggggaccctgtttcggtcatgtcacttgtgtcttcagtttggagatcctgaggttgtctgaagcgagtggatctatttttctaagtccaatagacgaccgcagtgagacacggtgcggggacggccaccgattactgaatgggaattgtgttatcatttgctaaatatattgtgacatacttcgtgcctcggtgaacagctcccttgaccttgtgcggctcctcctccctcgctctctgtccccctctggaatttcccctgagagatcaccgaggtactacacccggaaagcttcgaccctcgctgttttattttgtgctgggggcgatttctatgttggtgactgtttagatgtatttaatgaattttcctttttaagtgaatttttctttcaccccagaaagacaggacggagtccagtgtgagaatggctataactttggaagaagctccgtggctgggctggctcttggtgaaagcactgatgaggtttgccttcatggtcgtcaacaacctggttgctattccatcctacatctgctatgtaattatacttcagccccttcgagtgctggacagtaagcggttctggtatatcgaaggaatcatgtataaatggcttttaggaatggtagcttcctggggatggtatgctggatatacagtgatggaatggggagaagatattaaagcagtttcaaaagatgaagcagtgatgttggtgaatcatcaggcaacaggagatgtgtgcacactgatgatgtgcctccaggacaaaggactggttgttgctcagatgatgtggttgatggatcatatttttaagtacacaaactttggaattgtttctctagttcatggagacttctttataagacagggaagatcttatcgtgaccaacagctgctgcttctcaagaagcacttagaaaataattacaggagcagagatcgaaaatggattgttttgtttccagaagggggcttcctcaggaagaggcgagaaacaagtcaggcatttgccaagaaaaataacttgccatttcttacaaatgttactctgccaaggtctggggcaacaaaaattattttgaatgcacttgtagcacaacagaaaaatggaagtccagcaggaggagatgctaaagaattagacagcaaatcaaaaggcctccagtggataatagatacaacgatagcttatcccaaagctgaacctatagatattcaaacctggatccttggatacaggaaaccaacagtcacacatgtacattacaggatctttccaattaaagatgtacccctggagactgatgaccttaccacttggctctatcagcggtttgttgaaaaagaagacctcttatcacatttttatgaaacaggagcttttccaccttccaagggccataaggaagctgtttccagggagatgaccctcagcaacttgtggatatttctcatacagtcttttgcatttttgtcaggctatatgtggtacaacatcattcagtatttttaccattgcctgttttaggaattgacgtggacttgtcaaggtcaccgtaggagttcagactttctttcataagtgtgcattattttacatgtgcaaatcagaatatatttaaaaaaaagcaaaagaaattcaatggatggattaatatttatccccctttgggatattttaaaatctactaaaatgaggattagtaatataatgacctgctaatatattttaagaacatgttttaaaaagatacactctatcacatatttaagcaaacatcacatttggagaagaggaaatcataaaatcatcctagaagactatctgagagaaattctgttgccaccagttatacttgacaatttagttgaagctcagaaagttatattcatccctcttagctgtagtctatattagggcagttctctagaacgcccacatttccaccaactcagtaaacttgaggggagctggttggcacctcgtgaagaactctttccctgtcgtttgcagtaacaaactccagtctgttgcagtaacaaactccagtctgttgcagtaacaaactctagaatattgacattctctgtgggggaaaagcagtgtccactggaccccttctggtactggatgtgttctttacaaaggctagctcagtccaacattgtgtttacatacactcgtgcttttccttatctgacttctcattttgtatcagaggcatatcataaattgataattttgcaaaatgcacttttttgagatgcagatatagcaaaggattagtaatatagcctgaaaacaaatgggagcatagcagtgtgtgaggttctcgagaactgtcttgtctctgtgtgtttatttgcctgccagtgctctccagcgccatcctgccctggacaccaccctgacgtgatgcctctattgcagctcagaggctttattttttccattttgacattggcactaaatgcatttggggatggttaaaacaaattactatagaacatttaaatgatcagtttaaggggaaataggctagtttatagaaaaataagagctagtggcttataatggtgacaggttctcatgtggcacccctaggacctgtgcagacagtagtctgttgaatcattacatcaaggagctgcccctgtcagggtgagtgtaattaggaacgataccagcacataaggctccccccaatctcttccagttgctttttcttttttcttttttttttagacaggtcttactctgtcacccaggctgtagtgcagtggcataatctcagctcactgcagtctctgcctcccgggttcgagcgattctcctgcctcagcctcccgagtagctgggactacaggcacccaccatcatgcttggctaatttttgtatttttagtagagatggggtttcaccatgttggccaggctggcctcgaactcctgacctcaggtgatctgcccacctcggcttcctaaagtgctgggattgcaggcgtgagccaccacgcccggcctccagttgcttttgaagagggtaaagtcaagtttctatttctagaaaacattttttagaaatttgttgcgatgtttgtacaatttacctcataagagaaccacacccttctccaaaagtgctggtactgcatcagtgagatgagtagggtttttgtttgggattgtaagactattaagatcctagtaagtcagtggtagtttactgtgatgtgagcattgtagattcccccgttgtcactaatcacacaacaattttgagaagtaggctataaaacaaaaaaaggttgctgttttctatttttaaataaaccaaaaaaaaacagaaaagatgtgaattttccccagttatgtgggaaaggtaaagcaacaccaaataaaagcccacagcagcttcatctttacgataactcagtgcatatgtgaaagagaatgatgcattaactgaaatacctcattgaatattatactactactggtaaaatgcagaagacagtgttaatgtgtttggtttgggtactggttgttataaaatgcaatttttttttaaatctaagcatttcattatgtgttctacagtgtcggtgaataaatgaaaccaatctcaatttagaggtatggatgatgacagaaagcccaatagaagcttaatgatgcttctgtttgaggcccagcaagcaccactaaattactggatgaaatgaaattgttcacttgagggattagtcaaccatctgggggagaagttgctcactgtcaaatacagcatgcacggtcctagctgatagaccttttcctcattgctacagcaagccacagggtagagtgaccagttctcctatccaaaaataaatgcgaacatgcatacataaatgtggctgagggccacttttgccatcactgtgctccaaaggaacatgatattgttaaatatactgtacacattaaactattctataagatgctttacttttcaagtacggtgtcattttcacagtctccagggtgacaaatgccaatagatatgtgagttaatttttttaaatatctccgtgagttgtaaatagatgtgtatttgatctgccctatccttctttgattctttaacatgttctctctcttttgtttgcaaaatatgtttgaaagcattggtagtgctttccttatcagtaactggagttctcctgcttgcactagagaaggtaaagagagaatcagtattcttatatggcaatctggggaagcagcaatatgccactgtacaaaactgaagaaaagttcctaatttgtactttgtgaagggagatgaaaggacgtttaaagtatatatattttgtcaagaggaaagaagataaaactatgccagttttatatcaatagcttgtagaagctcagctcttcttggtcttggctagactgcctagattcccacagcagacaaggttgagaatccattgctggaatcttggtattgatgagttacagtgatggaacatgtgcttggccacaggcaggtccagtcactgcaaaagtgaccaagccagcaggtcacccttaacttcagaaacaattattggtggtgaactgtacttaaattgcagagaaacctgtaagtaatggaaggtaaagaaaaattacagaatggaaaataatattttgggcaagcaaacaaattcactgagaattccaaaagtatattaaaaaagaagatagctatgagttcagatctatcttattggtctttaatattacaaccaatccttaatagattgattactttctggatagataatctggtaataaatgataggtaaatcaaaaattacttttatttaggagtttgaattcttactctcatcagacattttttttctagggacgcttactaattaaatgatttaagttgtttcttaggggttttttgcctatatatttatgactgtgttaatgagtagtgaaatgatgcggaaagacagctatcaggaagaggaaatacagaagcctgaataatctatgggttagaaaagcatccctgaataatcaaaaattggcagtattggcattgttctcaagcctttttatgaaaatgaaatctgaaatcaccaaatgtaaacctgggaacattattctagtgttgctgtcttggattcatgttaagaagcgtcttcattctttgctcatgttgcccacttcttgtggatttgtctgagtgttttttgacaatcacttccttaaagactcttctgaactagttggacctggttaatcatagagagtagcctttaatcatggatagtcttcttggattatttttatatttgaaaagaaaatgttttatttgcactactgagtaggaagagttaattgttttctttgttctttttttgaagtcattacacaggacttcactccagagttaccattatgagtgtgttcagctctggtccacagaggatggataaaaatggtttgttatgtttttttgctctgcagtgctatgagccttatatctgttaatatgaaggacaaagtcaaaagcagcagtggatagcaggaagggtagagactaatatgtttgggaccaaaaccatctaagttagagatttccagatcacagaggggctgggcattctctggagcagtcattggttggtgctttattgtaatcattttgcgccaatccccaacaattaggaactggaccctgggaataagctgagggtgctgaactgttggggaagggtgactgtagccacatggaagataaaatatgggtttttctgcaaaatttccatctgagggtttttacatttaatatttttttaagacagtttaaagagcaaacgttttttaagtgtattctagttgcaaagtatgcacacatatcttgaatggctttatttttattgtgtaaaactgttgaacacatgactgtgatgcacaaattctttacgtgtaaggagtctatgcattttacagtaacttattttatgatcgggtgatgagacagttatactttcaactgccattatttttattaagtgctttcattttctttacagttattataaaattgtatttattttatacagatgggttttcattttcctgatgctgtaatgtttacttcagcttgttgacctttctttgtgttatctgcatgttgtaacgtgtgataagaatgaatgtaaaggctgtggcaactgtaattaatttttgtaaagggctggtcacacgtggatctggtttatgaatgcatttgggatgattttggtaaccagatcaccttttcagaaatttagatgtgaacaccaaaagaagcattttctcaacaaaaattaatagctggttctattttttttaaacctagaaaaaataaagttgatttttttcaataaaagtgcttttaattcttagcagtggggatggggcatgtgtgttttaccagagctatttgggcattaatatctgcaggcaagtacttaaagcacactgtggcagttggatgctgaaggcaaactgaaaaaccaaatgaaaaaacatcagacttccttctttggtttaaaaatatttccccctttctccccattctcccaatccagtggtgtgctggtaaatgtttagcagttcactcttctgggagaaaattatgtattcaactatacatgtttgttataaattttgctgatagcaagaacatataacacaattaacaaataataagatacaaatactttattgtaaatcccatatagccagttgattctcacagtatacttagttgctcaggaaagaactaaaatgcttttttaaaaggatacttaattgctttttgctcaactcctacagtcaacctatgattgattgtctttcaactgtgatttgaaaaatggcagactgtccaaatctaactcatttcccaataaatttattatcattcaatctgatacgtgatctactgttaaaactgtttcttaccatggtacatattagactcattaagccgaaaccacttttagctttaacattaattgtaaatttatatgattcaattttcataaccaatgcttaacaactgcaggcaaaattctaaaatgtgaccactgggtcttgggaatcagtaggggctgtatccagcacaccactgccccatcctttttttcttaactattagtgttgaataaacttctcatagttaatctacttgctgaactcaggaaattcctatcactgaccctggccagggctttaaagggtaggaaaagcattaatgtcagtcctacacagcgaacttttgatttagaagaatgtgacagaaagaaaacatttactgaaatacatgggaagcttgcatatttctaaagttgtctttatacttttcatttctcaaagctaagtaaactgtggtataggcatctctaagatgttagcatttaaaacatcaattgttttattgatgtttaaacaattgtttaaatcccactgaaaaatttaaatattaaaatatcttgcacagtctaccaaatgagttaaatcgttacagtcgtgtctacctcttatttttctatctgtatttaggctgctgttttggtgagattctaatttctttttcccctggaactactttctgtggaagacaaggaacagactggggacagaggcctgaaaacaaattggaagcactcagagatctattgctgaccagccctattcctcatgagttggcggggggaaagccattgtttttaatttccacttaatatgaaaatgcttgtttttaaaatgttttttcctgctgaacaaatgtatttttaaaaggaaaaaaaattctcttttggctctaagaagtcagctgtatgagcaggcgtgaccatatcataacatgctgatatgatagaaatcaataaatttttacctctcaggaaaaaaaaaa

SEQ ID NO: 337196 - DNA, 8863 bp, Homo sapiens
ctccccgccagtccgggcgaacgcggccgggcccttggggaccgagtctcggcgccgccggggaacgggcgcgggccgcgccacagccggagcggggcagggccccgccaccgccttcttccgccggccccgccgccggccatgcattcttccggctcctctgactcccaaagccccggctggggcccggccagcccgagaaaggcagccgcgaggggagtagggcgccagcgcgcccgctcgcgcagcgcctcgggccgcttgggccgccaccgcgtccatgaccgcgacccctcggcgggggacacccgcccccgctctccgcagccgcccgccgtccgcgcccgccgaggtgagcccggcgcgcgggccgcgcccgccgccacgacccttccacatccgcggaaaccgctgcaggctccaccggctccccgcgctgcggtcgcctcttctctgcccctttcatcatcccctgcttccttgccctctggtcggaaatctcattctcttcatccccagttccttggcttttacctctttctggcttttgctcccttccccctactcctgtccttcctctttttcgcattataaccccctactttcttcctctcaccttgtaagctttttttctaggccccccattttttttcttaaaaaaaaaagggaaacaaaaaccctattgctacaaatgagaattttgagggtaactcttcgctagagccagagaccttttaaaggaatgcatcggtgtgcaggaatcgtggtggtgaggagactgaggtcctcagtatctgggaaatcttattgaggggaccctgtttcggtcatgtcacttgtgtcttcagtttggagatcctgaggttgtctgaagcgagtggatctatttttctaagtccaatagacgaccgcagtgagacacggtgcggggacggccaccgattactgaatgggaattgtgttatcatttgctaaatatattgtgacatacttcgtgcctcggtgaacagctcccttgaccttgtgcggctcctcctccctcgctctctgtccccctctggaatttcccctgagagatcaccgaggtactacacccggaaagcttcgaccctcgctgttttattttgtgctgggggcgatttctatgttggtgactgtttagatgtatttaatgaattttcctttttaagtgaatttttctttcaccccagaaagacaggacggagtccagtgtgagaatggctataactttggaagaagctccgtggctgggctggctcttggtgaaagcactgatgaggtttgccttcatggtcgtcaacaacctggttgctattccatcctacatctgctatgtaattatacttcagccccttcgagtgctggacagtaagcggttctggtatatcgaaggaatcatgtataaatggcttttaggaatggtagcttcctggggatggtatgctggatatacagtgatggaatggggagaagatattaaagcagtttcaaaagatgaagcagtgatgttggtgaatcatcaggcaacaggagatgtgtgcacactgatgatgtgcctccaggacaaaggactggttgttgctcagatgatgtggttgatggatcatatttttaagtacacaaactttggaattgtttctctagttcatggagacttctttataagacagggaagatcttatcgtgaccaacagctgctgcttctcaagaagcacttagaaaataattacaggagcagagatcgaaaatggattgttttgtttccagaagggggcttcctcaggaagaggcgagaaacaagtcaggcatttgccaagaaaaataacttgccatttcttacaaatgttactctgccaaggtctggggcaacaaaaattattttgaatgcacttgtagcacaacagaaaaatggaagtccagcaggaggagatgctaaagaattagacagcaaatcaaaaggcctccagtggataatagatacaacgatagcttatcccaaagctgaacctatagatattcaaacctggatccttggatacaggaaaccaacagtcacacatgtacattacaggatctttccaattaaagatgtacccctggagactgatgaccttaccacttggctctatcagcggtttgttgaaaaagaagacctcttatcacatttttatgaaacaggagcttttccaccttccaagggccataaggaagctgtttccagggagatgaccctcagcaacttgtggatatttctcatacagtcttttgcatttttgtcaggctatatgtggtacaaaaaaaattttttaaaaaaaatttgggggggtttgggggggtttaaaaaccaaaaaaaacccatcattcagtatttttaccattgcctgttttaggaattgacgtggacttgtcaaggtcaccgtaggagttcagactttctttcataagtgtgcattattttacatgtgcaaatcagaatatatttaaaaaaaagcaaaagaaattcaatggatggattaatatttatccccctttgggatattttaaaatctactaaaatgaggattagtaatataatgacctgctaatatattttaagaacatgttttaaaaagatacactctatcacatatttaagcaaacatcacatttggagaagaggaaatcataaaatcatcctagaagactatctgagagaaattctgttgccaccagttatacttgacaatttagttgaagctcagaaagttatattcatccctcttagctgtagtctatattagggcagttctctagaacgcccacatttccaccaactcagtaaacttgaggggagctggttggcacctcgtgaagaactctttccctgtcgtttgcagtaacaaactccagtctgttgcagtaacaaactccagtctgttgcagtaacaaactctagaatattgacattctctgtgggggaaaagcagtgtccactggaccccttctggtactggatgtgttctttacaaaggctagctcagtccaacattgtgtttacatacactcgtgcttttccttatctgacttctcattttgtatcagaggcatatcataaattgataattttgcaaaatgcacttttttgagatgcagatatagcaaaggattagtaatatagcctgaaaacaaatgggagcatagcagtgtgtgaggttctcgagaactgtcttgtctctgtgtgtttatttgcctgccagtgctctccagcgccatcctgccctggacaccaccctgacgtgatgcctctattgcagctcagaggctttattttttccattttgacattggcactaaatgcatttggggatggttaaaacaaattactatagaacatttaaatgatcagtttaaggggaaataggctagtttatagaaaaataagagctagtggcttataatggtgacaggttctcatgtggcacccctaggacctgtgcagacagtagtctgttgaatcattacatcaaggagctgcccctgtcagggtgagtgtaattaggaacgataccagcacataaggctccccccaatctcttccagttgctttttcttttttcttttttttttagacaggtcttactctgtcacccaggctgtagtgcagtggcataatctcagctcactgcagtctctgcctcccgggttcgagcgattctcctgcctcagcctcccgagtagctgggactacaggcacccaccatcatgcttggctaatttttgtatttttagtagagatggggtttcaccatgttggccaggctggcctcgaactcctgacctcaggtgatctgcccacctcggcttcctaaagtgctgggattgcaggcgtgagccaccacgcccggcctccagttgcttttgaagagggtaaagtcaagtttctatttctagaaaacattttttagaaatttgttgcgatgtttgtacaatttacctcataagagaaccacacccttctccaaaagtgctggtactgcatcagtgagatgagtagggtttttgtttgggattgtaagactattaagatcctagtaagtcagtggtagtttactgtgatgtgagcattgtagattcccccgttgtcactaatcacacaacaattttgagaagtaggctataaaacaaaaaaaggttgctgttttctatttttaaataaaccaaaaaaaaacagaaaagatgtgaattttccccagttatgtgggaaaggtaaagcaacaccaaataaaagcccacagcagcttcatctttacgataactcagtgcatatgtgaaagagaatgatgcattaactgaaatacctcattgaatattatactactactggtaaaatgcagaagacagtgttaatgtgtttggtttgggtactggttgttataaaatgcaatttttttttaaatctaagcatttcattatgtgttctacagtgtcggtgaataaatgaaaccaatctcaatttagaggtatggatgatgacagaaagcccaatagaagcttaatgatgcttctgtttgaggcccagcaagcaccactaaattactggatgaaatgaaattgttcacttgagggattagtcaaccatctgggggagaagttgctcactgtcaaatacagcatgcacggtcctagctgatagaccttttcctcattgctacagcaagccacagggtagagtgaccagttctcctatccaaaaataaatgcgaacatgcatacataaatgtggctgagggccacttttgccatcactgtgctccaaaggaacatgatattgttaaatatactgtacacattaaactattctataagatgctttacttttcaagtacggtgtcattttcacagtctccagggtgacaaatgccaatagatatgtgagttaatttttttaaatatctccgtgagttgtaaatagatgtgtatttgatctgccctatccttctttgattctttaacatgttctctctcttttgtttgcaaaatatgtttgaaagcattggtagtgctttccttatcagtaactggagttctcctgcttgcactagagaaggtaaagagagaatcagtattcttatatggcaatctggggaagcagcaatatgccactgtacaaaactgaagaaaagttcctaatttgtactttgtgaagggagatgaaaggacgtttaaagtatatatattttgtcaagaggaaagaagataaaactatgccagttttatatcaatagcttgtagaagctcagctcttcttggtcttggctagactgcctagattcccacagcagacaaggttgagaatccattgctggaatcttggtattgatgagttacagtgatggaacatgtgcttggccacaggcaggtccagtcactgcaaaagtgaccaagccagcaggtcacccttaacttcagaaacaattattggtggtgaactgtacttaaattgcagagaaacctgtaagtaatggaaggtaaagaaaaattacagaatggaaaataatattttgggcaagcaaacaaattcactgagaattccaaaagtatattaaaaaagaagatagctatgagttcagatctatcttattggtctttaatattacaaccaatccttaactttccactataaaggaaggattactagattgattactttctggatagataatctggtaataaatgataggtaaatcaaaaattacttttatttaggagtttgaattcttactctcatcagacattttttttctagggacgcttactaattaaatgatttaagttgtttcttaggggttttttgcctatatatttatgactgtgttaatgagtagtgaaatgatgcggaaagacagctatcaggaagaggaaatacagaagcctgaataatctatgggttagaaaagcatccctgaataatcaaaaattggcagtattggcattgttctcaagcctttttatgaaaatgaaatctgaaatcaccaaatgtaaacctgggaacattattctagtgttgctgtcttggattcatgttaagaagcgtcttcattctttgctcatgttgcccacttcttgtggatttgtctgagtgttttttgacaatcacttccttaaagactcttctgaactagttggacctggttaatcatagagagtagcctttaatcatggatagtcttcttggattatttttatatttgaaaagaaaatgttttatttgcactactgagtaggaagagttaattgttttctttgttctttttttgaagtcattacacaggacttcactccagagttaccattatgagtgtgttcagctctggtccacagaggatggataaaaatggtttgttatgtttttttgctctgcagtgctatgagccttatatctgttaatatgaaggacaaagtcaaaagcagcagtggatagcaggaagggtagagactaatatgtttgggaccaaaaccatctaagttagagatttccagatcacagaggggctgggcattctctggagcagtcattggttggtgctttattgtaatcattttgcgccaatccccaacaattaggaactggaccctgggaataagctgagggtgctgaactgttggggaagggtgactgtagccacatggaagataaaatatgggtttttctgcaaaatttccatctgagggtttttacatttaatatttttttaagacagtttaaagagcaaacgttttttaagtgtattctagttgcaaagtatgcacacatatcttgaatggctttatttttattgtgtaaaactgttgaacacatgactgtgatgcacaaattctttacgtgtaaggagtctatgcattttacagtaacttattttatgatcgggtgatgagacagttatactttcaactgccattatttttattaagtgctttcattttctttacagttattataaaattgtatttattttatacagatgggttttcattttcctgatgctgtaatgtttacttcagcttgttgacctttctttgtgttatctgcatgttgtaacgtgtgataagaatgaatgtaaaggctgtggcaactgtaattaatttttgtaaagggctggtcacacgtggatctggtttatgaatgcatttgggatgattttggtaaccagatcaccttttcagaaatttagatgtgaacaccaaaagaagcattttctcaacaaaaattaatagctggttctattttttttaaacctagaaaaaataaagttgatttttttcaataaaagtgcttttaattcttagcagtggggatggggcatgtgtgttttaccagagctatttgggcattaatatctgcaggcaagtacttaaagcacactgtggcagttggatgctgaaggcaaactgaaaaaccaaatgaaaaaacatcagacttccttctttggtttaaaaatatttccccctttctccccattctcccaatccagtggtgtgctggtaaatgtttagcagttcactcttctgggagaaaattatgtattcaactatacatgtttgttataaattttgctgatagcaagaacatataacacaattaacaaataataagatacaaatactttattgtaaatcccatatagccagttgattctcacagtatacttagttgctcaggaaagaactaaaatgcttttttaaaaggatacttaattgctttttgctcaactcctacagtcaacctatgattgattgtctttcaactgtgatttgaaaaatggcagactgtccaaatctaactcatttcccaataaatttattatcattcaatctgatacgtgatctactgttaaaactgtttcttaccatggtacatattagactcattaagccgaaaccacttttagctttaacattaattgtaaatttatatgattcaattttcataaccaatgcttaacaactgcaggcaaaattctaaaatgtgaccactgggtcttgggaatcagtaggggctgtatccagcacaccactgccccatcctttttttcttaactattagtgttgaataaacttctcatagttaatctacttgctgaactcaggaaattcctatcactgaccctggccagggctttaaagggtaggaaaagcattaatgtcagtcctacacagcgaacttttgatttagaagaatgtgacagaaagaaaacatttactgaaatacatgggaagcttgcatatttctaaagttgtctttatacttttcatttctcaaagctaagtaaactgtggtataggcatctctaagatgttagcatttaaaacatcaattgttttattgatgtttaaacaattgtttaaatcccactgaaaaatttaaatattaaaatatcttgcacagtctaccaaatgagttaaatcgttacagtcgtgtctacctcttatttttctatctgtatttaggctgctgttttggtgagattctaatttctttttcccctggaactactttctgtggaagacaaggaacagactggggacagaggcctgaaaacaaattggaagcactcagagatctattgctgaccagccctattcctcatgagttggcggggggaaagccattgtttttaatttccacttaatatgaaaatgcttgtttttaaaatgttttttcctgctgaacaaatgtatttttaaaaggaaaaaaaattctcttttggctctaagaagtcagctgtatgagcaggcgtgaccatatcataacatgctgatatgatagaaatcaataaatttttacctctcaggaaaaaaaaaa

SEQ ID NO: 337197 - DNA, 5170 bp, Homo sapiens
gatcctagtgtaatagctcagagaaggcagcggaaccaacaattagaaagcttagcagtctcagggatccgaaaagctagctgagcaccttacctcatttccagctttaggaaataattgaatttacagtgtagtgtaacagttgattctaatgatgatcatcaggcatcaagaagaggggtgggattgcaggcgtgagccaccacgcccggcctccagttgcttttgaagagggtaaagtcaagtttctatttctagaaaacattttttagaaatttgttgcgatgtttgtacaatttacctcataagagaaccacacccttctccaaaagtgctggtactgcatcagtgagatgagtagggtttttgtttgggattgtaagactattaagatcctagtaagtcagtggtagtttactgtgatgtgagcattgtagattcccccgttgtcactaatcacacaacaattttgagaagtaggctataaaacaaaaaaaggttgctgttttctatttttaaataaaccaaaaaaaaacagaaaagatgtgaattttccccagttatgtgggaaaggtaaagcaacaccaaataaaagcccacagcagcttcatctttacgataactcagtgcatatgtgaaagagaatgatgcattaactgaaatacctcattgaatattatactactactggtaaaatgcagaagacagtgttaatgtgtttggtttgggtactggttgttataaaatgcaatttttttttaaatctaagcatttcattatgtgttctacagtgtcggtgaataaatgaaaccaatctcaatttagaggtatggatgatgacagaaagcccaatagaagcttaatgatgcttctgtttgaggcccagcaagcaccactaaattactggatgaaatgaaattgttcacttgagggattagtcaaccatctgggggagaagttgctcactgtcaaatacagcatgcacggtcctagctgatagaccttttcctcattgctacagcaagccacagggtagagtgaccagttctcctatccaaaaataaatgcgaacatgcatacataaatgtggctgagggccacttttgccatcactgtgctccaaaggaacatgatattgttaaatatactgtacacattaaactattctataagatgctttacttttcaagtacggtgtcattttcacagtctccagggtgacaaatgccaatagatatgtgagttaatttttttaaatatctccgtgagttgtaaatagatgtgtatttgatctgccctatccttctttgattctttaacatgttctctctcttttgtttgcaaaatatgtttgaaagcattggtagtgctttccttatcagtaactggagttctcctgcttgcactagagaaggtaaagagagaatcagtattcttatatggcaatctggggaagcagcaatatgccactgtacaaaactgaagaaaagttcctaatttgtactttgtgaagggagatgaaaggacgtttaaagtatatatattttgtcaagaggaaagaagataaaactatgccagttttatatcaatagcttgtagaagctcagctcttcttggtcttggctagactgcctagattcccacagcagacaaggttgagaatccattgctggaatcttggtattgatgagttacagtgatggaacatgtgcttggccacaggcaggtccagtcactgcaaaagtgaccaagccagcaggtcacccttaacttcagaaacaattattggtggtgaactgtacttaaattgcagagaaacctgtaagtaatggaaggtaaagaaaaattacagaatggaaaataatattttgggcaagcaaacaaattcactgagaattccaaaagtatattaaaaaagaagatagctatgagttcagatctatcttattggtctttaatattacaaccaatccttaactttccactataaaggaaggattactagattgattactttctggatagataatctggtaataaatgataggtaaatcaaaaattacttttatttaggagtttgaattcttactctcatcagacattttttttctagggacgcttactaattaaatgatttaagttgtttcttaggggttttttgcctatatatttatgactgtgttaatgagtagtgaaatgatgcggaaagacagctatcaggaagaggaaatacagaagcctgaataatctatgggttagaaaagcatccctgaataatcaaaaattggcagtattggcattgttctcaagcctttttatgaaaatgaaatctgaaatcaccaaatgtaaacctgggaacattattctagtgttgctgtcttggattcatgttaagaagcgtcttcattctttgctcatgttgcccacttcttgtggatttgtctgagtgttttttgacaatcacttccttaaagactcttctgaactagttggacctggttaatcatagagagtagcctttaatcatggatagtcttcttggattatttttatatttgaaaagaaaatgttttatttgcactactgagtaggaagagttaattgttttctttgttctttttttgaagtcattacacaggacttcactccagagttaccattatgagtgtgttcagctctggtccacagaggatggataaaaatggtttgttatgtttttttgctctgcagtgctatgagccttatatctgttaatatgaaggacaaagtcaaaagcagcagtggatagcaggaagggtagagactaatatgtttgggaccaaaaccatctaagttagagatttccagatcacagaggggctgggcattctctggagcagtcattggttggtgctttattgtaatcattttgcgccaatccccaacaattaggaactggaccctgggaataagctgagggtgctgaactgttggggaagggtgactgtagccacatggaagataaaatatgggtttttctgcaaaatttccatctgagggtttttacatttaatatttttttaagacagtttaaagagcaaacgttttttaagtgtattctagttgcaaagtatgcacacatatcttgaatggctttatttttattgtgtaaaactgttgaacacatgactgtgatgcacaaattctttacgtgtaaggagtctatgcattttacagtaacttattttatgatcgggtgatgagacagttatactttcaactgccattatttttattaagtgctttcattttctttacagttattataaaattgtatttattttatacagatgggttttcattttcctgatgctgtaatgtttacttcagcttgttgacctttctttgtgttatctgcatgttgtaacgtgtgataagaatgaatgtaaaggctgtggcaactgtaattaatttttgtaaagggctggtcacacgtggatctggtttatgaatgcatttgggatgattttggtaaccagatcaccttttcagaaatttagatgtgaacaccaaaagaagcattttctcaacaaaaattaatagctggttctattttttttaaacctagaaaaaataaagttgatttttttcaataaaagtgcttttaattcttagcagtggggatggggcatgtgtgttttaccagagctatttgggcattaatatctgcaggcaagtacttaaagcacactgtggcagttggatgctgaaggcaaactgaaaaaccaaatgaaaaaacatcagacttccttctttggtttaaaaatatttccccctttctccccattctcccaatccagtggtgtgctggtaaatgtttagcagttcactcttctgggagaaaattatgtattcaactatacatgtttgttataaattttgctgatagcaagaacatataacacaattaacaaataataagatacaaatactttattgtaaatcccatatagccagttgattctcacagtatacttagttgctcaggaaagaactaaaatgcttttttaaaaggatacttaattgctttttgctcaactcctacagtcaacctatgattgattgtctttcaactgtgatttgaaaaatggcagactgtccaaatctaactcatttcccaataaatttattatcattcaatctgatacgtgatctactgttaaaactgtttcttaccatggtacatattagactcattaagccgaaaccacttttagctttaacattaattgtaaatttatatgattcaattttcataaccaatgcttaacaactgcaggcaaaattctaaaatgtgaccactgggtcttgggaatcagtaggggctgtatccagcacaccactgccccatcctttttttcttaactattagtgttgaataaacttctcatagttaatctacttgctgaactcaggaaattcctatcactgaccctggccagggctttaaagggtaggaaaagcattaatgtcagtcctacacagcgaacttttgatttagaagaatgtgacagaaagaaaacatttactgaaatacatgggaagcttgcatatttctaaagttgtctttatacttttcatttctcaaagctaagtaaactgtggtataggcatctctaagatgttagcatttaaaacatcaattgttttattgatgtttaaacaattgtttaaatcccactgaaaaatttaaatattaaaatatcttgcacagtctaccaaatgagttaaatcgttacagtcgtgtctacctcttatttttctatctgtatttaggctgctgttttggtgagattctaatttctttttcccctggaactactttctgtggaagacaaggaacagactggggacagaggcctgaaaacaaattggaagcactcagagatctattgctgaccagccctattcctcatgagttggcggggggaaagccattgtttttaatttccacttaatatgaaaatgcttgtttttaaaatgttttttcctgctgaacaaatgtatttttaaaaggaaaaaaaattctcttttggctctaagaagtcagctgtatgagcaggcgtgaccatatcataacatgctgatatgatagaaatcaataaatttttacctctcaggaaaaaaaaaa

SEQ ID NO: 337198 - DNA, 5239 bp, Homo sapiens
attattcatgccttcctttttttttttttttttttttttttttttttttgagacagagtctcagtctgtggcccagactggagtgcagtggcgcgatctcggctcactgcaagctccgcctcccggcttcacgccattctcctgcctcagcctcccgagtaactgggactacaggcgcccgccaccatgcccggctaattttttgtatttttagtagagacggggtttcactgtgttcgccaggatggtctcgatctcctgaccttgtgatccgcgcccggcctccagttgcttttgaagagggtaaagtcaagtttctatttctagaaaacattttttagaaatttgttgcgatgtttgtacaatttacctcataagagaaccacacccttctccaaaagtgctggtactgcatcagtgagatgagtagggtttttgtttgggattgtaagactattaagatcctagtaagtcagtggtagtttactgtgatgtgagcattgtagattcccccgttgtcactaatcacacaacaattttgagaagtaggctataaaacaaaaaaaggttgctgttttctatttttaaataaaccaaaaaaaaacagaaaagatgtgaattttccccagttatgtgggaaaggtaaagcaacaccaaataaaagcccacagcagcttcatctttacgataactcagtgcatatgtgaaagagaatgatgcattaactgaaatacctcattgaatattatactactactggtaaaatgcagaagacagtgttaatgtgtttggtttgggtactggttgttataaaatgcaatttttttttaaatctaagcatttcattatgtgttctacagtgtcggtgaataaatgaaaccaatctcaatttagaggtatggatgatgacagaaagcccaatagaagcttaatgatgcttctgtttgaggcccagcaagcaccactaaattactggatgaaatgaaattgttcacttgagggattagtcaaccatctgggggagaagttgctcactgtcaaatacagcatgcacggtcctagctgatagaccttttcctcattgctacagcaagccacagggtagagtgaccagttctcctatccaaaaataaatgcgaacatgcatacataaatgtggctgagggccacttttgccatcactgtgctccaaaggaacatgatattgttaaatatactgtacacattaaactattctataagatgctttacttttcaagtacggtgtcattttcacagtctccagggtgacaaatgccaatagatatgtgagttaatttttttaaatatctccgtgagttgtaaatagatgtgtatttgatctgccctatccttctttgattctttaacatgttctctctcttttgtttgcaaaatatgtttgaaagcattggtagtgctttccttatcagtaactggagttctcctgcttgcactagagaaggtaaagagagaatcagtattcttatatggcaatctggggaagcagcaatatgccactgtacaaaactgaagaaaagttcctaatttgtactttgtgaagggagatgaaaggacgtttaaagtatatatattttgtcaagaggaaagaagataaaactatgccagttttatatcaatagcttgtagaagctcagctcttcttggtcttggctagactgcctagattcccacagcagacaaggttgagaatccattgctggaatcttggtattgatgagttacagtgatggaacatgtgcttggccacaggcaggtccagtcactgcaaaagtgaccaagccagcaggtcacccttaacttcagaaacaattattggtggtgaactgtacttaaattgcagagaaacctgtaagtaatggaaggtaaagaaaaattacagaatggaaaataatattttgggcaagcaaacaaattcactgagaattccaaaagtatattaaaaaagaagatagctatgagttcagatctatcttattggtctttaatattacaaccaatccttaactttccactataaaggaaggattactagattgattactttctggatagataatctggtaataaatgataggtaaatcaaaaattacttttatttaggagtttgaattcttactctcatcagacattttttttctagggacgcttactaattaaatgatttaagttgtttcttaggggttttttgcctatatatttatgactgtgttaatgagtagtgaaatgatgcggaaagacagctatcaggaagaggaaatacagaagcctgaataatctatgggttagaaaagcatccctgaataatcaaaaattggcagtattggcattgttctcaagcctttttatgaaaatgaaatctgaaatcaccaaatgtaaacctgggaacattattctagtgttgctgtcttggattcatgttaagaagcgtcttcattctttgctcatgttgcccacttcttgtggatttgtctgagtgttttttgacaatcacttccttaaagactcttctgaactagttggacctggttaatcatagagagtagcctttaatcatggatagtcttcttggattatttttatatttgaaaagaaaatgttttatttgcactactgagtaggaagagttaattgttttctttgttctttttttgaagtcattacacaggacttcactccagagttaccattatgagtgtgttcagctctggtccacagaggatggataaaaatggtttgttatgtttttttgctctgcagtgctatgagccttatatctgttaatatgaaggacaaagtcaaaagcagcagtggatagcaggaagggtagagactaatatgtttgggaccaaaaccatctaagttagagatttccagatcacagaggggctgggcattctctggagcagtcattggttggtgctttattgtaatcattttgcgccaatccccaacaattaggaactggaccctgggaataagctgagggtgctgaactgttggggaagggtgactgtagccacatggaagataaaatatgggtttttctgcaaaatttccatctgagggtttttacatttaatatttttttaagacagtttaaagagcaaacgttttttaagtgtattctagttgcaaagtatgcacacatatcttgaatggctttatttttattgtgtaaaactgttgaacacatgactgtgatgcacaaattctttacgtgtaaggagtctatgcattttacagtaacttattttatgatcgggtgatgagacagttatactttcaactgccattatttttattaagtgctttcattttctttacagttattataaaattgtatttattttatacagatgggttttcattttcctgatgctgtaatgtttacttcagcttgttgacctttctttgtgttatctgcatgttgtaacgtgtgataagaatgaatgtaaaggctgtggcaactgtaattaatttttgtaaagggctggtcacacgtggatctggtttatgaatgcatttgggatgattttggtaaccagatcaccttttcagaaatttagatgtgaacaccaaaagaagcattttctcaacaaaaattaatagctggttctattttttttaaacctagaaaaaataaagttgatttttttcaataaaagtgcttttaattcttagcagtggggatggggcatgtgtgttttaccagagctatttgggcattaatatctgcaggcaagtacttaaagcacactgtggcagttggatgctgaaggcaaactgaaaaaccaaatgaaaaaacatcagacttccttctttggtttaaaaatatttccccctttctccccattctcccaatccagtggtgtgctggtaaatgtttagcagttcactcttctgggagaaaattatgtattcaactatacatgtttgttataaattttgctgatagcaagaacatataacacaattaacaaataataagatacaaatactttattgtaaatcccatatagccagttgattctcacagtatacttagttgctcaggaaagaactaaaatgcttttttaaaaggatacttaattgctttttgctcaactcctacagtcaacctatgattgattgtctttcaactgtgatttgaaaaatggcagactgtccaaatctaactcatttcccaataaatttattatcattcaatctgatacgtgatctactgttaaaactgtttcttaccatggtacatattagactcattaagccgaaaccacttttagctttaacattaattgtaaatttatatgattcaattttcataaccaatgcttaacaactgcaggcaaaattctaaaatgtgaccactgggtcttgggaatcagtaggggctgtatccagcacaccactgccccatcctttttttcttaactattagtgttgaataaacttctcatagttaatctacttgctgaactcaggaaattcctatcactgaccctggccagggctttaaagggtaggaaaagcattaatgtcagtcctacacagcgaacttttgatttagaagaatgtgacagaaagaaaacatttactgaaatacatgggaagcttgcatatttctaaagttgtctttatacttttcatttctcaaagctaagtaaactgtggtataggcatctctaagatgttagcatttaaaacatcaattgttttattgatgtttaaacaattgtttaaatcccactgaaaaatttaaatattaaaatatcttgcacagtctaccaaatgagttaaatcgttacagtcgtgtctacctcttatttttctatctgtatttaggctgctgttttggtgagattctaatttctttttcccctggaactactttctgtggaagacaaggaacagactggggacagaggcctgaaaacaaattggaagcactcagagatctattgctgaccagccctattcctcatgagttggcggggggaaagccattgtttttaatttccacttaatatgaaaatgcttgtttttaaaatgttttttcctgctgaacaaatgtatttttaaaaggaaaaaaaattctcttttggctctaagaagtcagctgtatgagcaggcgtgaccatatcataacatgctgatatgatagaaatcaataaatttttacctctcaggaaaaaaaaaa

SEQ ID NO: 337199 - DNA, 754 bp, Homo sapiens
ctccccgccagtccgggcgaacgcggccgggcccttggggaccgagtctcggcgccgccggggaacgggcgcgggccgcgccacagccggagcggggcagggccccgccaccgccttcttccgccggccccgccgccggccatgcattcttccggctcctctgactcccaaagccccggctggggcccggccagcccgagaaaggcagccgcgaggggagtagggcgccagcgcgcccgctcgcgcagcgcctcgggccgcttgggccgccaccgcgtccatgaccgcgacccctcggcgggggacacccgcccccgctctccgcagccgcccgccgtccgcgcccgccgaggtgagcccggcgcgcgggccgcgcccgccgccacgacccttccacatccgcggaaaccgctgcaggctccaccggctccccgcgctgcggtcgcctcttctctgcccctttcatcatcccctgcttccttgccctctggtcggaaatctcattctcttcatccccagttccttggcttttacctctttctggcttttgctcccttccccctactcctgtccttcctctttttcgcattataaccccctactttcttcctctcaccttgtaagctttttttctaggccccccatttttttttttttttttttttttttttttttttttttttttttttttttttttttatttttaaattatttttttatttattaatattatttttttattatataaaataaa

SEQ ID NO: 337200 - DNA, 1072 bp, Homo sapiens
tgaaaggtatacagaattctattctatctttggcaactcctccacaaatttaaaattattttaaaataaaaagttttaaaaaaattgggaagaaaatcactcagaaagtctgttttgatataaaataaaactttctttttaaaatccttcgaagtataaagaatttcaaaaataattaacattttaatcacactgtaaacattgtgcattcagatatttttttaagctgacagactagttagatgaaaagagtccagactgaaatgtttggaatgggtgtctcaatcctagattaaaataagtactctttctaacatgtcttaagacactacttttaaggaattactccagaaaaacttcaggaaataatttttgcctggttagtagcctcaaggatttaaactgattaatatttttattaaatatttctgtagtagattacatttttttctttctttcatgagaagtgttttatcagaaaggtgtgtctaaaatggatgctttccttgtttattttctgggtgtgtttggaagtagactgttgcttatcttcatactgctcccaatatcaccttcttctgaaataatttgttttggtgtgtttggtatatttgaaaatattcccaagagccacagactggtgaaaattcttccttgaaggggttgattggtaatatatatatgtgatacttataacttcatttttcttctctccttgactctgaccaaaacctttgcactgattgattatagttgcgccaaaattgttcacaatgtctgctagataaaccataataatctagagctattcaatagcagacaggtccttactaaaaaataatttagaactagagaattattaaggtcagggaatagtataataagagcactgttctgattttccccaaaattatgatgtgccttagttcagaaaacccagccttgctaggagcggtgcctcacgcctgtaatcccagctttttgggcggctgaggccgggggactgcttgagcctaggagtttgagatagcctgggcagtatagtgagatcctatctctccaaaaaaaaaaa

SEQ ID NO: 337201 - DNA, 346 bp, Homo sapiens
taacattagaggaggctgagtgaaaggtatacagaattctattctatctttggcaactcctccacaaatttaaaattattttaaaataaaaagttttaaaaaaattgggaagaaaatcactcagaaagtctgttttgatataaaataaaactttctttttaaaatccttcgaagtataaagaatttcaaaaataattaacattttaatcacactgtaaacattgtgcattcagatatttttttaagctgacagactagttagatgaaaagagtccagactgaaatgtttggaatgggtgtctcaatcctagattaaaataagtactctttctaacatgtcttaaga

SEQ ID NO: 337202 - DNA, 474 bp, Homo sapiens
gctcctcaggtatggtttattgggtgcagctccttgggtgcacctcctcttgaactagaggcctgtgagctgaaaaattgtttcttccctgctgccaacagtcagtgatgaaacagggactgaacaactactatagacacttccattcaaacggggaaaaaggaagcagcagtcactcatttatagcaattctgaaatccagtcaagcacatgttgctagttccccctaatcccagggcaggaaattttccttgatacatgatttatatgtatgatacacctctaattcccatcccatcccatcctaccccacaggcttcttccttgtcttcctcggttctgtattggtgtctcccttctccaacagtattatttactcacttgctcaatccccaggtacaacaataaaagttaacagaattttaacactcagatcactatgaaaaacaaactaagttgatttctaaatttctg

SEQ ID NO: 337203 - DNA, 192 bp, Homo sapiens
tcttgaccctcatctctaaaaataagataaataaataaaaatatttccatcatcacaaaggtctattggacagggctgctctaggctagacaacccaggtttgaatcagactgcattagcatccaaactgctaatgcatttccctgggtctcagtgtcctcatctacaaaatgggataataaaagttcccat

SEQ ID NO: 337204 - DNA, 490 bp, Homo sapiens
tagctacctgtggctcgtggctaccatattggatagcacaggtctagatgactgtggaaactgagaggttctttgtgacacccacatcctgtaattctaagctctaaaagttgagggttcaagaggagcgaagctctttcactattcagtttttggagggtcaggatagtttcttcaccttctttgtgtctttcactggtgcttcttgcgctctgtagagtctaggagtaagtagatggttggctgagtaggtagatggaggcaggtgcatgtgtgatgggaagtgtggtgacgggttgtgtgggcacacgggatgaggcgcagatggctgggggtttgggaggtgaatggatggtagaaggaggcagggagggaaggaaggaatgtggacggatgttggaattgacgtgtgtgtgagtgaatgagtgtttgaatgcttggaggtttaggagatggctggatggaggaatagatggaaagctgggggcat

SEQ ID NO: 337205 - DNA, 119 bp, Homo sapiens
atgttgaaggaggcacagggcttcatcatgtcttggataggaacttgaggtattgagtgtgatggagggaataggattgccaggcgtgaggtttttttttttttttttttttttttgtg

SEQ ID NO: 337206 - DNA, 289 bp, Homo sapiens
aggagggggagcatgcaggtgagcaagtacaggggccgaggcgagcacttttgggctctggccccacagcagtgtctagggttgttacaatgctcttttagccctcctgtctgaggacggcttaagtgttaaacggcttaagagtcagtgtgacagcctttttgggttcagcatcccgaattatctggcgtccaggaagaatcaggtcacatggacttgaaggatggtgaatgcgggattttattgagtgatggaggtggctctcagcaggatggggagctggagatgg

SEQ ID NO: 337207 - DNA, 918 bp, Homo sapiens
ggggttttgggctggaactgcagcgcttagagagctcggtggaagctgctaaaggcggaggcggggctctggcgagttctccttccaccttcccccacccttctctgccaaccgctgtttcagcccctagctggattccagccattgctgcagctgctccacagcccttttcaggacccaaacaaccgcagccgctgttcccaggatggtgatccgtgtatatattgcatcttcctctggctctacagcgattaagaagaaacaacaagatgtgcttggtttcctagaagccaacaaaataggatttgaagaaaaagatattgcagccaatgaagagaatcggaagtggatgagagaaaatgtacctgaaaatagtcgaccagccacaggttaccccctgccacctcagattttcaatgaaagccagtatcgcggggactatgatgccttctttgaagccagagaaaataatgcagtgtatgccttcttaggcttgacagccccacctggttcaaaggaagcagaagtgcaagcaaagcagcaagcatgaaccttaagcactgtgctttaagcatcctgaaaaatgagtctccattgcttttataaaatagcagaattagctttgcttcaaaagaaataggcttaatgttgaaataatagattagttgggttttcacatgcaaacattcaaaatgaatacaaaattaaaatttgaacattatggtgattatggtgaggagaatgggatattaacataaaattatattaataagtagatatcgtagaaatagtgttgttacctgccaagccatcctgtatacaccaatgattttacaaagaaaacacccttccctccttctgccattactatggcaacttaagtgtatctgcagctctacattaaaaaggagaaagaga

SEQ ID NO: 337208 - DNA, 836 bp, Homo sapiens
gatttcatttttttttttttccacatagagttcagctttgtttgcttcgtgacgttggggggcacatttctgctttgaaggaaaacgaaagctaccaagttttgggagatgggagatggtgctatacggtctttagggttacgtgaagtcaagtaaaatcgcacactgattaagaagaaacaacaagatgtgcttggtttcctagaagccaacaaaataggatttgaagaaaaagatattgcagccaatgaagagaatcggaagtggatgagagaaaatgtacctgaaaatagtcgaccagccacaggttaccccctgccacctcagattttcaatgaaagccagtatcgcggggactatgatgccttctttgaagccagagaaaataatgcagtgtatgccttcttaggcttgacagccccacctggttcaaaggaagcagaagtgcaagcaaagcagcaagcatgaaccttaagcactgtgctttaagcatcctgaaaaatgagtctccattgcttttataaaatagcagaattagctttgcttcaaaagaaataggcttaatgttgaaataatagattagttgggttttcacatgcaaacattcaaaatgaatacaaaattaaaatttgaacattatggtgattatggtgaggagaatgggatattaacataaaattatattaataagtagatatcgtagaaatagtgttgttacctgccaagccatcctgtatacaccaatgattttacaaagaaaacacccttccctccttctgccattactatggcaacttaagtgtatctgcagctctacattaaaaaggagaaagaga

SEQ ID NO: 337209 - DNA, 759 bp, Homo sapiens
gaggagtgcacttctgtaaaggatgggggtacacatgctgtaactggtggggattgagtggaggcctaccgaggcattgtaattattctggattaagaagaaacaacaagatgtgcttggtttcctagaagccaacaaaataggatttgaagaaaaagatattgcagccaatgaagagaatcggaagtggatgagagaaaatgtacctgaaaatagtcgaccagccacaggttaccccctgccacctcagattttcaatgaaagccagtatcgcggggactatgatgccttctttgaagccagagaaaataatgcagtgtatgccttcttaggcttgacagccccacctggttcaaaggaagcagaagtgcaagcaaagcagcaagcatgaaccttaagcactgtgctttaagcatcctgaaaaatgagtctccattgcttttataaaatagcagaattagctttgcttcaaaagaaataggcttaatgttgaaataatagattagttgggttttcacatgcaaacattcaaaatgaatacaaaattaaaatttgaacattatggtgattatggtgaggagaatgggatattaacataaaattatattaataagtagatatcgtagaaatagtgttgttacctgccaagccatcctgtatacaccaatgattttacaaagaaaacacccttccctccttctgccattactatggcaacttaagtgtatctgcagctctacattaaaaaggagaaagaga

SEQ ID NO: 337210 - DNA, 2045 bp, Homo sapiens
ggggttttgggctggaactgcagcgcttagagagctcggtggaagctgctaaaggcggaggcggggctctggcgagttctccttccaccttcccccacccttctctgccaaccgctgtttcagcccctagctggattccagccattgctgcagctgctccacagcccttttcaggacccaaacaaccgcagccgctgttcccaggatggtgatccgtgtatatattgcatcttcctctggctctacagcgggaagagatggatcaagatggtgaaatagaagactccaccaatcatccccttcacacgaacaccaatttaacaactatctacatgcacacacacaaaagcttcatcaatttaacaactatctacatgcacacacacaaaacctttgtaagaactcaaaatcagattaagaagaaacaacaagatgtgcttggtttcctagaagccaacaaaataggatttgaagaaaaagatattgcagccaatgaagagaatcggaagtggatgagagaaaatgtacctgaaaatagtcgaccagccacaggttaccccctgccacctcagattttcaatgaaagccagtatcgcggggactatgatgccttctttgaagccagagaaaataatgcagtgtatgccttcttaggcttgacagccccacctggttcaaaggaagcagaagtgcaagcaaagcagcaagcatgaaccttaagcactgtgctttaagcatcctgaaaaatgagtctccattgcttttataaaatagcagaattagctttgcttcaaaagaaataggcttaatgttgaaataatagattagttgggttttcacatgcaaacattcaaaatgaatacaaaattaaaatttgaacattatggtgattatggtgaggagaatgggatattaacataaaattatattaataagtagatatcgtagaaatagtgttgttacctgccaagccatcctgtatacaccaatgattttacaaagaaaacacccttccctccttctgccattactatggcaacttaagtgtatctgcagctctacattaaaaaggagaaagagaaataacctgtctctcattcctaagttgcctcattaattttcatgaacaagaatatgtacctttttgatgctatattactgcgattaaaaagttcttgcaggtaatgtttatgatatgttaaacgttgtaatttcttatcgtaattataacattcccattcttttgtagatgaaacttctacatattgaaccacagattttctgagcttctaaatgtagcctttcattgcacatttcagtgatcagaatagatatccttttacacgcacaaaagcaatagattcattcagtggacaagttccttgtttaactacacagctatgatggaatgatatatccaagttccttgcctcagtgaaatatgcatatgtatatcatgaaagtgggatgccaagtaagcttaaaatggcattctctagcaaagagattagacttttaaataactcttataaaacaggttggcgatcatttcccaagattggtttcccttgagtttttgctaaaacaaatcttagtagttttgcccgtttaaaacaactcacaatcgtaaatgctactattcctaagatatcttacctttttatttcagtttagccatgtattgtatgagtgtattagtctaagcagtgagaatcttttctatgcctctattccagcaaaaagtagaagtatcaaataaaaagggcaacttttaaaatattaagcctgaagacttctaaaaagacaagaaacatggcctaaataaccaacatagatttacatagtaagtttcacactaccttattaccaaaagcaaacacctcttactttaaactacattatcatgtatatctattgtatgctggtctttactttttgccaaaatcaacatataatgaagagatgcctttgtttcatgagattcaaacttgatgctatgctttaaaataaactcagtacttttagaaacataaaaaaaaaaattc

SEQ ID NO: 337211 - DNA, 1693 bp, Homo sapiens
ctgaaaagcagacagagctcccgaggtttgatatccagaggaaggccactgacaaatagggtccggacctcctcatcctgttggctggcgacactcgccagccaacaaaataggatttgaagaaaaagatattgcagccaatgaagagaatcggaagtggatgagagaaaatgtacctgaaaatagtcgaccagccacaggttaccccctgccacctcagattttcaatgaaagccagtatcgcggggactatgatgccttctttgaagccagagaaaataatgcagtgtatgccttcttaggcttgacagccccacctggttcaaaggaagcagaagtgcaagcaaagcagcaagcatgaaccttaagcactgtgctttaagcatcctgaaaaatgagtctccattgcttttataaaatagcagaattagctttgcttcaaaagaaataggcttaatgttgaaataatagattagttgggttttcacatgcaaacattcaaaatgaatacaaaattaaaatttgaacattatggtgattatggtgaggagaatgggatattaacataaaattatattaataagtagatatcgtagaaatagtgttgttacctgccaagccatcctgtatacaccaatgattttacaaagaaaacacccttccctccttctgccattactatggcaacttaagtgtatctgcagctctacattaaaaaggagaaagagaaataacctgtctctcattcctaagttgcctcattaattttcatgaacaagaatatgtacctttttgatgctatattactgcgattaaaaagttcttgcaggtaatgtttatgatatgttaaacgttgtaatttcttatcgtaattataacattcccattcttttgtagatgaaacttctacatattgaaccacagattttctgagcttctaaatgtagcctttcattgcacatttcagtgatcagaatagatatccttttacacgcacaaaagcaatagattcattcagtggacaagttccttgtttaactacacagctatgatggaatgatatatccaagttccttgcctcagtgaaatatgcatatgtatatcatgaaagtgggatgccaagtaagcttaaaatggcattctctagcaaagagattagacttttaaataactcttataaaacaggttggcgatcatttcccaagattggtttcccttgagtttttgctaaaacaaatcttagtagttttgcccgtttaaaacaactcacaatcgtaaatgctactattcctaagatatcttacctttttatttcagtttagccatgtattgtatgagtgtattagtctaagcagtgagaatcttttctatgcctctattccagcaaaaagtagaagtatcaaataaaaagggcaacttttaaaatattaagcctgaagacttctaaaaagacaagaaacatggcctaaataaccaacatagatttacatagtaagtttcacactaccttattaccaaaagcaaacacctcttactttaaactacattatcatgtatatctattgtatgctggtctttactttttgccaaaatcaacatataatgaagagatgcctttgtttcatgagattcaaacttgatgctatgctttaaaataaactcagtacttttagaaacataaaaaaaaaaattc

SEQ ID NO: 337212 - DNA, 1754 bp, Homo sapiens
ggggttttgggctggaactgcagcgcttagagagctcggtggaagctgctaaaggcggaggcggggctctggcgagttctccttccaccttcccccacccttctctgccaaccgctgtttcagcccctagctggattccagccattgctgcagctgctccacagcccttttcaggacccaaacaaccgcagccgctgttcccaggatggtgatccgtgtatatattgcatcttcctctggctctacagcgattaagaagaaacaacaagatgtgcttggtttcctagaagccaacaaaataggatttgaagaaaaagatattgcagccaatgaagagaatcggaagtggatgagagaaaatgtacctgaaaatagtcgaccagccacaggaagcagaagtgcaagcaaagcagcaagcatgaaccttaagcactgtgctttaagcatcctgaaaaatgagtctccattgcttttataaaatagcagaattagctttgcttcaaaagaaataggcttaatgttgaaataatagattagttgggttttcacatgcaaacattcaaaatgaatacaaaattaaaatttgaacattatggtgattatggtgaggagaatgggatattaacataaaattatattaataagtagatatcgtagaaatagtgttgttacctgccaagccatcctgtatacaccaatgattttacaaagaaaacacccttccctccttctgccattactatggcaacttaagtgtatctgcagctctacattaaaaaggagaaagagaaataacctgtctctcattcctaagttgcctcattaattttcatgaacaagaatatgtacctttttgatgctatattactgcgattaaaaagttcttgcaggtaatgtttatgatatgttaaacgttgtaatttcttatcgtaattataacattcccattcttttgtagatgaaacttctacatattgaaccacagattttctgagcttctaaatgtagcctttcattgcacatttcagtgatcagaatagatatccttttacacgcacaaaagcaatagattcattcagtggacaagttccttgtttaactacacagctatgatggaatgatatatccaagttccttgcctcagtgaaatatgcatatgtatatcatgaaagtgggatgccaagtaagcttaaaatggcattctctagcaaagagattagacttttaaataactcttataaaacaggttggcgatcatttcccaagattggtttcccttgagtttttgctaaaacaaatcttagtagttttgcccgtttaaaacaactcacaatcgtaaatgctactattcctaagatatcttacctttttatttcagtttagccatgtattgtatgagtgtattagtctaagcagtgagaatcttttctatgcctctattccagcaaaaagtagaagtatcaaataaaaagggcaacttttaaaatattaagcctgaagacttctaaaaagacaagaaacatggcctaaataaccaacatagatttacatagtaagtttcacactaccttattaccaaaagcaaacacctcttactttaaactacattatcatgtatatctattgtatgctggtctttactttttgccaaaatcaacatataatgaagagatgcctttgtttcatgagattcaaacttgatgctatgctttaaaataaactcagtacttttagaaacataaaaaaaaaaattc

SEQ ID NO: 337213 - DNA, 1468 bp, Homo sapiens
gtttattcttagtagttggaactaatgtagtctgactaaaatacacatgggtgtctgctctgtgatgtttaaacttatctgttttgtttgtttttcatttcaggaagcagaagtgcaagcaaagcagcaagcatgaaccttaagcactgtgctttaagcatcctgaaaaatgagtctccattgcttttataaaatagcagaattagctttgcttcaaaagaaataggcttaatgttgaaataatagattagttgggttttcacatgcaaacattcaaaatgaatacaaaattaaaatttgaacattatggtgattatggtgaggagaatgggatattaacataaaattatattaataagtagatatcgtagaaatagtgttgttacctgccaagccatcctgtatacaccaatgattttacaaagaaaacacccttccctccttctgccattactatggcaacttaagtgtatctgcagctctacattaaaaaggagaaagagaaataacctgtctctcattcctaagttgcctcattaattttcatgaacaagaatatgtacctttttgatgctatattactgcgattaaaaagttcttgcaggtaatgtttatgatatgttaaacgttgtaatttcttatcgtaattataacattcccattcttttgtagatgaaacttctacatattgaaccacagattttctgagcttctaaatgtagcctttcattgcacatttcagtgatcagaatagatatccttttacacgcacaaaagcaatagattcattcagtggacaagttccttgtttaactacacagctatgatggaatgatatatccaagttccttgcctcagtgaaatatgcatatgtatatcatgaaagtgggatgccaagtaagcttaaaatggcattctctagcaaagagattagacttttaaataactcttataaaacaggttggcgatcatttcccaagattggtttcccttgagtttttgctaaaacaaatcttagtagttttgcccgtttaaaacaactcacaatcgtaaatgctactattcctaagatatcttacctttttatttcagtttagccatgtattgtatgagtgtattagtctaagcagtgagaatcttttctatgcctctattccagcaaaaagtagaagtatcaaataaaaagggcaacttttaaaatattaagcctgaagacttctaaaaagacaagaaacatggcctaaataaccaacatagatttacatagtaagtttcacactaccttattaccaaaagcaaacacctcttactttaaactacattatcatgtatatctattgtatgctggtctttactttttgccaaaatcaacatataatgaagagatgcctttgtttcatgagattcaaacttgatgctatgctttaaaataaactcagtacttttagaaacataaaaaaaaaaattc

SEQ ID NO: 337214 - DNA, 1594 bp, Homo sapiens
caggtgactaagcatccgctggtacagtcattgtattttgcaacccacataatttctgacgcgttctcacagattgtacctgacatacacgacattctctgtccccccggcatttcatacttatactgccagtcatggatcgagggggagcttttatggcttccgtgaacccagacataatcatgccttgtttgtcttcttaagcttgacagccccacctggttcaaaggaagcagaagtgcaagcaaagcagcaagcatgaaccttaagcactgtgctttaagcatcctgaaaaatgagtctccattgcttttataaaatagcagaattagctttgcttcaaaagaaataggcttaatgttgaaataatagattagttgggttttcacatgcaaacattcaaaatgaatacaaaattaaaatttgaacattatggtgattatggtgaggagaatgggatattaacataaaattatattaataagtagatatcgtagaaatagtgttgttacctgccaagccatcctgtatacaccaatgattttacaaagaaaacacccttccctccttctgccattactatggcaacttaagtgtatctgcagctctacattaaaaaggagaaagagaaataacctgtctctcattcctaagttgcctcattaattttcatgaacaagaatatgtacctttttgatgctatattactgcgattaaaaagttcttgcaggtaatgtttatgatatgttaaacgttgtaatttcttatcgtaattataacattcccattcttttgtagatgaaacttctacatattgaaccacagattttctgagcttctaaatgtagcctttcattgcacatttcagtgatcagaatagatatccttttacacgcacaaaagcaatagattcattcagtggacaagttccttgtttaactacacagctatgatggaatgatatatccaagttccttgcctcagtgaaatatgcatatgtatatcatgaaagtgggatgccaagtaagcttaaaatggcattctctagcaaagagattagacttttaaataactcttataaaacaggttggcgatcatttcccaagattggtttcccttgagtttttgctaaaacaaatcttagtagttttgcccgtttaaaacaactcacaatcgtaaatgctactattcctaagatatcttacctttttatttcagtttagccatgtattgtatgagtgtattagtctaagcagtgagaatcttttctatgcctctattccagcaaaaagtagaagtatcaaataaaaagggcaacttttaaaatattaagcctgaagacttctaaaaagacaagaaacatggcctaaataaccaacatagatttacatagtaagtttcacactaccttattaccaaaagcaaacacctcttactttaaactacattatcatgtatatctattgtatgctggtctttactttttgccaaaatcaacatataatgaagagatgcctttgtttcatgagattcaaacttgatgctatgctttaaaataaactcagtacttttagaaacataaaaaaaaaaattc

SEQ ID NO: 337215 - DNA, 641 bp, Homo sapiens
ggggttttgggctggaactgcagcgcttagagagctcggtggaagctgctaaaggcggaggcggggctctggcgagttctccttccaccttcccccacccttctctgccaaccgctgtttcagcccctagctggattccagccattgctgcagctgctccacagcccttttcaggacccaaacaaccgcagccgctgttcccaggatggtgatccgtgtatatattgcatcttcctctggctctacagcgattaagaagaaacaacaagatgtgcttggtttcctagaagccaacaaaataggatttgaagaaaaagatattgcagccaatgaagagaatcggaagtggatgagagaaaatgtacctgaaaatagtcgaccagccacaggttaccccctgccacctcagattttcaatgaaagccagtatcgcggggactatgatgccttctttgaagccagagaaaataatgcagtgtatgccttcttaggcttgacagccccacctggttcaaaggaagcagaagtgcaagcaaagcagcaagcatgaaccttaagcactgtgctttaagcatcctgaaaaattgatgctatgctttaaaataaactcagtacttttagaaacataaaaaaaaaaattc

SEQ ID NO: 337216 - DNA, 1849 bp, Homo sapiens
cgagattccctattaaaaaaaaatagaattgatgcaaacagcctgttccttccaccttcccccacccttctctgccaaccgctgtttcagcccctagctggattccagccattgctgcagctgctccacagcccttttcaggacccaaacaaccgcagccgctgttcccaggatggtgatccgtgtatatattgcatcttcctctggctctacagcgattaagaagaaacaacaagatgtgcttggtttcctagaagccaacaaaataggatttgaagaaaaagatattgcagccaatgaagagaatcggaagtggatgagagaaaatgtacctgaaaatagtcgaccagccacaggttaccccctgccacctcagattttcaatgaaagccagtatcgcggggactatgatgccttctttgaagccagagaaaataatgcagtgtatgccttcttaggcttgacagccccacctggttcaaaggaagcagaagtgcaagcaaagcagcaagcatgaaccttaagcactgtgctttaagcatcctgaaaaatgagtctccattgcttttataaaatagcagaattagctttgcttcaaaagaaataggcttaatgttgaaataatagattagttgggttttcacatgcaaacattcaaaatgaatacaaaattaaaatttgaacattatggtgattatggtgaggagaatgggatattaacataaaattatattaataagtagatatcgtagaaatagtgttgttacctgccaagccatcctgtatacaccaatgattttacaaagaaaacacccttccctccttctgccattactatggcaacttaagtgtatctgcagctctacattaaaaaggagaaagagaaataacctgtctctcattcctaagttgcctcattaattttcatgaacaagaatatgtacctttttgatgctatattactgcgattaaaaagttcttgcaggtaatgtttatgatatgttaaacgttgtaatttcttatcgtaattataacattcccattcttttgtagatgaaacttctacatattgaaccacagattttctgagcttctaaatgtagcctttcattgcacatttcagtgatcagaatagatatccttttacacgcacaaaagcaatagattcattcagtggacaagttccttgtttaactacacagctatgatggaatgatatatccaagttccttgcctcagtgaaatatgcatatgtatatcatgaaagtgggatgccaagtaagcttaaaatggcattctctagcaaagagattagacttttaaataactcttataaaacaggttggcgatcatttcccaagattggtttcccttgagtttttgctaaaacaaatcttagtagttttgcccgtttaaaacaactcacaatcgtaaatgctactattcctaagatatcttacctttttatttcagtttagccatgtattgtatgagtgtattagtctaagcagtgagaatcttttctatgcctctattccagcaaaaagtagaagtatcaaataaaaagggcaacttttaaaatattaagcctgaagacttctaaaaagacaagaaacatggcctaaataaccaacatagatttacatagtaagtttcacactaccttattaccaaaagcaaacacctcttactttaaactacattatcatgtatatctattgtatgctggtctttactttttgccaaaatcaacatataatgaagagatgcctttgtttcatgagattcaaacttgatgctatgctttaaaataaactcagtacttttagaaacataaaaaaaaaaattc

SEQ ID NO: 337217 - DNA, 1882 bp, Homo sapiens
ggggttttgggctggaactgcagcgcttagagagctcggtggaagctgctaaaggcggaggcggggctctggcgagttctccttccaccttcccccacccttctctgccaaccgctgtttcagcccctagctggattccagccattgctgcagctgctccacagcccttttcaggacccaaacaaccgcagccgctgttcccaggatggtgatccgtgtatatattgcatcttcctctggctctacagcgattaagaagaaacaacaagatgtgcttggtttcctagaagccaacaaaataggatttgaagaaaaagatattgcagccaatgaagagaatcggaagtggatgagagaaaatgtacctgaaaatagtcgaccagccacaggttaccccctgccacctcagattttcaatgaaagccagtatcgcggggactatgatgccttctttgaagccagagaaaataatgcagtgtatgccttcttaggcttgacagccccacctggttcaaaggaagcagaagtgcaagcaaagcagcaagcatgaaccttaagcactgtgctttaagcatcctgaaaaatgagtctccattgcttttataaaatagcagaattagctttgcttcaaaagaaataggcttaatgttgaaataatagattagttgggttttcacatgcaaacattcaaaatgaatacaaaattaaaatttgaacattatggtgattatggtgaggagaatgggatattaacataaaattatattaataagtagatatcgtagaaatagtgttgttacctgccaagccatcctgtatacaccaatgattttacaaagaaaacacccttccctccttctgccattactatggcaacttaagtgtatctgcagctctacattaaaaaggagaaagagaaataacctgtctctcattcctaagttgcctcattaattttcatgaacaagaatatgtacctttttgatgctatattactgcgattaaaaagttcttgcaggtaatgtttatgatatgttaaacgttgtaatttcttatcgtaattataacattcccattcttttgtagatgaaacttctacatattgaaccacagattttctgagcttctaaatgtagcctttcattgcacatttcagtgatcagaatagatatccttttacacgcacaaaagcaatagattcattcagtggacaagttccttgtttaactacacagctatgatggaatgatatatccaagttccttgcctcagtgaaatatgcatatgtatatcatgaaagtgggatgccaagtaagcttaaaatggcattctctagcaaagagattagacttttaaataactcttataaaacaggttggcgatcatttcccaagattggtttcccttgagtttttgctaaaacaaatcttagtagttttgcccgtttaaaacaactcacaatcgtaaatgctactattcctaagatatcttacctttttatttcagtttagccatgtattgtatgagtgtattagtctaagcagtgagaatcttttctatgcctctattccagcaaaaagtagaagtatcaaataaaaagggcaacttttaaaatattaagcctgaagacttctaaaaagacaagaaacatggcctaaataaccaacatagatttacatagtaagtttcacactaccttattaccaaaagcaaacacctcttactttaaactacattatcatgtatatctattgtatgctggtctttactttttgccaaaatcaacatataatgaagagatgcctttgtttcatgagattcaaacttgatgctatgctttaaaataaactcagtacttttagaaacataaaaaaaaaaattc

SEQ ID NO: 337218 - DNA, 1828 bp, Homo sapiens
ggggttttgggctggaactgcagcgcttagagagctcggtggaagctgctaaaggcggaggcggggctctggcgagttctccttccaccttcccccacccttctctgccaaccgctgtttcagcccctagctggattccagccattgctgcagctgctccacagcccttttcaggacccaaacaaccgcagccgctgttcccaggatggtgatccgtgtatatattgcatcttcctctggctctacagcgattaagaagaaacaacaagatgtgcttggtttcctagaagccaacaaaataggatttgaagaaaaagatattgcagccaatgaagagaatcggaagtggatgagagaaaatgtacctgaaaatagtcgaccagccacaggttaccccctgccacctcagattttcaatgaaagccagtatcgcggggactatgatgccttctttgaagccagagaaaataatgcagtgtatgccttcttaggcttgacagccccacctggttcaaaggaagcagaagtgcaagcaaagcagcaagcatgaaccttaagcactgtgctttaagcatcctgaaaaatgagtctccattgcttttataaaatagcagaattagctttgcttcaaaagaaataggcttaatgttgaaataatagattagttgggttttcacatgcaaacattcaaaatgaatacaaaattaaaatttgaacattatggtgattatggtgaggagaatgggatattaacataaaattatattaataagtagatatcgtagaaatagtgttgttacctgccaagccatcctgtatacaccaatgattttacaaagaaaacacccttccctccttctgccattactatggcaacttaagtgtatctgcagctctacattaaaaaggagaaagagaaataacctgtctctcattcctaagttgcctcattaattttcatgaacaagaatatgtacctttttgatgctatattactgcgattaaaaagttcttgcaggtaatgtttatgatatgttaaacgttgtaatttcttatcgtaattataacattcccattcttttgtagatgaaacttctacatattgaaccacagattttctgagcttctaaatgtagcctttcattgcacatttcagtgatcagaatagatatccttttacacgcacaaaagcaatagattcattcagtggacaagttccttgtttaactacacagctatgatggaatgatatatccaagttccttgcctcagtgaaatatgcatatgtatatcatgaaataaataactcttataaaacaggttggcgatcatttcccaagattggtttcccttgagtttttgctaaaacaaatcttagtagttttgcccgtttaaaacaactcacaatcgtaaatgctactattcctaagatatcttacctttttatttcagtttagccatgtattgtatgagtgtattagtctaagcagtgagaatcttttctatgcctctattccagcaaaaagtagaagtatcaaataaaaagggcaacttttaaaatattaagcctgaagacttctaaaaagacaagaaacatggcctaaataaccaacatagatttacatagtaagtttcacactaccttattaccaaaagcaaacacctcttactttaaactacattatcatgtatatctattgtatgctggtctttactttttgccaaaatcaacatataatgaagagatgcctttgtttcatgagattcaaacttgatgctatgctttaaaataaactcagtacttttagaaacataaaaaaaaaaattc

SEQ ID NO: 337219 - DNA, 1760 bp, Homo sapiens
ggtttctcccgtgctggacgcttcctgcctttgaacgtcggacttcaagttcttcagttttgggacttggactggctctccttgatcctcagcttgcagaaatgcctattgtggaaccttgtgatcatattaagaagaaacaacaagatgtgcttggtttcctagaagccaacaaaataggatttgaagaaaaagatattgcagccaatgaagagaatcggaagtggatgagagaaaatgtacctgaaaatagtcgaccagccacaggttaccccctgccacctcagattttcaatgaaagccagtatcgcggggactatgatgccttctttgaagccagagaaaataatgcagtgtatgccttcttaggcttgacagccccacctggttcaaaggaagcagaagtgcaagcaaagcagcaagcatgaaccttaagcactgtgctttaagcatcctgaaaaatgagtctccattgcttttataaaatagcagaattagctttgcttcaaaagaaataggcttaatgttgaaataatagattagttgggttttcacatgcaaacattcaaaatgaatacaaaattaaaatttgaacattatggtgattatggtgaggagaatgggatattaacataaaattatattaataagtagatatcgtagaaatagtgttgttacctgccaagccatcctgtatacaccaatgattttacaaagaaaacacccttccctccttctgccattactatggcaacttaagtgtatctgcagctctacattaaaaaggagaaagagaaataacctgtctctcattcctaagttgcctcattaattttcatgaacaagaatatgtacctttttgatgctatattactgcgattaaaaagttcttgcaggtaatgtttatgatatgttaaacgttgtaatttcttatcgtaattataacattcccattcttttgtagatgaaacttctacatattgaaccacagattttctgagcttctaaatgtagcctttcattgcacatttcagtgatcagaatagatatccttttacacgcacaaaagcaatagattcattcagtggacaagttccttgtttaactacacagctatgatggaatgatatatccaagttccttgcctcagtgaaatatgcatatgtatatcatgaaagtgggatgccaagtaagcttaaaatggcattctctagcaaagagattagacttttaaataactcttataaaacaggttggcgatcatttcccaagattggtttcccttgagtttttgctaaaacaaatcttagtagttttgcccgtttaaaacaactcacaatcgtaaatgctactattcctaagatatcttacctttttatttcagtttagccatgtattgtatgagtgtattagtctaagcagtgagaatcttttctatgcctctattccagcaaaaagtagaagtatcaaataaaaagggcaacttttaaaatattaagcctgaagacttctaaaaagacaagaaacatggcctaaataaccaacatagatttacatagtaagtttcacactaccttattaccaaaagcaaacacctcttactttaaactacattatcatgtatatctattgtatgctggtctttactttttgccaaaatcaacatataatgaagagatgcctttgtttcatgagattcaaacttgatgctatgctttaaaataaactcagtacttttagaaacataaaaaaaaaaattc

SEQ ID NO: 337220 - DNA, 888 bp, Homo sapiens
  misc_feature (840)..(840): n is a, c, g, or t
ggggttttgggctggaactgcagcgcttagagagctcggtggaagctgctaaaggcggaggcggggctctggcgagttctccttccaccttcccccacccttctctgccaaccgctgtttcagcccctagctggattccagccattgctgcagctgctccacagcccttttcaggacccaaacaaccgcagccgctgttcccaggatggtgatccgtgtatatattgcatcttcctctggctctacagcgattaagaagaaacaacaagatgtgcttggtttcctagaagccaacaaaataggatttgaagaaaaagatattgcagccaatgaagagaatcggaagtggatgagagaaaatgtacctgaaaatagtcgaccagccacaggttaccccctgccacctcagattttcaatgaaagccagtatcgcggggactatgatgccttctttgaagccagagaaaataatgcagtgtatgccttcttaggcttgacagccccacctggttcaaaggaagcagaagtgcaagcaaagcagcaagcatgaaccttaagcactgtgctttaagcatcctgaaaaatgagtctccattgcttttataaaatagcagaattagctttgcttcaaaagaaataggcttaatgttgaaataatagattagttgggttttcacatgcaaacattcaaaatgaatacaaaattaaaatttgaacattatggtgattatggtgaggagaatgggatattaacataaaattatattaataagtagatatcgtagaaatagtgttgttacctgccaagccatcctgtatacaccaatgatttacagaacncctcccctcgcatacatgcactaggacgcgctctaaggaagatacgtc

SEQ ID NO: 337221 - DNA, 83 bp, Homo sapiens
ttgttctttgaagaatcaacaggacccgattatcaaagagagacctgtttaaatatgtacaatcattttcggtattatttagg

SEQ ID NO: 337222 - DNA, 334 bp, Homo sapiens
gtggagatctgcctgggcatcaagcagagaaggcctcaatccaccactatctctgcacaggaagggttaggaaactcaggctgctggtccgggcaagcagttgctccaaatgcatggagttctgcctggatgtggagtgaagaggcccccctgcatcaggatctctacacaggaaggatggccgtagctcaggctgctgaaccagggagcagttacatgggtggatgatcaaagctggactactgctcttgacaatgacagcaaaggatctgactcttctctggttttcttgtgaataaatcttttgaagcaatgaaatgtcacatagccttaa

SEQ ID NO: 337223 - DNA, 456 bp, Homo sapiens
ctctgtgtgtttgtgactaagaaacattgacacagtatttgatccactcctcctatgcccttgcctctgcttcctgagctcctcagagccaactccaaagaatagacctcccactgatctgtaggttcagtccctaaatcctgtcctgcaggatttggaattaagccactcttcctggtctagaagcccaggcaggatttctgagcgcctgcactgccatcaggcctgagctctcctcagtctccctaaactatgccctgttattctgtgagagtgtcgagtcttccatctctgcctggagcctagccctgtgcccaagctctccaagagtcttgtcacccaactgaatcccaactaattagaaattctggtatataccccataaatgagtttggacatggagtcagttttatctcagtactaccagtacgtagcacagggctgtgcacacagtag

SEQ ID NO: 337224 - DNA, 466 bp, Homo sapiens
gtgtgtgtgtgtgtgtgtgtgtgttcatcacttgttgcttggggtgggaagagacaacaacaacctacagaatccatagttctcagttcatctcccatcctagtccaatcatggcctaacatccttagctaccgatcgcagaggagactgcgcatttgtgttcatgtggccttggatgttggcagattcagattggtgccccaggcatctgtgctgtaactgcagtttcagcgggctcaggaccaggctaaagggcctccaagcttcctccagtttcctggtgcatgcatgtgcaatatgctcccctggcctgggtctttcctgccgcttcttgccagttgggtcagaactagcttattaaccagtttttcttctgagctttaatcgaactggctccaaccagttggaggcttgaaaagggctacgtgatagttatagatttttaaagatatattattattttaga

SEQ ID NO: 337225 - DNA, 195 bp, Homo sapiens
tctcctcaatcttaagacataatagccaaatgcatgcatgaatgcttactgaatcctggatcaaaacaaattagcaaagaatttttggggacaattgaggaaattttaataaagactatgtattagatactattaatgcagtattgattttctaggtataataactggttaggtagaagaaatggccctatactc

SEQ ID NO: 337226 - DNA, 382 bp, Homo sapiens
atctgcctatctcctttggtgaaatgcatatatgagtatcttgcccactcttaactggattgtttctaactgttaaattctgagaattctttatatattctagatgcagtcttttatcagatatatgctttgcagactttcttccagtttgtggtttgtctttttcattcttctaacagtgtcttctgaagagcaggttttaatttttatgaattccatttatcattttttttaaaatgaattgtgctttttgcataacatccaaaaattatttgcctaacccaaggtcacaaagattttcttctggcaactttataattttaggtcttacatttggctatgtgatccattttgagttaatttttaaatatggtatgaggtc

SEQ ID NO: 337227 - DNA, 661 bp, Homo sapiens
gacactgccagttcccaaatcaaccaaaacttagggagttctcaaatgaaataaacaccattgtgccatttccgttaatatcacttctcaattttaacaaacttaaacacatttttagggtaaaaagcacatccatcagactgagtctaggttcagggtaaattctgatctggatttgaccaagggaactgaagttattcctgcagcaaagatttgaccgatggtggatttgactgaggcaactgaagttattcctgcagctaagatgggctctctgatcttgcccacatggtctctatttctcgtagattccaggagccttagaggtagagcctttgaagccattgattctcaaacttggctgcacattagaattgcctgaggaacctaaaaaactaccagtgcccaggcagtatctcagaccaatgagataagagtctctgggggtgggatgcaggcatgagttttaaaaaaagcagttccctggacttactccaaagtgtagctgaggttgagaaacagtgattgaaacttcctctagtgagtccagcccctctcagaaacccatcataactggtcagcaccctgtgctggagcatccccagggtgagcctcaggatgtcccgaggtgacccttctggggtaggtaatgttgctgttc

SEQ ID NO: 337228 - DNA, 395 bp, Homo sapiens
aatgacagtagggtaccatcagtgtgggtatggaggagagtgggagtcaagtgaattctcagacttcacagtcactgtggtcctgctcacttgtaggcaacttgtgtcaaggaactgaagtcactgcattgaaagacagattgttggaagtggttcttttttactttggtggtgcagtgttgtaatttctgaagttcctgggaagttttgccctgtcttcttcctttgagatgtttcaggtggggcagctgggcaaatttgctgctgccttgcacatgtgtgagcagggaatctgtacaggaggttgctagtcacaatccttatttttagaaagggctcaaatcctgtgtgtaaacactatttcatactgattctgctctggtggccacattatg

SEQ ID NO: 337229 - DNA, 695 bp, Homo sapiens
gactcgcctgtaagcagatcagagaaattatagaattaggatctctccaacttggtgatgaaagcgtgagattttcaggccttgtcgtaagactggacaggctactttgtctacggagtagccattcttgtattcctttactttcttaagaaatgtgctttcacttaaaaaaaagactagacgatgctccgtgccctgctgcctcacaaagcctctgcgtgtcggtttatcaaagatcccacgaccaggaggggccctgtggcttcggggcctgtagcctcccagccaggagcagcctgggtctcagttgtggctccctcagcaggttctcagccccccaaccaaaaggccttggcacttcacatgaaagctgccgcttaccctacacacactgccaccgggaggcagctgttgactcgttcgttcccctttgggccctgctctgggaacagtcccttctaggcagttaacctgtgagtcatccagcttatagttcctcataaagaaagaaactagccctaacttccacaacagtctaagccgctcctccactggctctcctcagctgaaaccactcagtctattttactgaaatattccttgtttgtagagcttcaggctcctccctagttcggagaaagcaattctatccactttaagcctttagcttttagtgctcaaagacatctgagggc

SEQ ID NO: 337230 - DNA, 245 bp, Homo sapiens
actttttgagcatacgatgtgtgtgtttctatctttttaaagtagaattccaccatgtatacagttttgttattgcagtttctaaactcagtttttatctgggttttctttcctgatgtcagcttattttagaaaaaatagccaattcaaagttttctcagtcaactcaagaaagtgttctcagtcaactcagagactgtcccattcattctttctttctacatgataactgtatacaaaagtat

SEQ ID NO: 337231 - DNA, 337 bp, Homo sapiens
taggaaaatattcagtagtcaaaaatttgtctccagtgagaagcctctgtccctgccgagcacagccaccaaattgtggcctctccagagatggccactggaatcggggacctatgtgtctcttcagaacattctgattacagacgggacatgtttatggatttccttcagtcttcgacacacacaaaaagatgtgtctctatactcttctgcaacttgtgctctttgctgaacaatatacatcctggaaattgttccaaatcagcaaatacaggatttgtccttgttggcacgccagaatattcctctcagtctcccaagaatggacacttagctt

SEQ ID NO: 337232 - DNA, 394 bp, Homo sapiens
gctgcaggagttgcctgctggggctaagattattccttgtgtttgggataaaggaggggtcaccgcaggggcagtcaactcatgttgggggagacgggatttgcattctgggctcccctcctcgtttatgttaagggtgttgcttgctgatgcttctattaactcttactttgggataatgggaagagagatagttttctggggtatgagtttgtcacttatgttgtagaatctggggggctgcctgttgagattctgaccattgcttgttttgggtgtcattgctggggatacttatttatagtcttgggaagacaagggatgcatgttgcagcggtagtgggtaagaatggtggcatttgctggagttcttttttttttttttttttttttt

SEQ ID NO: 337233 - DNA, 373 bp, Homo sapiens
ttcactgcagcctctgcctcccagattcaagcaattctcctacctcagtctcctgagtagctgggatcacaggcacctgccaccaccttcagttaatttttgtatttatagtagagagggggtttcaccatgttggttaggctgatctcaaactcctgacctcacatgatccacctgcctcggcctctggaagtgctgggattacaggcgtcagccactgcacccggccacaacagcaagtcttattgattctgttggtgttttgctttttttgggtggtggggagtcaggtttattgtgttatgatttacatacaccaaagtttaccctttaaatgtacagttctataaattttgatgaatttataattgtg

SEQ ID NO: 337234 - DNA, 288 bp, Homo sapiens
tgcttttcataccatagcccaaatggctcttcctcatgaaagccttctgggactttcagaataaaacaggctactctatgtatccttacagctgcctgtacttttcctcgataatacactcgatagcacttatcactatacatatttataatacaacgttcttagcccacctacattccccaagtcgcctgagaaactaatgtgctccatttcttctgcaaaatatacgataggcctacctggcacctgaatggcagaaagactcctctagtaacccacaccatcctg

SEQ ID NO: 337235 - DNA, 505 bp, Homo sapiens
gctctcaataatctctcccttttctcatattgcacatggaggcagcatcttataatttatcactttttcatttgtttttgttttccctccacacccccatttatacttaagttctacttagcttttcatgtctcatgtcttttgaaagcctccaagaagctggctacaaactatgttacaggcaaatatttacatgattaaaataatttcaagatttattaattcttctattatataataaactaccctatatacatttgtgaagcaaaattgtcccaatttaacctgctactatgattagcttttgaagataattccaaataaacgacacaggtttgagtggtctaagaagcagtctgtgccatcattgtgtattagcccaacccttggttcctagcccattgctacctgcctgttatcttagtgcttcacagagcttctgtccctcactcatgtgtgggctgacaaggcaggctgtgaactgaacaagagatctgaaagaact

SEQ ID NO: 337236 - DNA, 352 bp, Homo sapiens
tgtttatttctgcataaaccataatacaagctcttgtccacattttccttttgctcatcttcctcctgactgaccctggtgcttccccacgtggccctgcgtactgtggcatgatatgtctccttctcctgggatctgtgagtaacaaactatcactcagtgccaattgtttcctaatccactggccaccctgtgcctgaataataataacacacatcttacaacacacacgcatgtgcacatacacatgcacacacacacgtgaacacatatacacatgcactcacactttagtccctctctcttctttattttgctccataccactcattactgtctaacatgccctatc

SEQ ID NO: 337237 - DNA, 370 bp, Homo sapiens
ccacgagagaggaataaataaagtcagcaagacccaactcagcagacagagaatggggaaaatgaggaagaagagacctgatgaagtcatgacatcgtgaaaggacaaaatagatgaaatctgggcagaagtgatggaccagggtgaggacttgggggccaggggagaatgagttgctgaccttacaggccaataaaccaatgaagtaacaaaacaaaagatggatgaactcatagattacttgaactacagtagtcctcccttatctgtggtttcactctccatggtttcagttacctgtggtcaaccgggtgggaaagtattaaattgaaaattgcagaaataaacaattcataagttttaaattacg

SEQ ID NO: 337238 - DNA, 223 bp, Homo sapiens
cagtttccaggccccatcttattggacatctctgttgtgtttggcagtgctcatcactcttccacctcagagcccacactttttgacttctgcaactctgaagtctggatcatcccattcttcccttctcttcctttctcgtatctttgggcttctctaccaccctctgcagtttgtatccttgggggatccatcttcagcccgccgctgtccccattcacat

SEQ ID NO: 337239 - DNA, 373 bp, Homo sapiens
taatgaaagctttaggccatgccagcaaactagacaccttcaagaccaagacgaactggtatagaagacaaggggatgtggggattggagcaaactagagaaagcacacaggagaacacatgccgtcttgcagaagttgcatccactcagcttcagccaattgttgctatgcgggaacatggacccaaatcttacaatttcccaagccatgctagaaatctaggttttagtgtgaaatctctttgttaaatttaggagacttaattgtaaaacattttcaaaatactgtcagtgagctgccagttttcaatttctgcttctgaatagcctttggaagacctctgtcacctttttttttttttttttttgggag

SEQ ID NO: 337240 - DNA, 3814 bp, Homo sapiens
aaagctggttaaaaacgcagattgctgggtccacccagcttctgatgcaataggtctggggttagaaattttgctttctaatgagttcccaggtgatgctgatgccaatgatgtgaagcccgctcttcacatccgtgaaaatcgctgccttaaggtgctcttaaattgttatagattggtagatcctacctttccatcactggtatgttttttgagaaaaggatcctttcttttcattctgttatattcatcctattacataggatgttggttagcacagagtgggagctctagaaagattgttgaccaatcatcttattgactagaccatctttctagagtataactattttggacacctcaaagatgaagtcagataagctggcagtgacctgattaacgttgtggtaagcagatgccactgtggctgggaagtaccaaatcttctgttgagtgattcagtcttcctgactagatttgccttctagtgggtgtattaataagcgttagttgatatgaattaaatgttgcaactttctatgggtaataagaggatacctttatagtttcatgatgtggagaccaagatacataagaaagcaagaatgagtctccgggtgttccctctgatcagcaaacatgaattcataatttcatttactctcatttttgtaatgcactctgagcaatcctccaggcagatcctatttactaagcttcaggcttttgtcccattttataatgcccaaacacatggagaaaacattttgttgtttttaaaaacaggtatgggatttctgatataatcaattttattgacttcttgggagttgtaatgatctgtgactcactgcataatattgtagttttatagggtggcacatcaccctgtgtaaaacaactttaatgacctgaggactgatgagtacaggaagtgaggtttatcatgagtagcatttattaagcatctgctagaatcaaagcactgcattagctactaaggtacaaagtaagacacagtttaataaggaagacagggcatctacccaagtcaacagttcagtgacatctgttatttgaaccacacaccaatgcaaccgaagtaaatgctgaaagggtgagaagaaggaatagattactatgcatttttgagaggatgaagaaggcttcttggagaaggtttctgaaaagagatacggaattaagagaaatagaaaagagcactgacgaagcactcaggatggctattcaaggaattggggatccacagcagctgtgcacaaccatccctaatgccagaaaaatggggtaagggtgaagggaactgggtctagagctttgcatgtttttttctggttaacccttagagtcaccctgaaggtgtggatcccatcttataataaggtgaggacactgagtcaggaaactaacttgctaaaatcaagtcctcccagtcctcccatcaggtccttccagatctggaggagccaggatttgaactcacatttgtctgacttcaaaatccatgctttttcttgtgttccaaattgcacaatggagtcactgccagttcaagctcctatgaaaagggatggatgtgaaaagtcatttgttgattccacagatttttagtaggtaccatgtctcctgcctttatcactatcctactcctctgctacaacttctctgctacaggcacccactgcagttacttgatatgagttaaatgaatccatccatccaaacttccattcattgaataaatacttagcaatggcttcctttgtatcaggcactattctaggagctggggctacagtgcagatggaaaccagcaaagctcactgccctcatggagcttatatgtgagtgaataaatctcagggtggttctcctgtcataggtcctggctcctctgccagctcttccaaatgggttcagagaggttttctccttgtcctgttgtgtaactgataatcccatggtggacctcactttgctattcatatgcactaagtagtttatggtgtgctttgtggctggcaattgtgacagattctattcttctattggtatgtggtttctttggggcatttgtttggatactgatggcatcttccgggggtctgaggcacctacacaaacctcaggtcactatcacgtgatactggagttgcctgttaaattatatttcttcttccacaaaactgcaggttccctgagggaaaggtctatgtcctgctcatttttggatccctaatggctggcacagtacctggtgcataatatggttcaacaaatatttgtaaaatgaatgaatcaaatagtccttcaaagcatcttcagaatcaagattgtcatctagattgcacccgaagtttatctttctagtattcagaatataatcaatcattgcttaaattattccatttcatcattcttgaataaaagctactaattttaaatactaatatctgagatatcttcgaaaagaagattagtcgttgtatgtgttgcttataaattttctctatggtggaaaatattcccaaaccatgtctaagcaatgaaaaaccagtgttctggcaggaaataaactgatgtttgttgtgttttgtatctgtcttcccgttccaaatcatttatatatacttgatggtctgtgggcttgacttgcaagtattttcctgggagacatttttattcaaaagacctgtattgcctgccaaaccttcatttaagagactcattatggatgtcatctgcatcattgcaaacttttctggtcgtctctataaatagcaagataatatttacagagttttacattggctcttgaattttaaaatattcttatagacaaacattaattggaatggggggtaaggaggtaggaatggcttacttgcggaaatgcaggctcattgttgtgtctagtaggtgctaggtgcattcacacatctcttaagctttaaacaacctattgagccggtttccatttccttgatctattagatttaaaaaaatgaagcataaaggagttggctcttgccctaagtcatactactgatggaatgagaatacaaaccaaaaacactttattcaagtccaggaaatatctgccttgaaaaagaataacttaaaaattaaaagtgtcctctatttgaacatgaaaacagctaataaagatgtgttattttattttattattattaattttgtcctcccatattggcaaagataaagcaattgacaaaaatggaattcttgttcaatactggcaggagtgaaaattggtagaacctttctagaaggcaatttggcaacatgtatgaaaacctaaatgttgatacacctttacccagcagtttgtttaggaatttatcctaatgaataaaagttgtccaagtcttcaaacatgagcccaaaggtatatttcatgatgtttatgatattaaaacattggaaacaactgaaacatccttcagtaaaagatggattaaataaattccatgcagttgtcatttaaaaatatttagatatatgtttattgctatggatatatgttcccaaaatattattgaatcaaaaagtagactacaggatatatgttgaatatgagctcatttataacattgaatattttaagataatgtatgtttcatagagagatcttcaccaaatgttaaggatttttttttctgggctgtggtatttgggtgatctttacattcttcagactcatgtgtgtttgaaactttttataatgaacatatatcatttttattagaaaagaataaagtttttgaaaaaa

SEQ ID NO: 337241 - DNA, 1367 bp, Homo sapiens
aaagctggttaaaaacgcagattgctgggtccacccagcttctgatgcaataggtctggggttagaaattttgctttctaatgagttcccaggtgatgctgatgccaatgatgtgaagcccgctcttcacatccgtgaaaatcgctgccttaaggtgctcttaaattgttatagattggtagatcctacctttccatcactggtatgttttttgagaaaaggatcctttcttttcattctgttatattcatcctattacataggatgttggttagcacagagtgggagctctagaaagattgttgaccaatcatcttattgactagaccatctttctagagtataactattttggacacctcaaagatgaagtcagataagctggcagtgacctgattaacgttgtggtaagcagatgccactgtggctgggaagtaccaaatcttctgttgagtgattcagtcttcctgactagatttgccttctagtgggtgtattaataagcgttagttgatatgaattaaatgttgcaactttctatgggtaataagaggatacctttatagtttcatgatgtggagaccaagatacataagaaagcaagaatgagtctccgggtgttccctctgatcagcaaacatgaattcataatttcatttactctcatttttgtaatgcactctgagcaatcctccaggcagatcctatttactaagcttcaggcttttgtcccattttataatgcccaaacacatggagaaaacattttgttgtttttaaaaacaggtatgggatttctgatataatcaattttattgacttcttgggagttgtaatgatctgtgactcactgcataatattgtagttttatagggtggcacatcaccctgtgtaaaacaactttaatgacctgaggactgatgagtacaggaagtgaggtttatcatgagtagcatttattaagcatctgctagaatcaaagcactgcattagctactaaggtacaaagtaagacacagtttaataaggaagacagggcatctacccaagtcaacagttcagtgacatctgttatttgaaccacacaccaatgcaaccgaagtaaatgatttgtctgacttcaaaatccatgctttttcttgtgttccaaattgcacaatggagtcactgccagttcaagctccttagtaattgaagctatgaaatggatttgtctggtatcccttgagtaacaagtcttgagaaggcatgtgacaaagcaatgcaagaggcaaaaaccagataagctagaagtaaaagtgagaagagccatttcgacttcaccctttggttgccagacctctgttttctggctgtgaatagaaga

SEQ ID NO: 337242 - DNA, 269 bp, Homo sapiens
ttgattttctaatacacgtgtgccatttagttatctgtactgtttattggttggtattttttgttatttagctcttcttcgggcatagatctttgggttttgtttgtccactggtttcccaaggcaccttgaaaagtgcctggtatataatcggcgcttaataagtaaaaaatcaacatttaattcttcaatcaaatgcgttacatataggtatggcttccatataaatgagcagtaagccagccttccagccactgtgcgagtgccat

SEQ ID NO: 337243 - DNA, 244 bp, Homo sapiens
tgggaaaacagtttactagagtgttcgtgttgattgtttataagtaactcacttatcactaacaagagaatatgttaaaattggttaggaatgaaactctggaattgaagtttctaggtaggaattgaagaataaggaagattatgattttgtgcaaaagaaaagagaatttaatagtgctaaagaagtagaaggatttcagagatgagcagtgggagttatttgaggttcctgattcagagga

SEQ ID NO: 337244 - DNA, 529 bp, Homo sapiens
gccttgctgcaacactctcttaatctccaccgctacacactgccatcatgaacggcacggtaactatccgcgttagaaagttcatgtccaaccgactacttcagaggaaacaaatggtcattgatgtccttcaccctgggaaggcaacagtgcctaagacagaaattcagggaaaactagccaaaatgtacaagaccataccggatgtcatctttgtatttggattcagagctcattttggcggtggcaagacaactggctttggcatgatttatgattccctggattatgcagagaaaaatgaatccaaacattgacttgcaagacatggcctttgtgagaagaaaaagacctcaagaaagcaacgaaaggaacgcaagaacagaatgaagacagtcaggggaagtgcaaaggccagtgctggtgctggcaaaaagccgaaggagtaaaggtgctgcaatcatgttatttgtggctgttgtggatttttcacaagaagattaataaactataaactttaaaaagtaaa

SEQ ID NO: 337245 - DNA, 268 bp, Homo sapiens
ctgttgtgtgtatgtgttcagagtttctttagacatcttcttgcctctagtgatctctgttcaatatcacattaaggtagttgggcctaggttgtcagttatctcccagcttctttaattttagtgggaatttggaagtttggattgataattggaaccctcctcctcctcctccttcttcctcttcctcttcttcctcttcttcttgtttcttcttttttttttttttttttttttggcagggtcttgctctgtcacccagagcaag

SEQ ID NO: 337246 - DNA, 277 bp, Homo sapiens
agggagaccgtggggagagggagagggagagggagaggaagagggagagcctgtcagtgttattgtctccttgaagtaaacttttttgtttctctgattgctttttacatttttttcttttacttttttttttggcagttttattttatgccttgatgtggtcttctttttatatttcttgcttgagttcagagaccttattaaagctctgtcttcttttctcaattttaggacatgtttagtcaatatctctttctcctcctgagacttcaattac

SEQ ID NO: 337247 - DNA, 428 bp, Homo sapiens
aagtaatgactagcagtcaagtaaggctagtagtctttttttttttaaaaaaaaaagacagggtctcactctgccacctaggctgaagtgcagtggcgcgatcttggctcactgcaacctctgcctcccggctaaagcaatcctcccacctcagcctcctgactactggtgcatgccactgtgccaggctaattttttgtatttttggtagagatggggtttcaccatgatgcccaggctggtctcaaactcctgggctcaagtgatctacccaccttggcctcccgaaatgctgggattacaggcttgagccactgcacccggccttggctagcagtctatttccactttacagatgcagaaactgtggctcagagagttactgggaaatacgacataataaactatcctatactgcctgcactttt

SEQ ID NO: 337248 - DNA, 340 bp, Homo sapiens
atgtccttagccataccagggaatgtatcctgaacagtaggagatagaggtggagaggaacaatggttgagattgtgaaagtcttagcccttttggtgattgcatgccaccctgtgtgtcctaaggagacattcagggtttttgagtgagggaatggtgtaatgaacaactgtaatggaagggttttggaaagttgtgttagggggacacatcagtgagcaggctgttggagttgcagggtggccagagtttgcactgggatcactggaagtgaaaaaggtgggtttgagaaacattactgttgaaataatctgtttacagggcagggtgaagggatgag

SEQ ID NO: 337249 - DNA, 158 bp, Homo sapiens
aaatccaagctccttaaagaccctacatgacttggctccactcacctctccagtctcatctcattatgctttctttcttgcttaatctgctgcagccatgcccattggtcttattgcctggctctatttttctttaaagcgctatcactacaggccat

SEQ ID NO: 337250 - DNA, 393 bp, Homo sapiens
caggcattgccaggggagagatgaaggctcaccagatgtcggtccatgagggagctttcactggtctgtagtgaaatgtggagtgagaaaaaataagaatgacaccaatggtgagcttctcataaagcaaattattccatttaatttgcaggtggaggggcctttttgtcttttgcttctgtagatgacttttgatgttacttgcattatgatcagagcgtgttgataatatttctacttcatggaacttcctgatgttttctccgtgattataggcatgagccaccattcctggcttaagaaaacttacttaaatcacttatatgaaggcaactttcactgcactcctaggatgcattcctttttgtctgttttgagagtctccgtcgaact

SEQ ID NO: 337251 - DNA, 300 bp, Homo sapiens
attggttgccatctacgtacagaatgtgtgaggatggggctgggggcggtggctatccctctaattccagcactttgggaggctgaagctggtggcttgcttgagcctgggagttcgagaccagcctgggcaacatggtgaaacctcatctctacaaaaaaatacaaaaattagtggggtgtggtggcctgtgcctgtggtctcagctacttgggaggctgacatagaaggatcaatcgagtccaggaggttgaggctggagtgagccatgatggtgccactgcactccagcctgggtga

SEQ ID NO: 337252 - DNA, 90 bp, Homo sapiens
ctggcctggaatacttcttaataaggtatttttaaaagactttgaaagtttagaaacgatacatataccattaacaaaagaataattctc

SEQ ID NO: 337253 - DNA, 572 bp, Homo sapiens
agggactaccactttcaccttttttgaagtcttcgaggatggtaccagtctgggctgtttcttccctgatgtggcattgtttttcactaaccgtcttggtttgagttgggggaaggagactgtgccacgggcttctccttgacttttccagcttagtagctcttacctagtgagtgaaggaaccaatgtgagggttctgccagtcatttcatgtatatatttgggaactagggaaatgaccatgggtggatctgtggatctgttgtgagctagactggggccaggactcccttcataacctggcttccatacgccccctctttatagggagaacgtggtagtgctttgggtccacagatagtgtccattcataccctaagttcaacaaaaccagaaagctctgggcactcccctttccttaacacactacttcccaagcaagtggccaacagccctatggagaaagactggggaaatgactattgatgacacatgccttggtgttacagggacctgcctaattctgttctggcgttcctttaattagtggcttccaggtttgagaaatggct

SEQ ID NO: 337254 - DNA, 270 bp, Homo sapiens
tagtttcaaatgaataattgaaattgagggaaatgagagagccacaggtggattcaacctgggccagctggactgctgaaagggaagaggtatttatacaatgcttagaatttagctgcagaaatgattggatgggtcagtggtgatggagtggggttgagagtttcagatgggtaaactgaacatgtccattaccaggtacagagcacgtgatgacaaccatgaactgtgaaggttggggagctgctgaaacagaggaaaaaggggaga

SEQ ID NO: 337255 - DNA, 118 bp, Homo sapiens
tgtttgtgaaggagaatcatttattgatcctcagacagattctaagcctcctgagggattgttaggattccacacagactggctgacattaaatgttggagggcggtactttacaact

SEQ ID NO: 337256 - DNA, 402 bp, Homo sapiens
cctggagaacaaggatgttgcgttattaatcttattctcagtgtttgtcagtgtctgctaaacatttgttagagttaatgattgagtgaataatgcagggattaattcgtgaatgctttgtgaaagcaatggagatatggatgtggactggtagagtggaggaccttcctctaattgaggcttggagtggagggcagaggaagtactccagagctggaacaaggacatagtgatgagcataccatgtgttgggaaggcaatcctcagattacataataaattagaatgcatgccaatacagactccttaggttgcaagtcataggaaacctagctcagagtggattaaacaacatcacacagcaactcttgacttttttcaaatgaagaattggccccaaag

SEQ ID NO: 337257 - DNA, 284 bp, Homo sapiens
tgggggtggttcctgggcacttctgtctcctctaataaaagaggccagtgactttggccacagaatacacatccacttctcatgggttcatatccaaagaacaaactccttcagactcgctggtccatgcactcgagatccccagggtatcttgagttattatgtcaaaaggagagagaaaccagctaacactagtcctaatacttatacgaatacaaagagggatgttttcttcttgctgttccagggaatgtgctgagttaacaccttttttctttttattg

SEQ ID NO: 337258 - DNA, 440 bp, Homo sapiens
agcatgggagaaaatcatatatctgcctgaaaaaagaaaagtaaagtaaaaagaaaggaaaagaaaagaaaaaaggaaggaaggaagagagggaggggaaggaaggaagaaaggaaggaaggaaggaaaggaagtctgtcctcatctaagtttaccttatttctctgccttggctatccaaatgagcctcaaaatcctcaatggggtcataaaaatgaccagaccttgaagattgcacagctccatgtaacgtatcacagtcatcaacaaaacttcaactctcagctcagctcaataaacgttattgaggacctgcctcatacgaggtcctgtgtgaagaactagggatgcgaacaacaagatgtgattcttccctgcaggagcttagctctgaccttgaccttagtgaagaagtaaagaaggactggttttctcaatta

SEQ ID NO: 337259 - DNA, 503 bp, Homo sapiens
tttgggtaacaagctgagtggggaaacacacaaaaatgagaccaagacattaatttctttgcatttcagtgaagacatagaactctggagtggagcgccagggaagaacaaagcagttgagggcctctcattataaagaggagacagaatgaggatgctgcccatttgtctgtcatctcccagcaggcactcctggccagggggatgaggtaacccactcctgctgtcatctaagccaagcatctctgccgttcaatttggtggcctgctcatgatgcccagaatcaaggttgcatgaagagtgcctatattattaggagcactaacattaatcaattcccgaaaggaaagttttgataagaagacactggagaactgatccattcataagcagaaaaagacagtcagaacagattgagaatgaatcgggatttacctgctattagggagggagattcttcctggctgacatctagaagagaagcacaggatgatgggaacag

SEQ ID NO: 337260 - DNA, 277 bp, Homo sapiens
ccccagcagtccaaaccacaaagaccacagataggaatctgaggcttggtatagctcaggcctgtgggtgaacgatgagggctgtatgtgtaatacaaaacaggaataagaaattaaggctgagggctgggcacagtggttcagatctaacccagcactgtggaaggccaacatgggaagatcactcacttgaggacaggaattggtgaccagcctaggcaacatagtgagaccccatctacaaaaaatttaaaaaaaaatttagccaagtgtggtg

SEQ ID NO: 337261 - DNA, 468 bp, Homo sapiens
gttggctcatgcctgtaatccaagcactgggaggctgaggtgggtagatcacttgaggcctggagttcaagaccaacctggccaacatggtgaaaccctgtctctactaaaaatacaaaaaaattaggcatggtggcacacgcctgtaatcccagctactccggaggctgaagcacgagaatcatttgaattcaggaggcagatgttgcagtgagctgagatcacaccactgcactccagcctgggtgacagagtgagactctgtctcagaaaataatactaataatcttgagatgagagcatcctggatttaccagatgggccctaaatccaatgacacatgtccttataagagacaaaagaggatactcatatacacagaaggccatgtaaggggactgaggcagaggttgaagttatgcagcccaagtcaagaaacacgtggatccaccagtagctagaagaggc

SEQ ID NO: 337262 - DNA, 392 bp, Homo sapiens
acctgtggtcccagctgcttgggaggctgaggcaggagaaatcacttaagcccaggaggttaaggctgcagtgagctgtaattatgccactgcactccagcctgggtgacagaacaagaccctctctaaaaaaataaataataaaaggcataagtagtggttacatggttgtcttcactgtatgataatgctcttgagcagcacatttgtctttttctgtgtgtaggttatattttaatgaaaaggtttttagagatagaatgggagggctggagttggagacagtgaatacagataactttttgagggattttgctatatagggaagcagggaaatggatggtagctagaagaggagtctggccaacagggggacttcataaagctgggac

SEQ ID NO: 337263 - DNA, 421 bp, Homo sapiens
tttgttatgacttataaacattttatttttttatcatcaacctccaaagtggttggtcatttgagcaggtgcaaacacagtagaattcatatttgttttacctgagaagccaaatgaacttttattcatatggaaatcttggggaaaggaaaccgtacaagagattaagcttagtttcttgaaaagcgggtaatacagctattgagattcaaaactaccatcatttctgagattgaaacttttgaaaatttaagttgaagaaaaagatcagggtttatatctttttaaagctaaaagattaaaacaatgaaagaatttaaggttttaagtaagtctcccttaaaatcttggtttcttcctataaaaggaaactgtttacttacttttatatagaatatgtatttttaaccgcctaaaaatg

SEQ ID NO: 337264 - DNA, 211 bp, Homo sapiens
cagcaagggaagttctcttagatgaagaggggcttggctgacgcaaaaagacaggtcagatttagagaggcaagagtggaggtggcaaagagatgcaccacgaaattgccaatgtgacaacggagggaactgacaacaattaaatcaacactagctggggaacggcttcttgctaagtgatttacaacccttctcatttaattctcagggt

SEQ ID NO: 337265 - DNA, 294 bp, Homo sapiens
ggaaaggtcatcattgctgaggggctggcaagtgtagcacagaagtagaatagggtcatggatagctgaagccacacatggttctgtgtttctgtggagccatgcaaggaggtcctcacagaattacttgagaccaccgctccttttaggatccaatagaattgcaattctgtggtaatattggatcggtttgaatgggccatacactctggatggtgtcagctacgatgtagtgtaaggccaaaaattaaggcccagtgtgatttgccacctggatgcctggtcatattggta

SEQ ID NO: 337266 - DNA, 346 bp, Homo sapiens
aatcgttttaacagatctcatcttattaccttgctggacatttcatctcagtagtttcattactccaagttaggtctttctgtgtgccttttttttctggctaaaattatgttacttcctttggtcatcctgagcaagtgtgtggcctctattcagatatatgcctctgttaaaggcattccacacagatccagcataatgattgagttttgcttctcacctttgttctctccacccagtaaggtgtggagctgttaataaagttcattattttattggccaagattattgatgctcataggttgaagaacccatgacattcacatgagtctgtattaactgcttg

SEQ ID NO: 337267 - DNA, 187 bp, Homo sapiens
ggagcccctgtggggtttccctgaggcctggacattatgtaatctgtctgcgttttatagtgcggcccaagcactctattgagaaatatgagcccaaataaaacaaaggtgaatttgagtgcagttccctagaacaaaaaccctttgcagtcctgtggcttcgcagcagccgctggcccagccctga

SEQ ID NO: 337268 - DNA, 314 bp, Homo sapiens
tgaacttgctagggtgaggaaccaatgatcttttgactttggatctttgaaccctgggtgagctctgctacagcagcccggaccctcagtattcccatctaccactgggaactaggtaacagccaggatggcaggatggtgggtagaagggggaagctctggaagtctgtgcagacagcgtattttccaggtgaattgtggaagagaaagcagggctgacagccccatgccaggagctgggggtacccaagagtaggtggggtttgagtcaggagggttggggccaggagcacaggaaccagacaggcccaccc

SEQ ID NO: 337269 - DNA, 427 bp, Homo sapiens
tttgtatgacctgtcagccgggaaatgtaaggtttttatagtattttggtcagaagcctcttgggttgggctatacacaagaaggtgatccacatactggagtatactcccatcctccaattgcagacccctcagatccctctctaagggttgggcaaagaagtgggggctatcccaaaagccttaggggagcactgcccaagtgtttttctctggtattaggattttcccattcaaaggcaaaagggtattgggactctggaaccagaggaatgaagaagaaagcatcttttaggtgtaggactgagaaccattttgcatcccctggtacctgagccagtagggtatatagatccatcatcaatgggtggagagagataacagcctcattaattattctgagaacctatactaccctgtatttccc

SEQ ID NO: 337270 - DNA, 357 bp, Homo sapiens
ctcttactggtctctccccaggcctcatctgcactcttgggttcagctacctactttagtgaacataccctaaaacgtatttccccaaccctcatctcatacaagtcttactgctctcctttcactccatgcttccctttccttttcccactcgagatggagcttccaccacctgctttgcccagttagcaaatgtgtatccttcattttgtcccagagagcacaccttcacagaagcccactagagcacccagctagctcatacccattctttcatgattatctattgatttgtttggttattgaataatgaccgtatcctgaactcaatttccagcttcgaaaaagcacagacct

SEQ ID NO: 337271 - DNA, 243 bp, Homo sapiens
ttggaagcactgtttcttctgtccttgaccttgttccacatgttttacccattacctcctgtgagcaggcacagggcctttccttgtcacctgggcttcagctgctttgaggatgactacttaccccttgcagtagcttcccaccaaggttcttgaaagggaagttttcataatgttcatttttttaaaaagttagaccagctataccccctaaacttaagtctgcttgttttcatatgacgt

SEQ ID NO: 337272 - DNA, 416 bp, Homo sapiens
gatgcatactaaccgttatgattcagttcttagttttgtctccttctgacctaccttttcctgatttttgtgactgattttgattttatgcttactcttgtgtctaaaagctgtctttcttatactacaatggggaagttacattgagtatgtcagcaacaatgtttaaacaaggggcaaaacctcactataatcgtatgtattttcattaagcatgacattctatgcaaggcttaccttcggggattaatcattagaaagtgccagaagtatccaaaagcgtccagccttgttatgtggcttcctctaaacatcacatcattttattgattaaaatgcttaaaagcttttgtgaataactctacattgaagtatcaatgagtggttcttaacccatcactgtatgcatctcggtt

SEQ ID NO: 337273 - DNA, 168 bp, Homo sapiens
gaacagcaaacatgtccacgcatggttggaatataacattcccagggtaaagcatgggaagaggtgaggctggagggctgtgattaggaaaggccttgtgatttgtccttatcctgaggcagggagccacttaagggtttcagtagacgagtgacacaatcacccctc

SEQ ID NO: 337274 - DNA, 437 bp, Homo sapiens
tcttgcaatattttcccatctctagccatcctagtccaatgtcatcttggctccagcctactgtttcattgttctaatcccattagggtttcttcctttcacccacacccccatcaaggaactggctaatgatcaggtggcaggtttctgtggtcatgccaacattaacctgcaggtgatagggaaactctgagtaccctcaggatgagctatgtcctagtgctgttctttccctgatggttttggaccgaacatttggctgtataaggatgaaaaatgcttctgattacaagtgctggcttttagattccaaaagagatttatgtagttcaacctgaagcttttttgatgtcttgactaaacccacacttagtttgaaagaagctaagagtctgactctagaccaaattaaacaaaattcctttcactcattgttg

SEQ ID NO: 337275 - DNA, 514 bp, Homo sapiens
ggggataaggcattttaactgaaactcgtgtcagcttcattctatttatggcttgtatatcatagctttcccataagtctgccacaaagctgaatgtatagacctcaattaccggctctccaatcagtcccttagttaaatccttccaaatcaattaaagccacttcaggtggcactctcctgaggcctgcatatttagcagcattctgtgcaagtagcaggttcactgtaatattcattggtcaattaaaaggtacacctaacataggagcgattactaaacattaaccataggaggacgagggccaggtcatctccacttttatagccttcatcagctctaagatgaagatgcttgcacacagaagacatccagtaaaaatctaagacactgattgaagtaatcaattatatgaaagttttaaaatatactctatcaatcttgccaacacctgactgtgttgatacagggaagtcccttcccctctgtgagccttcgttttctcagccatct

SEQ ID NO: 337276 - DNA, 352 bp, Homo sapiens
ctgactccattctcagaggaggaaaaataatcctatgcagcctctgaaagtgcttaacctacaccaggaaatgggctaaggattaaaaatgtgcccgcaggagtgaggcaaggaggaagatggaatgtggattggtaaagcagacactctagtgtcctgcccagataacactgggtccctttaatcgtcttgtgtgccctttcccggcttttgtgtgctttgctgctaagggatggtaccaacatttcttaagaaaaaccttcttcaaccaccgaagctgcttcacatgcagatgaagacagcagaggtgcttggaagtttatagccctctcttacctgccacagtcagtga

SEQ ID NO: 337277 - DNA, 208 bp, Homo sapiens
ggttgacaggagggagatggtgtttggggattgagcaggtaggtggggagagatgtttctctgatatcatcacaaaaatcatagaggagagcaaaaaaaattcagtctctagaatcttcatgtactattatatattctaggagttaacgttactcccactctgagggccccagagaaaggttgagtagcttgctctgctatgcatggt

SEQ ID NO: 337278 - DNA, 95 bp, Homo sapiens
atgtggaagcacttttggaactcttaagcagcccccaaatggagcagatgatgattagactgcacatctcagactgagctcctcattcccaaaaa

SEQ ID NO: 337279 - DNA, 1850 bp, Homo sapiens
tgtgttttgaatgtggccaacagcactggacaagagaaaaccatttgtacaattaccagaatgaagtggatgatgacctagtctgccatatttgccttcaacctctgctgcagccactagacacaccctgtggacatacattctgctacaagtgcctcagaaactttttacaagagaaagatttctgtccgttggaccggaaaagacttcattttaagttgtgcaagaagtctagtattctagttcataaactcctagacaaattattagttttatgtccattttcttcagtgtgcaaagatgtaatgcaacgttgtgatctggaggcacatctcaaaaacagatgtcctggagcttctcatcggagagttgccctggagagaaggaaaactagtagaactcaagcagagattgagaatgaaaatgggcccactctactagatcctgcaggtaccttatctccagaagcagactgtttggggacaggcgcagtgcctgtggagcggcacttgacatcagcgtctctttccacatggagtgaggagcctggccttgacaaccctgcctttgaggagagcgctggagctgacaccacacaacagccacttagtttaccagaaggagaaatcaccacgattgaaattcatcggtccaatccttacattcagttaggaatcagcattgtgggtggcaacgaaacacctttgattaacattgtcatccaggaggtctatcgggatggggtcattgccagagacgggagacttcttgctggagaccagattcttcaggtcaacaactacaatatcagcaatgtgtcccataactatgcccgagctgtcctttcccagccctgcaacacactgcatcttactgtgcttcgagagaggcgctttggcaaccgagcacacaaccattctgatagtaactctccacgagaagagattttccaagtggctcttcataaacgggactctggtgaacagcttggcattaaattggtgcgaaggacagatgagccaggggtttttattcttgacctgttggaaggggggttggctgcccaggacggcaggctaagcagcaatgaccgagtgctggccatcaatgggcacgacctgaagtatggaactccggagcttgctgcccagattattcaggccagtggagagagagtgaatttaacaattgctagaccagggaaaccccagcctggtaacaccattagagaagcaggaaatcatagcagcagcagccagcaccacacaccaccaccgtattatagcagaccaagctcacataaggatcttactcagtgtgttacatgccaagaaaaacacattactgtaaagaaggaaccacatgaatcccttggcatgaccgttgctgggggcaggggaagtaagagtggtgagctgcccatctttgtgaccagtgtgccaccccatggctgccttgcacgagatggcagaataaagagaggtgatgtgttgctaaatatcaacggcattgatttgaccaatttaagtcacagtgaggcagttgcaatgctgaaagccagtgccgcgtcccctgctgttgcccttaaagcacttgaggtccagattgttgaggaggcgactcagaacgcggaggagcagccgagtactttcagcgaaaatgagtatgatgccagttggtccccatcatgggtcatgtggcttgggcttcccagcacacttcatagctgccacgatatagttttacgaagaagttacttgggaagttggggctttagtatcgttggtggatatgaagagaaccacaccaatcagccttttttcattaaaactattgtcttgggaactcct

SEQ ID NO: 337280 - DNA, 476 bp, Homo sapiens
aagggtgttcacagaatatgatctccttttatcttcacctcaatgctgtgatgttgcttatccttctgagtttttatagataacacattgggactaagaaagagggaggaagtaatatggtcaaagccgctccttagaaagatttctctggcagctgtggggacagagtagagggaagacagaatgatggtgaggagacctgtcaatggcaacggttcagacaagttgtggggagggctcgaacaagggcagaagccaggctgcaggtggcatgaggcagtgtcacatcagtctcactcactactgtggccaagtctccttaaatgtttgctgagtgaatggatgactgaatggtgtctctgacagagacatatggatgaaggagatagaggtaaagtgcagggaggacccattgatgacaaaggggtttccagatcagtctgtcacggggagcaattcaagagaagaggtggggc

SEQ ID NO: 337281 - DNA, 159 bp, Homo sapiens
gtttggattaggccacaagaaggagcagatgataccatcagatgcttatagggttggggcagctaatgggcttctaaactatttggtccctggcttacttagcaagaagggtagggaagaccaaactctgcactctttttttttttttttttttttttt

SEQ ID NO: 337282 - DNA, 451 bp, Homo sapiens
attccaggtatttgctttggatggttctgtgtttatcctctctctatttataagaggttacttataagaaaaagaacacaaaataaatacaactttagagctttgaaaggtgtccatgcagttgagggtcctgacccttaagtgttattggctttttgataaattcacttctggtgcttactgtaggtagtcctgcctctacaagtcagtaaagaagatgcgatagcaaataatacaaagtcagacagcctcagcagctccttgatcatcttgcttctaggttctcagactctcttatcctgcttccatcttctgggacggcacatttagcttctgatcttggcttccaaatcaactctagttgtacatttttgcccatttttttctcccaaagtctcttaagaattctgatagcaaagaccccaatctggctttccaggtgttctaatgc

SEQ ID NO: 337283 - DNA, 347 bp, Homo sapiens
aaaacagctaagtaagatgaaaaggaaaagtccaaacatgagggggacccacattacttataatagtaaaagactggaagcaatcttgtaaaagtggcacattcactcaacaaaagacagctatagtaacatctgcacacagtatagttatacatatgtccaaaaaaaggcaaaaagaacacaagacaaaggaatattagtgaggtgaaattaatgatttgtcctctactctcataacttgcaatattctttaattactttataacaaaatgtattttaattatcacaaaaagcataggcctggcctgttgaaatacttttacagtcccaacataaatgtcataaaa

SEQ ID NO: 337284 - DNA, 327 bp, Homo sapiens
ggaaggcaagagggagagagagagatagaagagagaaccagccacatcctggggaatgagaacagatgcacaaaggacagagcagcaatgccgaaggaggcaccgaggcaggccctgaagaggagtactctgagaccgatgccccaggaggcttgaggaggatgggcttgggaaaaactgcaacaccaagaccctctctgagacacaaccccaggggcacacccacacacttgcacctgccttatctggcagaggtgaggagtggggcagggaggagcctaaagacctctctgaccctaatgccagccaaccccacagagagagcgt

SEQ ID NO: 337285 - DNA, 349 bp, Homo sapiens
  misc_feature (311)..(311): n is a, c, g, or t
  misc_feature (330)..(330): n is a, c, g, or t
cgaattccagctcggttccctacctctgacagacatcatgacaaaagaagaaagtattcccatgaggaatcattctttcgaaagacttctctgttggttccgttagccagctactttaccagcttttacagtgtaattcactctacaagcagtctcacacaaaagactacatattgtatgattctgtttatatgaaatgtccagaaaaggtaaatctatagacaaagcaaatcagtagttgcctacggcccagggattggctacaaataggctccagaaaactctgggaagatggtagagatgtctttcanaggtagggattctttaaantccacccggaagcatgcca

SEQ ID NO: 337286 - DNA, 642 bp, Homo sapiens
agctttgctggattcaggccctgggtttgcccaggcctgtatgaccttgagcaagttattctgagcttcactttcttcctctatgatggagaaaataatgatagcacttacctctatagagttatgaaaatttagtaagataatccatgtatgcatttagcactgttgagatcttggcttactgcaagctccgcctcctgggttcacaccgttctcctgcctcagcctcccgagtagttgggactacaggcactggccaccactccctgctaattttttgttttcgtatttttagaagagacgggtttcaccgtgttagccaggatggcctcgatctgacctcgtgatcctcccgcctcggccttccaaagagctgggattacaggcatgagccaccatgcccagcctattactcttaagcctagttatttaaatcaaacatttagtgagctcttacatgatgttataggagactctgaagattctcaactgttgattcctgttcataaggcagttatagtcttgttgagaactaagttttatgcagataaataaactagaaagtgtatgtgaattgccgaaagagagaacaaaagtactgtcagtgcgcagtaactgggaagaaaacagtagtccaaagta

SEQ ID NO: 337287 - DNA, 335 bp, Homo sapiens
gggtggtagatgaaaattctatgaaaatcttgaagacaggattaacctgtaagagctccagtaggcaaaaaataaatttcacaaggtatttcacgaatataactgtagggttgagttaataactatataatgaactttttacttctcaaaaatattgtgagtcacattgttgtgcgtgcaatgaatgtttacaaacataacatacactgggcagtagtgtacacaacactacacctaaaatcagggacaaaagtgtaaattaaaaacctaactggctggagattaaaaatattattcaaatgaatgcatcaaagaataaatcaaaggtctaactg

SEQ ID NO: 337288 - DNA, 146 bp, Homo sapiens
ttttccatgctcttaatgtattcctttttagtaggaatccggaagtattagattgaatggaaaagcacttgccatctctgtctaggggtcacaaattgaaatggctcctgtatcacatacggaggtcttgtgtatctgtggcaaca

SEQ ID NO: 337289 - DNA, 203 bp, Homo sapiens
atatgctctgtcatttactcgtcacacttctgtctgaggaggcttgttctgctccctcttacaggtgacagggctgggaccgagcagttgcatctcttgctaaagcctgcgatggtcctgccccagctcacgcggccagcacgggctctgcctctctctgccgtctcagtaaatgtttacacgggcatcccttctcctccctc

SEQ ID NO: 337290 - DNA, 502 bp, Homo sapiens
agaggaagagaaatagcttgccagatgcattatgaggaaagaggggagtgaacatgatgttgggaaggggtactaaggataaacgattttcttattttcttgctgatggtcattagtcacttattagctgagctaattgaggagaccagaggaatggatgttgcagagtcagtcaacagccctgaaggttttcactggtcttgaagcatgctgagatactctctgtctgacactgtgaacctgctttctggttggtcctcatcttttctccctcttcatcaagctcagcttgaatgccagatcagtggttatgagaagccctggacattcccagagtgagatcaacctgtgttgcttagaaatccaggttcagttgcttccctattcttagcaggtgtgaacctttcctgaggtagaggaaatgtagctcccagtgggttgataggatagattggacttgggggtaagagagtgtcctcaagcgtgtcttctgtatgttata

SEQ ID NO: 337291 - DNA, 268 bp, Homo sapiens
gtgtctcagaacaccagtgaccaccgttaggtgagcaaggcagtaaaattacagagcaaaatctaacaggccagagctttcctggaaaagaggtttctcaggagccagccccaaacatatccaagggcagttaccagcctttaagtctgaggtttggatttgagaattaactttgaaactagagccaaccccaggttaaggagggagcagaaggaaatacaggaagttgatgaataaaaacagaaagtctttggtaccatgagagtga

SEQ ID NO: 337292 - DNA, 206 bp, Homo sapiens
ggctagaatgagtgtgggtaagagtgtgagtgtgtgtgagtccataagcatgcgtgtgtgtgttccctgagtttaggtatatgactaagcacgtggcaactggcccttgacatccacaatgcagggacaaggccataaatacaatcccataatacacacaaaagcatcttgaggttgtgaaaggtgatataaaaatacaatgtcta

SEQ ID NO: 337293 - DNA, 498 bp, Homo sapiens
ggtttgcttgaggtccttttaccatgagcatccctttccaaagaaaatgggcaagcttgctatttaatacagctagaccttctctcactaagaattgaatgattcttcagtggaaaaaagaaaaaccatcagggctttaaatgttctgattgggttggaatggaggagagattattctgggtggatagagaggaggaaggaactttttttaaaaaaaactaagaaaccacattttatcatgtaccagataaagatacctggctactgagacaggtttcctaagttacctggacagtaatgacaagactcacttgtttattagagtcagaagataatctgtccttacgcattttcaaaactatcatgagaatattttcagtgaaacagattgcagaaaagatagatcttagaacgtaatcttaatatcagctgtgagcattaatagacagtcactgtcaagaactggcttaaggctgaatcaaaacatagataaacaac

SEQ ID NO: 337294 - DNA, 195 bp, Homo sapiens
tgctgggattacaggtgtgagccactgcgcccggcccataatgttatatttctaataacctccatcctgtttttatttttttgctattgttaagtacaacatatctgtatgtaaactttccatatcttgtaaaccacacaatgtattcttatttttattttagtcagttttcctttaaagaagttaagtaaacaa

SEQ ID NO: 337295 - DNA, 419 bp, Homo sapiens
atgtggcaaaggtctgcaggctatgtacgcacttcctacctcaagcccaggttgtaagaactcaggtgtaaccatccctgcaaatgattgggcactgggcccagtgggtttgctgtgacaatgatggaagctggggcaggcatccagggagccttgtcagtattgggctgtctttcaatactagagaagcaacattaattctgtgtattggagaactcgcttcctatttccttgtgacccagtctctaataactttatgcctgttggccagtctgtaagctttcttaggaaaggagcaaatagtatttttctttactgagccctgcagtgtttaagaaagcactgagcccgtagcagcactcaacaaaataagtactggctaaataagtagaagacaatgcacctctgaggatgtttag

SEQ ID NO: 337296 - DNA, 454 bp, Homo sapiens
gtatctcttccaaatgcacaatgaaggagttctcatcaacagcacaaggcaatacagaagtgatccacacagggacattgcaaagacatgaacgtcatcacattggagatttttccttccaggaaattgagaaagatattcataactttgagtttcagtggcaagaagatgaaagaaatggccatgaagcacccatgacaaaaatcaaaaaattgatgggtagtacagagcaatatgatcacaggcatgctggaaacaagcctattaaatatcagcttggatcaagctttcattcacatctgtctgaactccacatatttcagcccaaagggaaaattaataatcaagtggagaagtctatcaacgatgcttcctcggtttcaacagcccaaagaatttcttgtaggcccaaaacccatatatctaataactatggggataattttctgaatta

SEQ ID NO: 337297 - DNA, 664 bp, Homo sapiens
tgccagtcaccgagggagtcggggcttaaacccaggcccatctgaccgcaaagccaatgtcctgtgtgctttagaccttcaattccctcacagtttgtggcctgccagacttcatgtggcaggggcttccagcccactctcagctccctgctgggttctggataaatctgagcaagaagcattcagtgccaatcaatgagcagtatagagaatttctggaagggagacacaagaagctgttagaaagggcggcttccagggaagttctagggagtctgggatgaatgagaaacttatcctaacaacttttgggctctctgaattttttttagtatctgcaagtattgtacttgttcaaatatgtttaaggctgcaggctgtattctaaactccttgaaagtgagaaccaggtttcactcatatttccatcttttcaacccctagatcagtgacttcccagggaagtagtacctgcatttggggttgacctttgggtttcccctgtactggtctggcctggcctggctggaccactggctggctgggtggctgtgacctagccccttctttctctttgctcctctgtcaaatgagagtgttggtctgaacgatctctaaagcctggaagaggagcagatcctctgtgctcagcccccactctgtg

SEQ ID NO: 337298 - DNA, 865 bp, Homo sapiens
ctcccaaagtgctgagattacagggcatgagccaccacgcctgaccaggaaaattttaaggtacagtgcttcaaccctgtacacgactaggcctccaggagttttcaacttggtcaaggtaggactggctggctcccaagtcagtcagcccagtcagactgggctgcatattttgtgccccaaagcatagctgactattgatattcaactagcagctgtcttaaggtttctaaaagaacaagaaaataaccaggaactagtgagacaagccagtatatatcacgtcttatcttctgtcattggagagttattcaatatgtctcatcctcagtttctttatatgaaaaatgaaaatgcagagtggctataaggattctattaaatatgaagtgctcacacagagatggcttcaataaataatattttagctatttttagaaatcacttagaaagtccattttccctccacaaattgtctagcaaacacaactgatttttctaccaaatagaccaccttttttgacaaactgaatggtgcattttaatatcatataccttcactgcatttgcaaaggcatttcatcccctatcttaggcaatttggtattatttgtacttatctgataaaatgatttctgattttaaaaatctagatatggctgcagagtggtagatgaattaaaattttaatttcagtagatgactccttcccaggccccaggaaagggccctaagggaaggaccatgactctcctttttcccagatgaatcccaagtgcctggcgcacagttacctccataacgggtgcgcggtgcacatttgggatggttgtatcatttcttagaggataccgtgaggaatcac

SEQ ID NO: 337299 - DNA, 308 bp, Homo sapiens
atatattgccttaattcatagaaacaattattaaactatttcacaatactctaattgaagaatttgatggtcttgttttctacatgcaaaacactgtgccctattgcaatgctaatggattttaaacattttattcatgttgaaagtattttttcacgaatggtatcatttagaatttccttattcacaggtcgctcctctgttatctttcttatttttgtatgccttgaagcaataggatggtggtggctcacacctgtaatcccaacaattggggcagccaaggtgggaggatctcttgagcccag

SEQ ID NO: 337300 - DNA, 535 bp, Homo sapiens
tctcatctggcaatcctgcatatttcccatctaaaagtcccagctgggatctcactaattgggcctctttaacccactttcagcaatatgctaaatgaaacttaaggagaaaatttcaaaactgataagaaacatattgatatagtgtctggtgggggccatgggagttgagataggccatctggatgcttatattcgtaaaatgttttgtttggtggaaataattcacctaactcacaagctgtacaaatattaagatcaaaagtcctaacttgcacaggctgtcaggaaaacctgtggtacaggaaacagagactgtctaaccaagccaaaatgtttctatgtacccagtgcaggtcttgactgccctggtatccctccatacttaacggtctgtaccagtacttctggccaagaaaatacattcatgatataggtttacttacagagcatttgcaaatgcttttgcttgttttccctttaccatttcgaagtaaataatacctccatctcacaaatgagaaacttggtatag

SEQ ID NO: 337301 - DNA, 384 bp, Homo sapiens
ctatctattaagctttttcacttgtccattctattttccacacccagtgtttccaattggttttcttctctaactgcctgttgctgcttcatgtttccagcatcctccgtttctctctgagtttatgatgcttattttgctttctaattgtttaacatggtgttctttgccgcgtgtgctgatcagtttattgctcctcttccacagtactcgtgcgcctcccatttctcattccttttctcctatgagtccatattcccttggacttgctcatgtccccatggaaagggcaaaagcccagcccttggcctgcgtccctccaagtgagcctgccatgacagtgggggaggcagagagcctctagcattcttatcccagccctat

SEQ ID NO: 337302 - DNA, 170 bp, Homo sapiens
actcccaggctccaaataaacccctcacacacggctaaccccatgtccatgtcattttccctttctccaaatcctaatcctaccttccgagtagttgggattacaggtgcaatacttgggtgcctgtaatcccaactattcgaggtctgtagagaaagctgcctatgcca

SEQ ID NO: 337303 - DNA, 81 bp, Homo sapiens
aatggtgatacattctaagaaatgtgtcatcagacaatttcagcattgtgttaacattataaagtatagttacataaacct

SEQ ID NO: 337304 - DNA, 542 bp, Homo sapiens
tccttctgttccagccattcaggactccttgatgttcctcaaacaactcaactgcaggccagtctcagggcattgcattctctggctttgtcattctcgaccaccctgagcagcaattttgatcatcttatatcccctaacctgcattatttcccttcatacagtttgccattatgtgaagttatacaatggacttagttgtctattgattgtcaacagccttgggttgacagcagtattatgacacatatgtaaacagattttgctcattctggtagtctcaaccctaaaacagtgcctggcacacagagtcattatgaatttgaatatttgtttacctcctcaagtcaagacagtaagaaaatagcatgtataatggagactgtccatcccaatccactctccccatcttctgtggtataactgcagcctaacacacatggctagccagacacactccactccccagcctcccttgctgtcagatgtggccatgagcctaggatctcacctaagaaaggtgattaagtaccatgagccac

SEQ ID NO: 337305 - DNA, 416 bp, Homo sapiens
cctgataaatatgtcaggcattatactaggttctttatattcctgacatcatctcattctttgctcaatcaccctgttcgagtaggtggtattatgctcatttttacagatgagaaaactgaacttttttagaatgttagcaccctgctgcaaaccacacaaaattatcataaagtgcacacaagataccatctataaaaaaatgaagattattcctgggaccatattttaagaccagagttatccattgtttacttctgctaattctgaattagcttgtccttgtaatatgacttgataatgtcaccccctcagagcaatttcaagcagtttcctaatcaagcataatgactcaaattatatcctctcttagctgggcatggtggtgcttgcttgtactcaggaggctgaggcca

SEQ ID NO: 337306 - DNA, 150 bp, Homo sapiens
cctgccccagcttcccaaagttctgggattataggcgtgagccaccttgtcaggctgaatagtattttttatagtatgaaagtagcatctgcaaaaccagtcagaatggcgattattaaaaagtcaaaaaaataacaaatgctggcgagg

SEQ ID NO: 337307 - DNA, 454 bp, Homo sapiens
cccaattgaggaaaaacttgaaagcaccaatgtgatagagggaacatgttaatttttttcttatgcattttatagaatccccaaatgccacagaagaagcaacatctagatttctagcacatctcagttaagatgtcacgcagcctcatggtcctggcaacagcttgagccttctctgggcaacacattaaaaatggaagatgatccaagaaagatctgaaattcaaaaggaatgtgagcaaggttcctggtgagtctgtgggtattttcaggaataaagtcaggggcatgttatgttaatgttttatcggtgtgatttttttcccctcatttatttatagtttaattcagccatctgacaaatatttttcagcactgtccaggctctggaagttacaaactaaataattaacttaaacgaacttgtccgtaagcagcttcaagtctggtaggg

SEQ ID NO: 337308 - DNA, 191 bp, Homo sapiens
tccccatgcattcatccagcttctccaacctggcttgtgacctcaacactcaaatggttcttgctggagtcaccaatggcctccatgtcactaaatccaaaggacaatcttttggtccttaccctccatctcctctccacaacatataacactgctgatcaagccttccctctcaaaatgctcccttccca

SEQ ID NO: 337309 - DNA, 211 bp, Homo sapiens
ggaagagggaggacaaacaactaccaaagccctccagcatcacctgttggcatcacgcaatttgataaagtccatgataaaccataaaaagatagcagattggatagtaatatagctaattgtatgtatgtatgtatgtgtgtattttgagatggtgtctcattcactctgttgcccagggtgtgcagtgacgcaatcttggctcaatgca

SEQ ID NO: 337310 - DNA, 106 bp, Homo sapiens
tcatatggacactttgagtcttgtaagtgatcattttccctctttgtgttgctactctaaagcttagaattaaatttgtggcccacccacagcaagggtacaggca

SEQ ID NO: 337311 - DNA, 836 bp, Homo sapiens
  misc_feature (386)..(386): n is a, c, g, or t
  misc_feature (400)..(400): n is a, c, g, or t
  misc_feature (403)..(403): n is a, c, g, or t
  misc_feature (414)..(414): n is a, c, g, or t
  misc_feature (417)..(417): n is a, c, g, or t
  misc_feature (428)..(428): n is a, c, g, or t
  misc_feature (457)..(457): n is a, c, g, or t
  misc_feature (482)..(482): n is a, c, g, or t
  misc_feature (488)..(488): n is a, c, g, or t
gaaactgtagctaactaccaacatttataaataattttatatatacgtagataaccaaactacaaagtttctgttttgagactaatgttgaatacaaataagtacttgagctatcagttaggttttagaaatgtttgagactttgagaaactattttgtaaatcagtgtaagtgttccattgatgttattaaacttttgtaaatgtgcactctaaattgtagttacatgttgttcagactctgttggaaattttaataactcaaagaatgaacatacatatgtacacaatttcttttgagactgttagcaaatttcagttgttggtaaaaaaaagattgcaaacaggacaatattaccatttttatccctgaaaaaaccatgtgangaaccgaacaagtnaantgtgagctcanaanagtgaacattntttaattctgaaattctgtaactgtattnggaagcctctcaccagtgggaagangctttngatggaactcctattttaaatcagataatgtgaattccgtatagaaatgacacttgatgaggcctacaatttgcagcatccaaatttggccaacatttcaagcacttataagcagtttatcattgatgacttcatcttgtaacacattttcggccacaggataatttcagaactatacgttccacacctgcatgcacctactacacttcttcgggggctgttatactttaacggggacattccactcccacctagcatccactggcgatcatccccactccagcaaactcgggcattgctatctttgtaatctctaacacctgggcacacgaatatcttccgcacgaa

SEQ ID NO: 337312 - DNA, 547 bp, Homo sapiens
cctcagtttcctcagctacaaaatgggagagtaacaccaactttgcagggttgttgtgtggaataaattaggtattatatggacaacctgactagcctagagctgaggacacagtaggtgctcaataaattacaggctcctgcctagagaggcagtgtagcgtcagtgtgggctctggagccagatccttgagtgcgaatcctaactctgccacataacagctgtgtgaccttggacaagttacttaaccactatgaacctcagcttcctcatctataaaatggggatagcagtgctgacctctgagggttaaatgagttcattggtgtaaagtgcttaacattcaccatgagcatttcttggccttcccttctcttccttcctttcttccttcctctgtaggtgcctgaggactgagacaagactcctaggtggaagttgtgagaaggtagaaacgatgggacaaacacagctgcccaagagtaaagcaacctaggcagggcatggtggctcatgcctataatcccagcactctgggaggctgagg

SEQ ID NO: 337313 - DNA, 143 bp, Homo sapiens
caggaggtgagggaggtgagcagatgattattaggggcattgctctggagtttcaatgttaagagccgttggaagacatggaaggttttcagcaggagtcaaatgtaggggcagagcaggccatcagctcatcaggcaacagc

SEQ ID NO: 337314 - DNA, 865 bp, Homo sapiens
catattagagagaattcttaccaatgtgaagaatgtggcaaagcttttaaatggttctcaacccttactagacacaagagaattcatactggagagaaacccttcaaatgtgaagaatgtggcaaagctttaaagcagtcctcaacccttactacacataagataattcatactggggagaaaccatatagatgtgaagaatgtggcaaagccttcaaccggtcctcacaccttactacacataagataattcatactggagagaagccctacaaatgtgaagaatgtggcaaagcttttaaccagtcttcaacccttagtacacataagttcattcatgctggagagaaaccctacaaatgtgaggaatgtgacaaagcttttaaccgatcctcaaatcttactaaacataagataattcatacaggagagaaatcttacaaatgtgaagaatgtggtaaagcctttaaccaatcctcaactcttactaaacataggaaaattcatactagacagaaaccctacaactgtgaagaatgtgacaatacatttaaccagtcctcaaaccttattaaacaaaataattcatactggagagaaactctacaaatgtcaagaatgtgggaaagcctttaagcagtcctcaactcttactaagcattaaatattggccgggtgcggtggcttatgcaaaatggctcccagcattttgggaggctgaggtgggtggatcacaaggtcaagagatcgagaccatcctggccaacatggtgaaaccctgtctctactaaaaatacaaaaattatctgggtgtggtggcacgtgcctgtattcccatctactcgggaggcttaggcaggataat

SEQ ID NO: 337315 - DNA, 189 bp, Homo sapiens
cttttagccagtcatcaatccttactacacataagagaattcacactggagagaaaccctacaaatgtgaagaatgtggcaaaggcttttaaccgatcctcaaatcttactaaacataagataattcatacaggagagaaatcttacaaatgtgaagaatgtggtaaagcctttaaccaatcctcaact

SEQ ID NO: 337316 - DNA, 324 bp, Homo sapiens
ccactgcccctcacctgtctatgatattttctatttctgtatcgatgttctgcattttgttgagacattgttctccttgtatcctttaactctttattcatcgtttcttttagctttttgagcagatttcagacagctgatttaaagtctttgtctagtactttcaatgtctgtgcttccttaaagacaatttgtttcttttgtgaatgggctgtactctcttatgtcactgcatggtttgtaatttttttttgaaaattggagtcaggcacagtgattcacatctataataccttttccccccaaaaagaaaaaagtaaaatt

SEQ ID NO: 337317 - DNA, 462 bp, Homo sapiens
atattattttttaaagaagaaaagtatcctcaatgcctactttgtgacaggcactggggaactcatgtctaagggaagaaagtcctcaagtttcaaggggttaggcttgaccctctcaaccactgtctgctgctgaattaacctcagccactcacagatactcattcaacaaacatctccccactcctctgtggggtcagcctggagtctcagaggaagccaggtcctggaggggacgtgggctgtttgtgtctgtccggcatcccatcccgcttagtaaacgacaccccgattttcaccaggggaaccaatctctccgcaagcggtcttggaggagctgtcaatcaagatgcacctccctccaggccaaaggggcgggcctaagacctaaactgggccaatcggatgctctcctggagcggattcctcccagcctgggaatctgaagggtggtccattcat

SEQ ID NO: 337318 - DNA, 298 bp, Homo sapiens
ctatttcagccagtgccaggattttattttccacccctttattaaaaaacaacatactgtgccattttgggtgcttctaaatgtgggtctaccctcaatggctcattaacaacatttctcaattcaacttcatccgctagtctctgcagtggtttgacatcagttacatttctgtcttaagtctgacccaataaaagtcatctcttcccagcttatctttaccttctctcaagtgtgaatataagatttatcagttattaagctgtttatttttttaaaggtatctagctttgtgtca

SEQ ID NO: 337319 - DNA, 577 bp, Homo sapiens
cagatgagtaaacatcctaactatggcagagcctagaattaaagctagaagcagtaggtatactgaatcttgggttttacaagcccttacatatttgttttatttttttatcatttccaacaaaataccatgaaggaaaaccctaagataagtaatataatagctaacaacaattaagtgtctatgatgtatctcagtgccttatgtttattatatctcatcatgtcttatagccctccaaagcaaataagatattcttcattattaggatgaaaaaactgaggcaaaaagaatttgcctgtggtcacacagctatgaagcagtagattttcgagctctgatttttgacctcatgttcttttaaagattttctttgtgttctcctatcctcagacaatttcagattctcctcgctgacaacatggatgtactgtcttcattgatctagtaaagaaaaattacagtgtgtattacctctgatctgttcatgtatggttttaacagttaggatttcagttactgtttacttcatggcgttccacaacagcagcaccatacagatgaaactcgagaacag

SEQ ID NO: 337320 - DNA, 342 bp, Homo sapiens
  misc_feature (40)..(41): n is a, c, g, or t
  misc_feature (43)..(43): n is a, c, g, or t
  misc_feature (52)..(52): n is a, c, g, or t
tcgcccccgcctccccccccccccccgcctaccccagagnnanttttagggnaggcactgccattcctcagcctattccagacagagcagaagagagaaaagaagaaataaagcaaaagaaacaagagagagtaaaagaagctcccatggtttttctctgagaatttcactggggatctaattttaaagaaggggacatgaagattgaagaaagaacacataatttcaaccattttgttaaatgaaatttgttggctctataaaaacgcttctgttttggttatgtcctctagttttccctggttttccttacaaagaataataattctgttctgtcctctc

SEQ ID NO: 337321 - DNA, 360 bp, Homo sapiens
taacaccatatcacacatataacacacccgctaaaaaaaaataaaaagtccaggcatatcctgggcccaaaggcactgccattcctcagcctattccagacagagcagaagagagaaaagaagaaataaagcaaaagaaacaagagagagtaaaagaagctcccatggtttttctctgagaatttcactggggatctaattttaaagaaggggacatgaagattgaagaaagaacacataatttcaaccattttgttaaatgaaatttgttggctctataaaaacgcttctgttttggttatgtcctctagttttccctggttttccttacaaagaataataattctgttctgtcctctc

SEQ ID NO: 337322 - DNA, 356 bp, Homo sapiens
  misc_feature (44)..(44): n is a, c, g, or t
  misc_feature (46)..(46): n is a, c, g, or t
  misc_feature (65)..(66): n is a, c, g, or t
ttaatcattgtacccacctcctcttgattcgccgccccgaaggnanccttgagcggtagaccttnnaggcactgccattcctcagcctattccagacagagcagaagagagaaaagaagaaataaagcaaaagaaacaagagagagtaaaagaagctcccatggtttttctctgagaatttcactggggatctaattttaaagaaggggacatgaagattgaagaaagaacacataatttcaaccattttgttaaatgaaatttgttggctctataaaaacgcttctgttttggttatgtcctctagttttccctggttttccttacaaagaataataattctgttctgtcctctc

SEQ ID NO: 337323 - DNA, 349 bp, Homo sapiens
agtcttaaccgttcaactccctacactcctctcagtctaccccttttgaaaagctcatgaggcactgccattcctcagcctattccagacagagcagaagagagaaaagaagaaataaagcaaaagaaacaagagagagtaaaagaagctcccatggtttttctctgagaatttcactggggatctaattttaaagaaggggacatgaagattgaagaaagaacacataatttcaaccattttgttaaatgaaatttgttggctctataaaaacgcttctgttttggttatgtcctctagttttccctggttttccttacaaagaataataattctgttctgtcctctc

SEQ ID NO: 337324 - DNA, 344 bp, Homo sapiens
acgtttttccccattcgtttattttcaaccccgataatcttcgaggcacaaccaaggcactgccattcctcagcctattccagacagagcagaagagagaaaagaagaaataaagcaaaagaaacaagagagagtaaaagaagctcccatggtttttctctgagaatttcactggggatctaattttaaagaaggggacatgaagattgaagaaagaacacataatttcaaccattttgttaaatgaaatttgttggctctataaaaacgcttctgttttggttatgtcctctagttttccctggttttccttacaaagaataataattctgttctgtcctctc

SEQ ID NO: 337325 - DNA, 343 bp, Homo sapiens
  misc_feature (15)..(15): n is a, c, g, or t
ctccttccccctccnctctcaccctgttatgtccaccgacaataaaagaactgaggcactgccattcctcagcctattccagacagagcagaagagagaaaagaagaaataaagcaaaagaaacaagagagagtaaaagaagctcccatggtttttctctgagaatttcactggggatctaattttaaagaaggggacatgaagattgaagaaagaacacataatttcaaccattttgttaaatgaaatttgttggctctataaaaacgcttctgttttggttatgtcctctagttttccctggttttccttacaaagaataataattctgttctgtcctctc

SEQ ID NO: 337326 - DNA, 342 bp, Homo sapiens
  misc_feature (44)..(44): n is a, c, g, or t
ttcatgtactttacctcaagccacatagatttcttccctgtggnaagctttaaggcactgccattcctcagcctattccagacagagcagaagagagaaaagaagaaataaagcaaaagaaacaagagagagtaaaagaagctcccatggtttttctctgagaatttcactggggatctaattttaaagaaggggacatgaagattgaagaaagaacacataatttcaaccattttgttaaatgaaatttgttggctctataaaaacgcttctgttttggttatgtcctctagttttccctggttttccttacaaagaataataattctgttctgtcctctc

SEQ ID NO: 337327 - DNA, 347 bp, Homo sapiens
  misc_feature (44)..(45): n is a, c, g, or t
  misc_feature (48)..(49): n is a, c, g, or t
gcaaatatatcatattactactgcttttatttttttatattttnnttnnaattttcgaggcactgccattcctcagcctattccagacagagcagaagagagaaaagaagaaataaagcaaaagaaacaagagagagtaaaagaagctcccatggtttttctctgagaatttcactggggatctaattttaaagaaggggacatgaagattgaagaaagaacacataatttcaaccattttgttaaatgaaatttgttggctctataaaaacgcttctgttttggttatgtcctctagttttccctggttttccttacaaagaataataattctgttctgtcctctc

SEQ ID NO: 337328 - DNA, 282 bp, Homo sapiens
  misc_feature (47)..(48): n is a, c, g, or t
cttgaatgcagcacccccacctccccttaataccggctcagagaggnngttaggcactgccattcctcagcctattccagacagagcagaagagagaaaagaagaaataaagcaaaagaaacaagagagagtaaaagaagctcccatggtttttctctgagaatttcactggggatctaattttaaagaaggggacatgaagattgaagaaagaacacataatttcaaccattttgttaaatgaaatttgttggctctataaaaacgcttctgttttggtta

SEQ ID NO: 337329 - DNA, 287 bp, Homo sapiens
cctcatgccacacctccactccccgctccctccgcacaacaaagaggaagcctcgaaggcactgccattcctcagcctattccagacagagcagaagagagaaaagaagaaataaagcaaaagaaacaagagagagtaaaagaagctcccatggtttttctctgagaatttcactggggatctaattttaaagaaggggacatgaagattgaagaaagaacacataatttcaaccattttgttaaatgaaatttgttggctctataaaaacgcttctgttttggtta

SEQ ID NO: 337330 - DNA, 291 bp, Homo sapiens
ccctaaccccaatctctcccccagatatccagccccagagaaagagcttggagcgctaaaaggcactgccattcctcagcctattccagacagagcagaagagagaaaagaagaaataaagcaaaagaaacaagagagagtaaaagaagctcccatggtttttctctgagaatttcactggggatctaattttaaagaaggggacatgaagattgaagaaagaacacataatttcaaccattttgttaaatgaaatttgttggctctataaaaacgcttctgttttggtta

SEQ ID NO: 337331 - DNA, 290 bp, Homo sapiens
  misc_feature (49)..(50): n is a, c, g, or t
aaaattgcagaaacttatactatttctccacagcacaagacaacaggannttttagcggaggcactgccattcctcagcctattccagacagagcagaagagagaaaagaagaaataaagcaaaagaaacaagagagagtaaaagaagctcccatggtttttctctgagaatttcactggggatctaattttaaagaaggggacatgaagattgaagaaagaacacataatttcaaccattttgttaaatgaaatttgttggctctataaaaacgcttctgttttggtta

SEQ ID NO: 337332 - DNA, 288 bp, Homo sapiens
  misc_feature (44)..(45): n is a, c, g, or t
  misc_feature (48)..(49): n is a, c, g, or t
gcaaatatatcatattactactgcttttatttttttatattttnnttnnaattttcgaggcactgccattcctcagcctattccagacagagcagaagagagaaaagaagaaataaagcaaaagaaacaagagagagtaaaagaagctcccatggtttttctctgagaatttcactggggatctaattttaaagaaggggacatgaagattgaagaaagaacacataatttcaaccattttgttaaatgaaatttgttggctctataaaaacgcttctgttttggtta

SEQ ID NO: 337333 - DNA, 285 bp, Homo sapiens
tgtaggaaagaaacggtactacactcaatcgcaccaccccgagagaaacctggaaggcactgccattcctcagcctattccagacagagcagaagagagaaaagaagaaataaagcaaaagaaacaagagagagtaaaagaagctcccatggtttttctctgagaatttcactggggatctaattttaaagaaggggacatgaagattgaagaaagaacacataatttcaaccattttgttaaatgaaatttgttggctctataaaaacgcttctgttttggtta

SEQ ID NO: 337334 - DNA, 284 bp, Homo sapiens
gtccattctcggtccccactttagaataccagggagaagagggaaggccttgaaggcactgccattcctcagcctattccagacagagcagaagagagaaaagaagaaataaagcaaaagaaacaagagagagtaaaagaagctcccatggtttttctctgagaatttcactggggatctaattttaaagaaggggacatgaagattgaagaaagaacacataatttcaaccattttgttaaatgaaatttgttggctctataaaaacgcttctgttttggtta

SEQ ID NO: 337335 - DNA, 314 bp, Homo sapiens
  misc_feature (40)..(41): n is a, c, g, or t
  misc_feature (43)..(43): n is a, c, g, or t
  misc_feature (52)..(52): n is a, c, g, or t
  misc_feature (306)..(306): n is a, c, g, or t
tcgcccccgcctccccccccccccccgcctaccccagagnnanttttagggnaggcactgccattcctcagcctattccagacagagcagaagagagaaaagaagaaataaagcaaaagaaacaagagagagtaaaagaagctcccatggtttttctctgagaatttcactggggatctaattttaaagaaggggacatgaagattgaagaaagaacacataatttcaaccattttgttaaatgaaatttgttggctctataaaaacgcttctgttttggttaaaaaaaaaaaggggtggcctcgntggcctca

SEQ ID NO: 337336 - DNA, 3407 bp, Homo sapiens
  misc_feature (3397)..(3397): n is a, c, g, or t
tgctaatagttgattagtttaattgcttcaatgagaacataaagcattaaacacagtaaactactctggagcaatagtaaggtgtactccttgagatacatcgtaattctgacttgaatttcattgctgatggagattctgagtttatgttacatttctttttcgaaagtgaatgtacactgactagcccttaaaaaaaagaaaaaaagcagccgggcgtggtggcacacgcctgtaatcccagcactttgggaggccaaggcgggcattatcacttgaggtcaggagttcaagaccagcttggccaacatggtgaaaccccatctctactaaaaatacaaaaattagtctggcttgatggtacacacctgtaatcccagctactccggaggctgaggcaggagaatcgcttgagcccaggagttgaagaccagcctaggcacagcaagaccccatctcaagagaaagaaagagagagagagagaaagggaggaagggagagaaaaagagaaaggaaggaagagagggaaggagggaaggagggagggagggacacaaacattgttctgagtttggcctcatgcccagaaacgtcaggatagttttgaaattcatggacttgtccccacatattgatgtagctcactttcttgaaggatattgcttgctttcaattcaatctgttcctcaggagattgaaccatactgatagactaagtgtgtgatgattcagaaatataccaaggtttgcattcatttgttcattgagcaaatatcctgaatgcctaccatgtataggtactatcctaggcactaaagatacagtagtgaaccaaacaaaaacctctgcccttgtggagcttacattgtaggaagaggagaaggacattatataataaataaattataagctatgttaaaaaatgagaaatgacacagaaaaaatagaatatgagacattgggagtgggtttggggagataattagtgttgcagtttcaaatggggattctctcatctgagaggcaattgaagtaaatggggttgacagaataggcttcaatgaaaagttgagattaattaagcagagatttagatatgtgcatagctcaatctctcacctaacagagggtgagagattgatctgtgcatatatctgggaaaagggcatttccatagcagtggcccataggaaggagcatgcatagtgagaaaggaagcaaggcctgcagcttatgtagggcttaatgggtcattgaaaggatttcattcttagtcaaatgggaaccactgtgaaagaaaacacagaaactccaagtatgattcatacacatcaaaatctatgaaccctacccctagggcccagattgtggcctctaaataccacttaccactaaaaggaaacagatctgagacaggaaatgtacaagatgagcttgttgtacgttgctataacaggtagcaagactgctggagttgtgttagaagaactcaggaggccaagcacggtggctcacgcctgtaatcccagcaaggattacaaaacaggcagatcacttcaggtcaggagtttgagaccagcctggccaacgtggtgaaaccccatctctactaaaaatacaaaaattagctgggcatggcgacgggtgcctgtaatcccagctactcaggaggctgagacaggagaattgcttgaacccgggaagcggaggttgcagtgagctgagatctcgccactgcactccagcctgggtgacagagggagatccatctcaaaaaaaaaaggaactcaggagtaaacttggagagtctctcactttccaaagatagaaaatttgactattattgaggtgtaatagagaaaaaatagagaaaaagacatgtcttcaaatctatgaattcagaatgatactttaaaaaactgaatttaatataagtgttaaaggatgctaatcatcagtttcagaactgcaaataaagggactttccaataccaactgtactgacataaccaaataaaaggtgataaaaagtttgtctttattgatatattccagttaacaatgaaaaaagattggcataattagaagatcatcattttgcaacattctaatgaattaatgtataggcaataaatatcaatgactgctaacatccaaaaaagaggtgataagatattatatgtccctgaagaaagaatttgcctctgcctatttcagactcttgtctgaaaacaacaaaaatgaatatgaatttgataaagcctctggatataattactaatttatagattacaaagacatatgttaaactacattacaaagatacaatcagcaaaatccagactatggaaaactctacaaatgatttctataacaaataaattgcaaggaaagaaaccaaccaaacgagatgaatgggtaacctacaaatcaagaaactgaaaagatatatcaacattctcaatgtttgcatcccagttggattctcattcaatattgttttaaaaaatgaatttatgagatatatgtttaaacacaggctatttcatgtattaaaaaataattgggactttgttagatgtgataatggcattgtggctctttttgttgttcaagaggctgtatcttttagacaaatatactgagttatttatggatgaaatgatttgatgtctgagatttgttgcaaaataatacagaaaacaaaggaagtggttgaagggtagagatgaaacaagattagcctgaagttgataattgttaatgttggatgatgggctctttggagtttattatactctttctctatttttgtacatgtttgaaatttatagaataaaatttttttaatctgtgaattttttaagttgatttaatttctaacaaaagatattgtgtttcttcataatttggttttattgtgttgtggctagtgctgtaacagaacagggccgtttcctgctgccagaaacgtagcccacctgtccatatagatatataatgtcttcatgattccacagtgctctcatatgttctctttgtgattaaattcagggtattccagtcagagcatatgctttagagatactttacatgcattaaatgaaataatgcaggccagatgaggtggctcatgcctataattccagcactctgggaggccgaggtgggcagatcaccaaatgtcaggagttcaagtccagcctggccaacatggtgaaaccccatctctactaaaaatctaaaaatacaaaaaatagccaggcgtggtggcaggtgccagtaatcccagctactcgggaggctgaggcaggagaaacacttgaacccaggaggtggaggttgcagtgagcctagatcgcgccattgcacttcaatctgggtgacagatggagnctacatatat

SEQ ID NO: 337337 - DNA, 276 bp, Homo sapiens
taaaactctataaataatagtcagtgacaaccttgtgactaatttggatgtcctggacataaaatacgatctcagtatgttccctaattcagaattgctagaacagcagaccagttaattatttaatatagggagcactaaagcttcctgttaaattcccttgctctctatgggattagcacatgcaggcaggagttctataatgcttaatccctgaagctaccctgaagttagcattttcacatgtattccttccctaaacctttttcttcctct

SEQ ID NO: 337338 - DNA, 182 bp, Homo sapiens
gaacattcatagtaacattgtttgaaatggcaaaaaatttgaaacaaaccatttgtccacggactggagaaatggataaatatgctgtgttataatcccacaatggagcactattcagcaatggaaaaagaatgatctacaagtatcaattcatgttgagtgaaaaatgcaaattggagaat

SEQ ID NO: 337339 - DNA, 262 bp, Homo sapiens
tgtgatgagaataaatttgactgaacctttaaaagagtttttacttgttgggtcagatctttctgctaaatccctcagtgtcaaaatgctgttttgcctttcctacctacatattactttgatatcacctcctgtccaatctgatttaacagcggtcctttgtaggccaaaatttcctttcaaggcaggaggctttgtcaactgctgttaatttttttttaaaatgttccccatatcattcctgaacctcagaacattttgg

SEQ ID NO: 337340 - DNA, 345 bp, Homo sapiens
tccctagtggatactgagggatgactcctggatatgctatcaaggcagtatctcagaatcctttaaacgggctggaagacagctttaccagtctaatgaatcacctcttctttatggctccttctgagcgtatcccaaaccagagaggtcagcagtgctgggcgattcttaacaggatatttatgtcctgttaacatgcagcatttctgggcagccttatgggctccactgtttcctcctggccaagaaatacaaaatcacctgggcaaagctgggcttaattgaggttggctgtgtgggctcgtaagccagtgtctctttgcatcgagaggagtttcatttgct

SEQ ID NO: 337341 - DNA, 202 bp, Homo sapiens
atggagggcgagggggtcccgtagatggagggcgagggggtcccgtagatggagggtgagggagtcctgtagatcaaagctgcaatggctccatgaaggctgccacgtggaggtggtaaccaaggcagggacaatggcctggacagcgctatggacggctgaacaacagctcaaggagcagaatgttcacagcataacacac

SEQ ID NO: 337342 - DNA, 467 bp, Homo sapiens
gctggctcccactctgctctctatcccccaaaaatccacagtcctcccacatgtaagtacattcaccccctcccaaggaacaagacagtcccatcagctcacagcatcagctgaagagttcatcttatctatgttaggtccaggggcggatgacgaccctagggttctcaggtacagctctaagacagttcttcctgatctgcaaggctgagaactagacaagttatcgccctccaaacacccagcatgcaatggtgggacagttacatgatgcccagatgctcctgttcagaaaggctgcaaatgaaaggcacacacactgctggtccataagcagttctgaaattcagctgggtaagcactggaacccagtgatactcctgccaggaaatgactttccagacggtttgactctgccctgggaggacttgatttcatcttaggagtcatacttttacatgaaaggt

SEQ ID NO: 337343 - DNA, 344 bp, Homo sapiens
atggaaatatgtttgtggctgtggacaaggacccagggtgtctcatggtggatgtaacattagacagagactctctctagcctctgactgctctgcctgatcagtccttcctgtgccagtcccaggccattcaggttctccactagcctttggagatggctgaggcccagatggaagaaaggggacctgcccttctgctctcctcagttccttgccccagggttgggttctacttccagaatccctcaaaacattttgcacaaaactcccaggtaatccaaatcaggaccacctctcagagcagtcttcctggatgtcgaccctggcctgggttggataggaat

SEQ ID NO: 337344 - DNA, 581 bp, Homo sapiens
ggctggagcagattcctcctcacagtcccagaaggaaccctcccacaccttgatctcacacttctggcctccagaactgtgagagaatatatttacattgttcaagacacccagtatgcacttatgcactttgttacagcagcccaggaaactcatacagatacataaactagcatgtcacttaagctctctgtgactcagtttactcgtctgaaaaaaaatggacctgaaaaaatagtcctgttctcataggcttgttgtgggatgaaaggaaacaagggggctggtgtggcatctacctctagaagctggtacttagcatggtggctactgccactaccccatggcctgaccccaaaagaccccatgccttgaattcacacccacatcactgggctcactgcctccagccccatcagggtctgagcagccaatgacttctcatgggtggggagagggaggacgtggttgtgtcagaggcgtttgaaccaaagcaactccatcttgaataggggctaggtaaaatgaggctgagacctactgggctgtattcccagatggttaggcattctaagtcacag

SEQ ID NO: 337345 - DNA, 510 bp, Homo sapiens
tagcgggggtgcatccgggtacggacgcgagagcgattgtctccgtcactggagttgtaggcgagagtgtgatttgggattaccagaaaacagaaagggcaggactggaaaacgtctacctccacagttccctaatcccaggagcccccatccttgatcccagccaacaggctcgcagggagtacacctgctcgacatgtggtttagagccaaagaagtcctccagtcaggctggtggcaggaggggtagggagagaaaggggtgaggggaggaagctcctgtgcctaccgatacagaaggctgatgtgcgcctgatgtccaggtaagaactgatgttaacataagagcatcattacacaatgttccacatagagccagtgaatgacaatgaacaaataccccttttcattcttacagacccaatattagaataccactgtatgtgtaaatcaaacgtttcactgtgcctggcctaagttccttaacacaaagtttaatatatctcccac

SEQ ID NO: 337346 - DNA, 225 bp, Homo sapiens
agttaaaaccaaaaccttctggcttacaagggcttacacaatctcctactgttcttgtttagtctgctttagctacactggcctccttgctattctcgtgaacactccaagcatgccctgtctcagagcctttgcacttggctctccttgaaatgctcttccttgagatacctgtaaaactagcttccatcctcacttgttccaagtcttggtcacttttcctag

SEQ ID NO: 337347 - DNA, 504 bp, Homo sapiens
tttagagaaagaactatgtcttaactctgaattctagcttagggctgtgtaccacgtacaattaataaatttttaaatgaatgaactaataaaaccaaccaactaatcaatccaactaaaaagggtattaataatgtcaccacagaacctagaccatttgatgcttaacacctcacagtagtccagagtgtccaagatggggtgtgtatacaagatgattataagtggtatatggacaaactttttttaagtttttaatacttttatattacttaatgtatagaagaacaaagccagctactaacctcattattaccaatctcactgattagatcaatactaaagaagttacgttttttgtatgcttttagtattgttttatagcaggtagaagtttaaggagaggcggggcttggtggctcatgcctgtaattccaacaatctgagaggccaagacaggaagatcgcttgagctcaggagtttgagaccagcctgggcaacat

SEQ ID NO: 337348 - DNA, 486 bp, Homo sapiens
atctttgttaaatctaacaacctggctgactctgtaagttagtttcattgaacactattttttctgagtacaggctgcagggtagattttcctgtttctttgtatactttgtataaaaggtgtttgaatataatctctgcccaatcgctggttgatcactgagctgagaaaacacagggatgacccctaggaagccaggctgaaaatataaatataagaatacaagaactgagcaaagaaataagtagctacacaaagcagagaagaactgaattctttaaacaggaagataacagacataatacacagaaagaaagaatacagagacatatttgataaatgttactatagcagcctagaggagaccatcaccagaaagcccagttagatcaccaggggagcttcagaggagacttggaactttagctgtgcttaacaccaacctcaactatgcatgctgagatacataaattaaggtgtcaaatg

SEQ ID NO: 337349 - DNA, 211 bp, Homo sapiens
ctcatcaggcacagcagaggtccctgccccatttcttggggtcccctaagccatagacatggggcagaaagtgcttggcagtaagtgtacagggaacacattaaaactgggcagaagtttggacagcagtgaacacagtgcacctcccaagtggtgagaggggacactactatgggctagaattcacagggaataatgaatagtgagtccc

SEQ ID NO: 337350 - DNA, 94 bp, Homo sapiens
gtaaatgtcaagaaatctaatctttgggcaatgcaacagagtagagcactcactttgaaggggctcagcatctcttcatttagcccttctcaca

SEQ ID NO: 337351 - DNA, 523 bp, Homo sapiens
attaatcatcatccatccattcatccatctaccatccatccatcatctgtccatccatccattcatccatccatcatccatccatcaatgctgtatccattcctccatcaattctccatccatctatccatcgtctatccatcaatcctctgtccattccatctatccatctatcctctatccatccatccatcatccgtctatcctctatccatgaattattcatccatcaatccatcctctattcatccatctatcctctactcatccgtccatcattcacccattcatctacccacccatccatccatccgtccatctgacccatcctggcggtcaatgaggaagtaactgaaggccgtctcatcccatgttccaccatgtaagggggtgactttgttcaggaagaaatccgtgtctccaaccacactatctacccatcacagacccctttcctatcactcaaggccccagtctgtcacaaatggatacatacagttctgtgtactgccaagcatgtgag

SEQ ID NO: 337352 - DNA, 1275 bp, Homo sapiens
caggcaataagcaaacaggagaaactactttcctcacctgttcaacaagaataaaaagtggcaacattctgagactaggacgctgggggaaagagtgaacaggaggggagaactcacccagacagactgtgtgtcagctgtggatgttactccctgtctcagccagaagaattgatgaaattcacacactccaaagaccagcaagtgagaacgggcttctcctccaactggatggctccagttctatacatgaaaccctgacctttagaagcaccactgacggctacttcaacttatacctccgtgtttccagtccatgatgaatttttgggaaagagagctcttttctcacagttgaaaacactggcagcctgcagatgtggaagtctcagctgggaaacatgaaatctttcgatatcccaaaagcacacaccttggaagataaactttacccatgactaactaaagtcattcttaagagaaaattatggagaggattaacatgcttcatccctttctctcagcttcccgattaggaccttctagagttacataaatcacttcttgctctagccagtctgactccaagcatcaacacaccattgttgcctgggcattttttcagcctagccaataaaaactcccaagtcatcctggaacttttggagatgactgagatgcaagaaaaaaaacacggtagactttaacaaactgtacaactggggacaaccagcgggaaggttttggaaggctgggggtaaagaggtggcctgaccataattaagggcaagtcctgccagcaaacccgtgcccattttaagagagggatggcggttttcccaggcgggagctgggtgccagggctcattccatagacaaatgctgtcctctctcccctccttaaaatgaacattgtcaggaacaggaagggcacaggcgtggttctggaaagatctcagttccagtcccagctcatcgtttgtgcctatttcctcatctgtcaaagaaagatatcccaggaccctgcctgtcgcaaaagcaccatgaagataaagtaagatcatggacaaaggactttgtaaagcaatttaaaagttgtatgtgtgctacatgccaggcactgtgctaaaggccatacatgttttaactaaattcttgcggcagtcttctaagggaagtattatttccactgcgcaaaggagaacaccaggattcactggcattgttaatatttgctggaagtttaaaaaaccaaataaatgtctgaaaagtaaa

SEQ ID NO: 337353 - DNA, 1134 bp, Homo sapiens
ttttatatgatgtgtctgtgccccgtgcacatgtttctgtttctatactttttttatgttctagtgagaacgggcttctcctccaactggatggctccagttctatacatgaaaccctgacctttagaagcaccactgacggctacttcaacttatacctccgtgtttccagtccatgatgaatttttgggaaagagagctcttttctcacagttgaaaacactggcagcctgcagatgtggaagtctcagctgggaaacatgaaatctttcgatatcccaaaagcacacaccttggaagataaactttacccatgactaactaaagtcattcttaagagaaaattatggagaggattaacatgcttcatccctttctctcagcttcccgattaggaccttctagagttacataaatcacttcttgctctagccagtctgactccaagcatcaacacaccattgttgcctgggcattttttcagcctagccaataaaaactcccaagtcatcctggaacttttggagatgactgagatgcaagaaaaaaaacacggtagactttaacaaactgtacaactggggacaaccagcgggaaggttttggaaggctgggggtaaagaggtggcctgaccataattaagggcaagtcctgccagcaaacccgtgcccattttaagagagggatggcggttttcccaggcgggagctgggtgccagggctcattccatagacaaatgctgtcctctctcccctccttaaaatgaacattgtcaggaacaggaagggcacaggcgtggttctggaaagatctcagttccagtcccagctcatcgtttgtgcctatttcctcatctgtcaaagaaagatatcccaggaccctgcctgtcgcaaaagcaccatgaagataaagtaagatcatggacaaaggactttgtaaagcaatttaaaagttgtatgtgtgctacatgccaggcactgtgctaaaggccatacatgttttaactaaattcttgcggcagtcttctaagggaagtattatttccactgcgcaaaggagaacaccaggattcactggcattgttaatatttgctggaagtttaaaaaaccaaataaatgtctgaaaagtaaa

SEQ ID NO: 337354 - DNA, 213 bp, Homo sapiens
catgcttctacatttttcatctgattacaggtgagaacgggcttctcctccaactggatggctccagttctatacatgaaaccctgacctttagaagcaccactgacggctacttcaacttatacctccgtgtttccagtccatgatgaatttttgggaaagagagctcttttctcacagttgaaaacactggcagcctgcagatgtggaagt

SEQ ID NO: 337355 - DNA, 359 bp, Homo sapiens
cccacccctcatttgcctcatttgacacctgagatgaagtggcttgccccaaggtcatacagagggtaacaataaagataacactagcaccagaccttccaatcccccttccccagtgcactttctactatcctttccctgaaaacgcagaaggtttaaattttttaaattttagcatctcactaatgtcaatttatatagattttgtcctaggtgctcatgtttcctagacataaagaagcatcattaataatatctttgcttcctttctgttaaaacttaacaagtcaattttctagaagtctttctaggcatgtaagtatagaatttctgatagccaaattcagtttataataaat

SEQ ID NO: 337356 - DNA, 354 bp, Homo sapiens
tatccatcccttgtaacctctgtgcttacacattttacaaaattggttcacattacacgcacactgtatcctcactccacttactagattttaactatctctatgattaaatgttcctccaataatttttgatgttgtaaacaacctatctcactgatgtgccaaaaccatctctctactgcctgacattccttccagttgtttccaatgcttctgccctttgaagaatcgttacaatgaacatgcttgaacagtctgaggctgtgctagctggatgtttcttccagcagattccccaaccttgggtatcagtattcagttaagatatggagacttaagcaaacagctgcctac

SEQ ID NO: 337357 - DNA, 499 bp, Homo sapiens
atgcccagtaaatatctgttgacagagaaaggttgacaggggcagatggatccaggatgactcccaaattcctaacccagtgcaaaagcctggatgatgatcccagtctccattatgagggccccaggaggagaagctggattgcagggaaagatgaatccagaagccatctctctgatctagaggaaacgaggctgtgctgtgtggaagggattaatgttaggggagggtagaaacgccggttccttgggaactggagtgcaggtatgagctgggtgtcagttgggtctgaacatactggctttgctgtaatgcttgaaaaggcgttggtatcttcattttacagttcagttaacccaagtacgtcttcttatttaaagtgacaacttgggtgctttaaaatgaggtaccactttttaaagctagctgtgtcgagttaaagaaaaaatcagcagtttcttctcccagaaatgtagttgccatacactattcatcccca

SEQ ID NO: 337358 - DNA, 477 bp, Homo sapiens
aacagctaaaaaccagaatgttgagggaatggaagggatgctgactaggttgaggcacagctggggctgggagcatggggaagtttctcaggccccaaaaccactccccaagagccaaagagtaacactggcaagggaaacatgaccaatgggatggagttactgactggctcccctcaaggattccaggtcccctgggcttgtcacttccctttacttcccccatgtctcagtaggtaacaccggccaagaaccgcacttgcagcagctgtcggatggattaggcagcacagacagcagcagggtgtgtgatcccaggggacagaagcatctctcagcaagcagccatcttctgcagactctgggatttttcaagagtgagcacactggctacaaaggagtcttcctacgtgaggcctttgtcaaaggaagggctacaaagtgaccattcagctcctggggttgagagcaaagggc

SEQ ID NO: 337359 - DNA, 296 bp, Homo sapiens
tgggatggggctggagaccagcatgggccaccttgaattcctggggccgtcctgctccagcctcctccggaagacttctgtcccccaagctcagctgatggccagccctccgatttcactgaggaaaccaaagcagccaggagagggccacctgccggtcagcacacatgggctgtcacctccccctcaaaaccactacaagacccgttgcttgaccccattttacagcagagttgtgacagctggtcacactcactgtctccatccctgctcacgctcgcccaccaggctggagc

SEQ ID NO: 337360 - DNA, 338 bp, Homo sapiens
cctcagatgattatatataaaattctcaagttactttcagggggaaaaatagaaaaagtcaatccagttattcttggtaaattttgcacataatgatttaagagggctaaactagataaatatcttgagattaagaaatattatttggccgggcgtggtggctcacgcctgtaatcccagcactttgggaggccgaggcgggtggatcatgaggtcaggagatcgagaccatcctggctaacacagtgaaaccccgtgtctactaaaaatacaaaaaattagccgggagcggtggcgggctcctgtagtcccagctacttgagaggctgaggcaggag

SEQ ID NO: 337361 - DNA, 167 bp, Homo sapiens
ctctgagaaaagactcctctatattatttagcttcccattgtgactttttggaaaattgtacaatattgtccttgtacagtattaatattccatattcagtagaaactgtccatgtagccataagagtggatcaggggagctaggactgtctgtagcgattgtcaga

SEQ ID NO: 337362 - DNA, 482 bp, Homo sapiens
gatttccagctatgagtataagtctgggctactactttgccatcgtggggagacaggctatgtagttataaagacaagcagatgcaaatagaagcaggagttggaggaagaaaagaagcgatcttgctgatacggtctgaatccttggttaaagcaagcctaaagccaaccagcccttgaaagtcttagcttcatgattcaagaaatttcctttattggcttaaatcatttgaattaagtttctgctccttgcactgaaagcattctgacaaatagatggaatgtctactgtatgaggcactgcgttgggtgcacataactggaggctgaagtttaagtatagtggtgactaaattccaaagataactcctaatgaaacatgcctcccgtcattcatgcctctatttagtcctctcctacattaaatctgggctagccctgtgacttgctttaagaaagtgacagaagtgatactatgctcg

SEQ ID NO: 337363 - DNA, 247 bp, Homo sapiens
aagaggatataggttgtttgggtagtttgacatcatcttctatatgccagagaaaagcaggaggttcaggtacaggtttcaggagaatgtcggttaagacaaatccaactatgaatggaagagcaattgatatttttcttgccctgggagttagatatagtgatgtcttctgctgtttttgggctttctttttttttttttttttttggaagtggaactcaatattttaatgattttacttaagata

SEQ ID NO: 337364 - DNA, 1299 bp, Homo sapiens
gaaaggagacacgaagaaggcaggcaatatcagcctgaaattgcacagccggcaagtgttggagacaggtttccactcacacagtgtgactcacagacactgcagtctacaacaccagtctccaagctattctgcctacttcacctacagaggttgggagttgggagatgagaacagtaatttgttatagaattggtttgccaagatatttggggagaagaatacaatgatatgttcacaaaacatttttatcactatgtgctctatttgtcaacgcactacagagaggagatcaattcagaaaaagaattcatcactttgcaataaagaaataaaagaatccaacttttttgaactttaagtgttgaaggaggcatctttcttattcccaactatttgaaaccaaaactgagaaaaactttgatcaataaaagcagattgaagcccgtccttgtgtggagaatcaaattaaaaggatgatcaatatgcttgctatccaaaagctttaagatgcttcacagtaaaagtccatctaagtgtgtggaatgaagtgtattctttcaattggacaaaattgctcagtgaaaagaggacaaagttatggctatatcacaattattgacaaatttaaagtactgacaattaattttagagagggcaaaatgactagattaaattggcagttctaggaagggggagatccagcattcagacaggcagtctgctcaacatgcgttctagtgaagtttcaaaagtaaaccacataccaaccattatgcatgctatcatagaaagaatgaaggttgtattacatctaatttcacatcaacaacatcatttggcaaaagagaataaaataatggtttcagaattgtaagcaaaagaaattctggatctaaaatttggtattccatcaaatgtccaccaagaggataaaagaaatattttcggatatactaagactcagaagttttatttctttcacaatgttgcttaatgaaaaagtcaaaagagaatgcattctggaagagaaaagaaacaatcaagaagaaaatatgccatccaaaatgcattctacctacttcagagtataaagaataaaagtactatgataaaagctgtgcacctctcctagaaaatgactgtttacattggacaaaagttcacaagtttctgagaataatttttctgtagatcagtaaattttatgaagcccagttaggaatctggatagcagtatgaatgagagatgagcaaattattcttctgtcaacatgaaaaaataaacacaattaataa

SEQ ID NO: 337365 - DNA, 1264 bp, Homo sapiens
gaaaggagacacgaagaaggcaggcaatatcagcctgaaattgcacagccggcaagtgttggagacaggtttccactcacacagtagtctacaacaccagtctccaagctattctgcctacttcacctacagaggttgggagttgggagatgagaacagtaatttgttatatatttggggagaagaatacaatgatatgttcacaaaacatttttatcactatgtgctctatttgtcaacgcactacagagaggagatcaattcagaaaaagaattcatcactttgcaataaagaaataaaagaatccaacttttttgaactttaagtgttgaaggaggcatctttcttattcccaactatttgaaaccaaaactgagaaaaactttgatcaataaaagcagattgaagcccgtccttgtgtggagaatcaaattaaaaggatgatcaatatgcttgctatccaaaagctttaagatgcttcacagtaaaagtccatctaagtgtgtggaatgaagtgtattctttcaattggacaaaattgctcagtgaaaagaggacaaagttatggctatatcacaattattgacaaatttaaagtactgacaattaattttagagagggcaaaatgactagattaaattggcagttctaggaagggggagatccagcattcagacaggcagtctgctcaacatgcgttctagtgaagtttcaaaagtaaaccacataccaaccattatgcatgctatcatagaaagaatgaaggttgtattacatctaatttcacatcaacaacatcatttggcaaaagagaataaaataatggtttcagaattgtaagcaaaagaaattctggatctaaaatttggtattccatcaaatgtccaccaagaggataaaagaaatattttcggatatactaagactcagaagttttatttctttcacaatgttgcttaatgaaaaagtcaaaagagaatgcattctggaagagaaaagaaacaatcaagaagaaaatatgccatccaaaatgcattctacctacttcagagtataaagaataaaagtactatgataaaagctgtgcacctctcctagaaaatgactgtttacattggacaaaagttcacaagtttctgagaataatttttctgtagatcagtaaattttatgaagcccagttaggaatctggatagcagtatgaatgagagatgagcaaattattcttctgtcaacatgaaaaaataaacacaattaataa

SEQ ID NO: 337366 - DNA, 176 bp, Homo sapiens
ttgtgggggagggacaacaacagatgggcaaagagctgacagaaaagcctaggaaggaagaggctgggaaaagagctacatgaaggtctaagggctttggaaagctcctgttcatgcttggaaatccagaaggccatgcacacagctggggctagacaggggctcagaaacacctg

SEQ ID NO: 337367 - DNA, 346 bp, Homo sapiens
agggggcctgagaagagatactagtcctactcaccttttcagacccagagtgctcaaggccaccttctctgaccacacctttgccactgcggcccagccatgggccttctgttgtccactcccccactaacgacgcacttagcagcacttagcagagatctgcaggaaagctaagtgctttaatgacacttgtgtatcgattcagagctttttttattccccccatgaggatttcccatgtgcggcgcatttgggggcagtgcaaattcttagaggctaagttcccagaggccaggggctactctataaagctctctctgaacacagggagcacaggcctcagcat

SEQ ID NO: 337368 - DNA, 658 bp, Homo sapiens
tcgttatctgtctaatctgcacatgcttgtgatttttttttatgacgactctgatgccctcatttctcattgcagctcagtgcttgtgatgtttttttcccctgaatgcatcttgcactcccagaatcttcttttcattcttccctggctctgttaatacgggtcttatcttagaacggggtctagtgcagtttagtgtagctcttacatgcagagcattttttttttgcacaaactgcttctcgtggattgtgattcagttgcacttaaagggaaaaatagagtatattttaggctactaaacctccttccatttgtaggcatttgagccagttatacagtgtctttcagggagttttacatgcatatgttaataaccagtggcacctgtgataggtccaggaatgtgaaattgtgcaacgttaatgacatttgtccaagcttcttccttctatcttgtcaatatgagctacttttaaatacacaaaggaattttgaaaacaccaatcaaaagtcaaaatttcaccctgcagcatggcccggcacccagaacactcagcaagaggaaggtctgtatttatggcttttccactgacttgaaatttgacctggaataaatcatgtttaacttctttatgcttcaattagcttttgaaag

SEQ ID NO: 337369 - DNA, 414 bp, Homo sapiens
agaaagcatgggtatctctaagggaatacagtataaatcttagtatttcaggaatgtataaaatatgtaaagaaaaactttttttcctagttaaatattttttatatctttcagctgagtatttagatatatactataaattagtattttcaccttatttactctttatcaggcttgaatttggcataatgtatttctattacatattttataatcccatgcagtaatataaactactcaatatattagctttgcagagttccacttttttgtgttttgctgaaacatagattatctcctcagtttttcacgcataggaattagtatttgggtcactttttcagtccctatctaaatccggtacatagatacgagttttccttaaataagtataaagcgattcatttaaaataa

SEQ ID NO: 337370 - DNA, 3280 bp, Homo sapiens
tggatatgggactcctgtttgtggcctgcctctcttccgagtcttccagtgcagtccagataacgatctctgagagtctcttgagaccactgaagcaagaggcttcaaggtttgttctaggcttctctagttggcaggtcttccccgatcccaccccctcccccagggctgccaggcgtattcctgcctgggcctcctggcacaagagataaaatgaacagggttactcccagtaactggtccaggagataccagcagagagggagtaggagagaagaaacatgtcagggtgctcacaggagtagtggggggaggttttgctatttccagattcttaagccaacaaaagtgccttcatattttctgtctggaagacagaaagcccagaaggagcccagaagcaacagtttgagagaggcgctttctgcggccaagtggataagaggagcggcctgcaaccatgggacaggccctgggtatcaagagctgtgactttcaggcagcaagaaacaatgaggagcaccacaccaaggccctcagctcccggcgcctctttgtgaggagggggcagcccttcaccatcatcctgtacttccgcgctccagtccgtgcatttctgcctgccctgaagaaggtggccctcactgcacaaactggagagcagccttccaagatcaacaggacccaagccacattcccaatttccagtctgggggaccgaaagtggtggagtgcagtggtggaggagagagatgcccagtcctggaccatctctgtgaccacacctgcggacgctgtcattggccactactcgcttctgctgcaggtctcaggcaggaagcaactcctcttgggtcagttcacactgctttttaacccctggaatagagaggatgctgtgttcctgaagaatgaggctcagcgcatggagtacttgttgaaccagaatggtctcatctacctgggtacagctgactgcatccaggcagagtcctgggactttggccagttcgagggggatgtcattgacctcagcctgcgcttgctgagcaaggacaagcaggtagagaagtggagccagccggtgcacgtggcccgtgtgttgggtgccttgctgcattttctcaaggagcagagggtcctgcccaccccgcagacccaggccacccaggaaggggccttgctgaacaagcgccggggcagcgtgcccatcctgcggcagtggctcaccggccgaggccgacctgtgtatgatggccaggcctgggtgttggctgctgttgcttgcacagtgctgcgatgcctgggaatccctgcccgcgtggtgaccacgtttgcctcagcacagggcaccggtgggcgtcttctcatagatgaatactataatgaggagggacttcagaacggagaaggccagagaggcagaatctggatcttccagacttccacagagtgctggatgacgcggcctgccttgccccagggttatgatggatggcagattctcgcacccaagtgctcctaatggaggtggagtcctggggtcctgtgatctggtgccggtcagagcagtcaaggaggggacgctggggctgaccccagcagtgtcagacctttttgctgccataaatgcctcatgtgtggtctggaagtgctgtgaggatgggacactggagttgactgactccaacacaaagtatgttggcaacaacatcagcaccaagggtgtgggcagtgaccgctgcgaggacatcactcagaactacaagtatcctgaagggtctcttcaggaaaaagaggtgctggagagagtcgagaaagagaaaatggaacgtgagaaagacaacggcatccgtcctcccagtctcgagactgccagtcctctgtacctgctcttgaaagcacccagctccctacccctgagaggggatgcccagatctcagtgacgctggttaatcacagtgagcaggagaaggcagtgcagctggcaattggggtccaggctgtacactacaacggtgtccttgctgccaagctctggaggaagaagctgcacctcacgctcagtgccaacctggaaaagataataaccatcggcctgttcttctccaattttgagcgaaacccacccgagaacaccttccttagactcaccgccatggcaacacactctgaatccaaccttagctgctttgctcaggaagacattgccatttgtagaccacaccttgccatcaagatgccagagaaagcagagcagtatcaacccctcacagcctcagtcagcctccagaactccctagatgcccccatggaggactgtgtgatctccatcctgggaagggggctcattcacagagagaggagctacagattccgttcagtgtggcctgaaaacaccatgtgtgccaagttccagttcacgccaacacatgtggggctccagagactcactgtggaagtggactgcaacatgttccagaacctaaccaactataaaagcgtcaccgtggtagcccctgaactatcagcttaaacttccagctctatcaccactctcctgccaacccttgttctacaatctaaaccaaacatgtgctaggaagagaaactttgcgtctcagtgtttgtgttgctataaaggaataactgaggctgggtagtttaaaagaaaagagctttatttggctcacggctctgcaggctgtacaagaaacagtgagggcttcaggctgcttccacttatgcaggaagatgaagggaggcaacgtgagcagagatcacagggcaagaatgggttgaggggtaggggtaagtgccaggtgccagcctcgttttaacagccagctctggggtgggggagggacatatagagcgagaacttactcattaccccaccaatggaacgaagccattcatgagggatccaaacacctcccattaggccccacctccaacactgggaatccaatttcagcatgaggtttgcagggttgaatatccaaactacatcactttatcagataaatgagtagtcattcaggttgaaaaggtgctcagatacctttaaggagtacattcagattgttcaggttcaggttttttgcaaccattttactgctcattaatacattcattaacttacagataagggaaaggacctaacacttaaatcattctaatatttctgatgaagtgggatattatcccaaaatggaatttttaggtaatcttaaaattacattgatcaagctgggctcggtggctcacatctgtaat

SEQ ID NO: 337371 - DNA, 2520 bp, Homo sapiens
tggatatgggactcctgtttgtggcctgcctctcttccgagtcttccagtgcagtccagataacgatctctgagagtctcttgagaccactgaagcaagaggcttcaaggtttgttctaggcttctctagttggcaggtcttccccgatcccaccccctcccccagggctgccaggcgtattcctgcctgggcctcctggcacaagagataaaatgaacagggttactcccagtaactggtccaggagataccagcagagagggagtaggagagaagaaacatgtcagggtgctcacaggagtagtggggggaggttttgctatttccagattcttaagccaacaaaagtgccttcatattttctgtctggaagacagaaagcccagaaggagcccagaagcaacagtttgagagaggcgctttctgcggccaagtggataagaggagcggcctgcaaccatgggacaggccctgggtatcaagagctgtgactttcaggcagcaagaaacaatgaggagcaccacaccaaggccctcagctcccggcgcctctttgtgaggagggggcagcccttcaccatcatcctgtacttccgcgctccagtccgtgcatttctgcctgccctgaagaaggtggccctcactgcacaaactggagagcagccttccaagatcaacaggacccaagccacattcccaatttccagtctgggggaccgaaagtggtggagtgcagtggtggaggagagagatgcccagtcctggaccatctctgtgaccacacctgcggacgctgtcattggccactactcgcttctgctgcaggtctcaggcaggaagcaactcctcttgggtcagttcacactgctttttaacccctggaatagagaggatgctgtgttcctgaagaatgaggctcagcgcatggagtacttgttgaaccagaatggtctcatctacctgggtacagctgactgcatccaggcagagtcctgggactttggccagttcgagggggatgtcattgacctcagcctgcgcttgctgagcaaggacaagcaggtagagaagtggagccagccggtgcacgtggcccgtgtgttgggtgccttgctgcattttctcaaggagcagagggtcctgcccaccccgcagacccaggccacccaggaaggggccttgctgaacaagcgccggggcagcgtgcccatcctgcggcagtggctcaccggccgaggccgacctgtgtatgatggccaggcctgggtgttggctgctgttgcttgcacagtgctgcgatgcctgggaatccctgcccgcgtggtgaccacgtttgcctcagcacagggcaccggtgggcgtcttctcatagatgaatactataatgaggagggacttcagaacggagaaggccagagaggcagaatctggatcttccagacttccacagagtgctggatgacgcggcctgccttgccccagggttatgatggatggcagattctcgcacccaagtgctcctaatggaggtggagtcctggggtcctgtgatctggtgccggtcagagcagtcaaggaggggacgctggggctgaccccagcagtgtcagacctttttgctgccataaatgcctcatgtgtggtctggaagtgctgtgaggatgggacactggagttgactgactccaacacaaagtatgttggcaacaacatcagcaccaagggtgtgggcagtgaccgctgcgaggacatcactcagaactacaagtatcctgaagggtctcttcaggaaaaagaggtgctggagagagtcgagaaagagaaaatggaacgtgagaaagacaacggcatccgtcctcccagtctcgagactgccagtcctctgtacctgctcttgaaagcacccagctccctacccctgagaggggatgcccagatctcagtgacgctggttaatcacagtgagcaggagaaggcagtgcagctggcaattggggtccaggctgtacactacaacggtgtccttgctgccaagctctggaggaagaagctgcacctcacgctcagtgccaacctggaaaagataataaccatcggcctgttcttctccaattttgagcgaaacccacccgagaacaccttccttagactcaccgccatggcaacacactctgaatccaaccttagctgctttgctcaggaagacattgccatttgtagaccacaccttgccatcaagatgccagagaaagcagagcagtatcaacccctcacagcctcagtcagcctccagaactccctagatgcccccatggaggactgtgtgatctccatcctgggaagggggctcattcacagagagaggagctacagcccaggaaccaaattacttgctttacctcattgtgtaagacaagcgtcaaaaacagcttcaacctatcttgaacaagagaacttacctccaaaggtgatctgccatagcttacacagaatcataaagtgttatattttcatttgtt

SEQ ID NO: 337372 - DNA, 2414 bp, Homo sapiens
tggatatgggactcctgtttgtggcctgcctctcttccgagtcttccagtgcagtccagataacgatctctgagagtctcttgagaccactgaagcaagaggcttcaaggtttgttctaggcttctctagttggcaggtcttccccgatcccaccccctcccccagggctgccaggcgtattcctgcctgggcctcctggcacaagagataaaatgaacagggttactcccagtaactggtccaggagataccagcagagagggagtaggagagaagaaacatgtcagggtgctcacaggagtagtggggggaggttttgctatttccagattcttaagccaacaaaagtgccttcatattttctgtctggaagacagaaagcccagaaggagcccagaagcaacagtttgagagaggcgctttctgcggccaagtggataagaggagcggcctgcaaccatgggacaggccctgggtatcaagagctgtgactttcaggcagcaagaaacaatgaggagcaccacaccaaggccctcagctcccggcgcctctttgtgaggagggggcagcccttcaccatcatcctgtacttccgcgctccagtccgtgcatttctgcctgccctgaagaaggtggccctcactgcacaaactggagagcagccttccaagatcaacaggacccaagccacattcccaatttccagtctgggggaccgaaagtggtggagtgcagtggtggaggagagagatgcccagtcctggaccatctctgtgaccacacctgcggacgctgtcattggccactactcgcttctgctgcaggtctcaggcaggaagcaactcctcttgggtcagttcacactgctttttaacccctggaatagagaggatgctgtgttcctgaagaatgaggctcagcgcatggagtacttgttgaaccagaatggtctcatctacctgggtacagctgactgcatccaggcagagtcctgggactttggccagttcgagggggatgtcattgacctcagcctgcgcttgctgagcaaggacaagcaggtagagaagtggagccagccggtgcacgtggcccgtgtgttgggtgccttgctgcattttctcaaggagcagagggtcctgcccaccccgcagacccaggccacccaggaaggggccttgctgaacaagcgccggggcagcgtgcccatcctgcggcagtggctcaccggccgaggccgacctgtgtatgatggccaggcctgggtgttggctgctgttgcttgcacagtgctgcgatgcctgggaatccctgcccgcgtggtgaccacgtttgcctcagcacagggcaccggtgggcgtcttctcatagatgaatactataatgaggagggacttcagaacggagaaggccagagaggcagaatctggatcttccagacttccacagagtgctggatgacgcggcctgccttgccccagggttatgatggatggcagattctcgcacccaagtgctcctaatggaggtggagtcctggggtcctgtgatctggtgccggtcagagcagtcaaggaggggacgctggggctgaccccagcagtgtcagacctttttgctgccataaatgcctcatgtgtggtctggaagtgctgtgaggatgggacactggagttgactgactccaacacaaagtatgttggcaacaacatcagcaccaagggtgtgggcagtgaccgctgcgaggacatcactcagaactacaagtatcctgaagggtctcttcaggaaaaagaggtgctggagagagtcgagaaagagaaaatggaacgtgagaaagacaacggcatccgtcctcccagtctcgagactgccagtcctctgtacctgctcttgaaagcacccagctccctacccctgagaggggatgcccagatctcagtgacgctggttaatcacagtgagcaggagaaggcagtgcagctggcaattggggtccaggctgtacactacaacggtgtccttgctgccaagctctggaggaagaagctgcacctcacgctcagtgccaacctgggtaatgctctatggccccaccagacaccccccgacacacacacacacatggcccctccttgggcagcagcagccacagggcaccccctgcagtctctagagatggctttgagcccctgctgctcactctcatgttctctctcattcattcattcaacacatatttattgggcctgaagcaggaaaaaaacacgatgccaactgcagtcagataagtaaacagacccttcgtagcagtgtgagaagtgtttgctgagtttaacagagtacagtggcaggagagcacctccccccaggctggaataagctgcccccaaataaattgtactgcatgga

SEQ ID NO: 337373 - DNA, 523 bp, Homo sapiens
caaggaagggcagctctaatgctcctctttgtggctggagccagagaacttgttaagaaggagggtcctgggctccagccctagagctatgacccaggggcctaggatggagcccagaagcatgcaggtttaaccagtaccaggtggctctaatgctggggatctgttcaccatggttggagtactgtgatgagccctccttacccatgccctggaagctgtcctgcccaagggactcatactgacatccacacatttccccaaacagctgcattttctcaaggagcagagggtcctgcccaccccgcagacccaggccacccaggaaggggccttgctgaacaagcgccggggcagcgtgcccatcctgcggcagtggctcaccggccgaggccgacctgtgtatgatggccaggcctgggtgttggctgctgttgcttgcacaggttggtccccttgtctcctgtagagtgccctgcctcctgggttgttccctggcctcccatgtgggaaggacatctcc

SEQ ID NO: 337374 - DNA, 3370 bp, Homo sapiens
tggatatgggactcctgtttgtggcctgcctctcttccgagtcttccagtgcagtccagataacgatctctgagagtctcttgagaccactgaagcaagaggcttcaaggtttgttctaggcttctctagttggcaggtcttccccgatcccaccccctcccccagggctgccaggcgtattcctgcctgggcctcctggcacaagagataaaatgaacagggttactcccagtaactggtccaggagataccagcagagagggagtaggagagaagaaacatgtcagggtgctcacaggagtagtggggggaggttttgctatttccagattcttaagccaacaaaagtgccttcatattttctgtctggaagacagaaagcccagaaggagcccagaagcaacagtttgagagaggcgctttctgcggccaagtggataagaggagcggcctgcaaccatgggacagggtgagccaagccagcgctcgacagggcttgctggactgtatgcagcccccgcagcatcacctgttttcattaaaggaagtgggatggatgccctgggtatcaagagctgtgactttcaggcagcaagaaacaatgaggagcaccacaccaaggccctcagctcccggcgcctctttgtgaggagggggcagcccttcaccatcatcctgtacttccgcgctccagtccgtgcatttctgcctgccctgaagaaggtggccctcactgcacaaactggagagcagccttccaagatcaacaggacccaagccacattcccaatttccagtctgggggaccgaaagtggtggagtgcagtggtggaggagagagatgcccagtcctggaccatctctgtgaccacacctgcggacgctgtcattggccactactcgcttctgctgcaggtctcaggcaggaagcaactcctcttgggtcagttcacactgctttttaacccctggaatagagaggatgctgtgttcctgaagaatgaggctcagcgcatggagtacttgttgaaccagaatggtctcatctacctgggtacagctgactgcatccaggcagagtcctgggactttggccagttcgagggggatgtcattgacctcagcctgcgcttgctgagcaaggacaagcaggtagagaagtggagccagccggtgcacgtggcccgtgtgttgggtgccttgctgcattttctcaaggagcagagggtcctgcccaccccgcagacccaggccacccaggaaggggccttgctgaacaagcgccggggcagcgtgcccatcctgcggcagtggctcaccggccgaggccgacctgtgtatgatggccaggcctgggtgttggctgctgttgcttgcacagtgctgcgatgcctgggaatccctgcccgcgtggtgaccacgtttgcctcagcacagggcaccggtgggcgtcttctcatagatgaatactataatgaggagggacttcagaacggagaaggccagagaggcagaatctggatcttccagacttccacagagtgctggatgacgcggcctgccttgccccagggttatgatggatggcagattctcgcacccaagtgctcctaatggaggtggagtcctggggtcctgtgatctggtgccggtcagagcagtcaaggaggggacgctggggctgaccccagcagtgtcagacctttttgctgccataaatgcctcatgtgtggtctggaagtgctgtgaggatgggacactggagttgactgactccaacacaaagtatgttggcaacaacatcagcaccaagggtgtgggcagtgaccgctgcgaggacatcactcagaactacaagtatcctgaagggtctcttcaggaaaaagaggtgctggagagagtcgagaaagagaaaatggaacgtgagaaagacaacggcatccgtcctcccagtctcgagactgccagtcctctgtacctgctcttgaaagcacccagctccctacccctgagaggggatgcccagatctcagtgacgctggttaatcacagtgagcaggagaaggcagtgcagctggcaattggggtccaggctgtacactacaacggtgtccttgctgccaagctctggaggaagaagctgcacctcacgctcagtgccaacctggaaaagataataaccatcggcctgttcttctccaattttgagcgaaacccacccgagaacaccttccttagactcaccgccatggcaacacactctgaatccaaccttagctgctttgctcaggaagacattgccatttgtagaccacaccttgccatcaagatgccagagaaagcagagcagtatcaacccctcacagcctcagtcagcctccagaactccctagatgcccccatggaggactgtgtgatctccatcctgggaagggggctcattcacagagagaggagctacagattccgttcagtgtggcctgaaaacaccatgtgtgccaagttccagttcacgccaacacatgtggggctccagagactcactgtggaagtggactgcaacatgttccagaacctaaccaactataaaagcgtcaccgtggtagcccctgaactatcagcttaaacttccagctctatcaccactctcctgccaacccttgttctacaatctaaaccaaacatgtgctaggaagagaaactttgcgtctcagtgtttgtgttgctataaaggaataactgaggctgggtagtttaaaagaaaagagctttatttggctcacggctctgcaggctgtacaagaaacagtgagggcttcaggctgcttccacttatgcaggaagatgaagggaggcaacgtgagcagagatcacagggcaagaatgggttgaggggtaggggtaagtgccaggtgccagcctcgttttaacagccagctctggggtgggggagggacatatagagcgagaacttactcattaccccaccaatggaacgaagccattcatgagggatccaaacacctcccattaggccccacctccaacactgggaatccaatttcagcatgaggtttgcagggttgaatatccaaactacatcactttatcagataaatgagtagtcattcaggttgaaaaggtgctcagatacctttaaggagtacattcagattgttcaggttcaggttttttgcaaccattttactgctcattaatacattcattaacttacagataagggaaaggacctaacacttaaatcattctaatatttctgatgaagtgggatattatcccaaaatggaatttttaggtaatcttaaaattacattgatcaagctgggctcggtggctcacatctgtaat

SEQ ID NO: 337375 - DNA, 1376 bp, Homo sapiens
tggatatgggactcctgtttgtggcctgcctctcttccgagtcttccagtgcagtccagataacgatctctgagagtctcttgagaccactgaagcaagaggcttcaaggtttgttctaggcttctctagttggcaggtcttccccgatcccaccccctcccccagggctgccaggcgtattcctgcctgggcctcctggcacaagagataaaatgaacagggttactcccagtaactggtccaggagataccagcagagagggagtaggagagaagaaacatgtcagggtgctcacaggagtagtggggggaggttttgctatttccagattcttaagccaacaaaagtgccttcatattttctgtctggaagacagaaagcccagaaggagcccagaagcaacagtttgagagaggcgctttctgcggccaagtggataagaggagcggcctgcaaccatgggacaggccctgggtatcaagagctgtgactttcaggcagcaagaaacaatgaggagcaccacaccaaggccctcagctcccggcgcctctttgtgaggagggggcagcccttcaccatcatcctgtacttccgcgctccagtccgtgcatttctgcctgccctgaagaaggtggccctcactgcacaaactggagagcagccttccaagatcaacaggacccaagccacattcccaatttccagtctgggggaccgaaagtggtggagtgcagtggtggaggagagagatgcccagtcctggaccatctctgtgaccacacctgcggacgctgtcattggccactactcgcttctgctgcaggtctcaggcaggaagcaactcctcttgggtcagttcacactgctttttaacccctggaatagaggtaagtttggacctgggccagcctgggctgcatggagactccagacactggagctggggtgcagctctggcagggagcacctgcaccaggcccctgtggcagccctctctaaggacagcaccaacacccagtctgtgccagggctttctccctgaatgaaccagctctcagacccagggtcctgttttggtgtcacccctgggagaagcaggttgagccttcccactgaaagcaaaagcttgtctcaccaccagaccctggtgctggctcaggctattttggtcacaggagttgagactcactgagatgaccctgggaaagctgcccttcattataacagtgcaggggtgagaactggagagggcctcgggaatgaggtggcctgaggatgggcttctctctctctccccggctattctgtttccagagtgcactcaggctttgcaggacctgaagctgatgcaatctgggggaccctctttaaga

SEQ ID NO: 337376 - DNA, 455 bp, Homo sapiens
ggtggtgtctagaggatccctcggtcgcgaatcaggtacaaagcaaagagatgaaaacacctaggctttcccagaaacatgggtgatttttaccatttctgggcgttttttcccctgtaaaatggaaataatatatgtggaaataaagaaagatcgccaaaactggaacgggcagaggctctttattccaagcttggaagggagtcagccaccatcacttgcattttgtcagaggccaaaggcaggcagaggagtgggaaagctttacagtgggaagagggaaggcaccagtatgccttgtatgaagcccgctggtgtgggaaagctgcaggtgggctaagtagaaatggggcatcctgtgcaatttattatgtttggctttctctgatttgtccaaagctggaagtggggacaaaaattagggaggctgtcagttatgaatctagtcctggcca

SEQ ID NO: 337377 - DNA, 214 bp, Homo sapiens
ggtggtgtctagaggatccctcggtcgcgaatcaggtacaaagcaaagagatgaaaacacctaggctttcccagaaacatgggtgatttttaccatttctgggcgttttttcccctgtaaaatggaaataatatatgtggaaataaagagcctctgcccgttccgttttgcgatctttctttattccacagggatcctctagacaccacccaca

SEQ ID NO: 337378 - DNA, 402 bp, Homo sapiens
aatcagttgagcccaggaagttgaggctgtagtgagctgtgattgtcccactagacttcaacctgggcaacagagcaagaccctgtctgaaaaaaaattgtttaatgttataatagcaacaaaaataaaagtgaattttacaataaaataagggcatttgcatacatgaatttttatttggaaactttcatagcccctctgattattcattcattatcctaaagttctttccacagaggttattatcagactgagcccagaacaacttggccacagaatattggtaagggtccataagtgtctgcagatagaattgcccagatcagctgtttaactggttggtctctctagacagaggtttagttacacacatgagttagcccaaccttcactccctatact

SEQ ID NO: 337379 - DNA, 360 bp, Homo sapiens
cattctggagtttgtgtgcagccatgacagggagaagctccttggtttccagtggattccaaggagtccaggagaacttgaactgtgtattctctgaggctttttcagctctagaattatgttttggggtgggtagagcagacctatggccagaaactagagaaaagggaggtggtataatgaggcaaagagggaacttacctggtcaccccatggctagggatgcaccttggggcgcagctcatagggtggggaatcagtgaagggcccctccatgggggtgtgtagggacagtctctataccacaggattagggctactctcacacaggcatctgttcactcagcaaactttctcaag

SEQ ID NO: 337380 - DNA, 423 bp, Homo sapiens
gacaccagccccacctgacagaactgtccgggggtacagtagagagttaaacattcattggaaggagctgaagaaaagactatgtcctttgaggggagcctagtttcagttaagcctggaaggggaaaataaccattccttgaagagatagaggatatagagattacagtggaaaggtttggacagagaagctgtaggaagctgattctagaaagggaacatagaatttggagatagagtatgggagaaggcagataacagatgactgaaaagcttactaaattttgttcttggattgttcttaatgtgaatggtagttacacattttcaattgtttttcttccacagtcagtgggaagacactataagataaatagaggttacaacttaaagttgtatggttgcaagttgtcagaaaaaaaa

SEQ ID NO: 337381 - DNA, 607 bp, Homo sapiens
tgggaggaggggtatggcggaggggaaagagcatctgtgagagagaggggctgccctgaggtcagacagaaggtggtggctcaaaggggaggaaggagagatgtttcacaactgcacatggagagaagctggaggctgctggctggccttgtgactgtgagtctgtttggtttgtccgtggggctgccagggcctgtggcagggatgggggtagaggtagggggtttatgtcaggatccagatgtcagggtgagaatgtttagcatgagctccctctagctgctacatgggagagagccatagttggcaggaagggaggccaggaggccagaagggaggccaggaggcaaccagcaaggtgagggccagaagcagccagcacttggtggaagcttcaggtttctggctttgacagccctgtggacaaaaggcaagggacaggtggggtagggagtaccctccactcccagcaaccctccccacacacagtctgatctccatctctgtggccagaggacacctgtgaacacccgagccagatcccatccctcctttgttcaggattcccaatggctcccacctctctagaaagccaaagtcctccttg

SEQ ID NO: 337382 - DNA, 261 bp, Homo sapiens
tgaacataggatagtcatatgcaaaaggaagaagttggacagttatctaacaccatctacaaaaattaactcaaagtggatcaaacacctaaatataaggcagaaaactataaaactcttagaagaatgcataggggaaatctttatgacattagatttggcagtgatttctttgatataacaacaaaaacacagtcaacaacaaagataaattggagttcattaaaattgaaaacttatggctgggcatggtagttgacg

SEQ ID NO: 337383 - DNA, 401 bp, Homo sapiens
cttatgtctgaccacctaatgttctaacagcaaataattcaactgtaggttgtaagagctataaaaagtggaaagtttggtattgtcagaatgcataactggagacagggcctagtctgaaggaatagtggagagggtgggggtcagtgaaggttggcatgtggaattgacattttagatgaactttaatgtgtaagtgggaattgtcaagtgaatggggggagagaaggaaaatttatggagagtaggcaatgccaagcaaatttggtagagggaatagtctgtccagaggcactgagagtaaaaggggcatatttgcacttgacaaatggaaagaaagcctgtgaatctgcataacaaagaggaagggagagggtgaaatagatggtgatgaggaaata

SEQ ID NO: 337384 - DNA, 416 bp, Homo sapiens
cgttcttcaagaaggaaccactgaattttaactggatacatgttgacagaataaagactaccttttccttgcagctaggtgtggccatgtagttaagatttggccaatgtcatgtgaccagaagtgatatgtacaatttcccttacagaacagggtcatgcccttccaacatcccatcctgatggctggaatatggacatgagggtgaaccaccttggaccatgtgaaacagggtaacaccccaagggcagtagaacaggaagacaacaagcctgggtctcagataactttgtagctcaggatccacataaaagattggactgttatatgagaaatccttttaaagatctataaggtctctcttgcatacaaccaacttatgtgctaactaatgtataaagtgagagaaaacctca

SEQ ID NO: 337385 - DNA, 408 bp, Homo sapiens
cccaatctaatgttttcactggcctaacaatgctaattttaaaacaaaattctactctttggatataaatatttgaaaagataaaaagaaactccacataacaaaagcagggactaagagcctaagacagagctctgtaaaacaaaagaatccatatgatttcaatattctaaatagtcatgcaaaatcatcacttttagagagctgatatttaaccaatatgcactgataccaaggtactgtttgcttttaagaaaaacaaacaaaacaaaacaaaacgctttgggaagccaaggcaggaggatcgcttgagtccaggagttcaagaccaggctgggcaacaaagggagaccccatctctacaaaaataaaaagaaccctgctctaagcctatggcttggaaccatg

SEQ ID NO: 337386 - DNA, 205 bp, Homo sapiens
aactgaagacagaaaaaggaaactagaggagcttcttaattctgttggtcaaaaggtatcagaactcaaagaaaaatttcagagcaggacttcagaagctgccaaacttgaggctgaagtaagcaaggcacaagaaacaatcaaagctgcagaagtcttaattaatcagcttgacagagaacataagagatggaatgcacaggtt

SEQ ID NO: 337387 - DNA, 407 bp, Homo sapiens
caaacaaacaaacaaaaaaacaaaaaaaccaactcagcagagaaagaaataaaaatctagaaagaaatcatctaaataggaatagtgaatacctttgatagttttgattgccatctttttgcttagccatatattctagtgttcctataatgaatatgcatgattatctaagaatatcatatgcaaaaaggaaagaaaatactagcttggagtccagcttctcccaagtctccttgctccttcttctcctcctggaccacagtcttccctctcactctgtgtgttgcatctgcctcataatgatggggaggacaattctagctcgtattcacaaaggtgtacctgtggagagcactcctctaagtcatgacacacgtaaattcatgtcctactcacgatacctctat

SEQ ID NO: 337388 - DNA, 1150 bp, Homo sapiens
tgcagcaaccctcccagccccaaccgcaggagctcacagtctcagcaggaatccagacttcagacatatacataggtcattacatatgcttgttaattgctatgataatgtatgaacagaatgctatgagaattaggaggaaattattaactgccaacggtgtcaagaaaggcttccagaaaaatatatggctcagtgagaacaggatttctgtctctttagcttcttctagcacagtattttacaaatattaggtgctcaaaataaatatgttgaatgagtgaattaatgaatgagatgattcattgcagctggtattgaagaatcgggaggagattttgtgacaagtaagagggagaagcatgcacacagcctggaggagtaaatggctacaaataatttgttttggcaaaagacattaaatgtgacaggagcaaaggtgcctgggagaggggtgatgggactgatgtgaggagcagggacaaagaggaggctgagagtgaaagatcttctgctctgtgcgaaagaatttagattagttctctgggcagcctcctcaggcaggggagtgacattatcagatttctctgatgggaagacacctctgggggccagtgtggaaggcataaagtggattagtgtgaaggaagtctggcaggaggaaggccagctaggaagattgaaggagtaagagcaagagatttggaaggtctgagctaccgcacaggccaacaggaatagaaaaggaggacccattagagacacttgtttgaggcaggagaggcaggattcaagtgagcagcgagtgtccagattagactttattttctaacacaaatggcaatggcattaactgaaataaggactccaagaaagggaagtatgaggtggagagagttaaagagctcagttttaaacaggttaggttgcagtcacctgtcagtccttccagggaagagaaattcccagcaggcatttattaagatgaatgaacagcaagttttcaaatggggacatggtgtttggtatcatcagcatcagggagggaggtgaagccatgggagcagagaacatccctcaggaaaagtgcataaagggagaagagagaggactaagaatgtattcatgaaaagtagcctttagcgggtga

SEQ ID NO: 337389 - DNA, 154 bp, Homo sapiens
gacaaatagccagaatgtgtagagccggaatttatctcagccctagagggctgatatacaaataaccagaatgtatacagccagaatgtatatcagccctagaggcaaacttacgaacgtatgcagtagcagatgtgtggttttcttttgttta

SEQ ID NO: 337390 - DNA, 224 bp, Homo sapiens
gctgtttatagataaagtacagtttgtacctagtttctatttgttctcttagtttctgtttttgagcttggtcatgaagccttgtttgggctatgtggccagagaggtttaaaagacatcttacataggactttggtttctctgagatcaaggcaacttgcatatatattggtggctcaaaatccaaagacagagtaagtcctatgtgactaagaaaggaacct

SEQ ID NO: 337391 - DNA, 816 bp, Homo sapiens
ttttttttcacctaaattgtttttacttgcttcaccttaaatcagttattcggttcctttgaagaacatgtagctttagcaacccccaaagtgaacccagatacccagaactactgattgttacatcagagtttttgaaaacgccaatactggaaacaggccgacagttaaggagaggcaggcctcaaactaaagcagaaccttctcaaaactacttatatttcaagagatggattaagcgaaaagagctgtacaaagaaataagccattttctatgcgcctgttatatgcaaggcactgcactcccttgtcacttgttaatttacaagaagactcgccggtccagggaagggagaggggaataggtgcaaggtttgtggagggcggcaaactgcactccatgtggcgcgaggctgcgcttgcggagatccgggttctggtgcctggcgccggcagccagtaggggcgcgcgtcctgcgcagttgccgcgcgcggcctcctcgggcttcaggccgggccaatcaggaggcgggcgggagggggcgcggtaccaggagggaacgggacgggtcgggcttcgaggtcagctggtccgcagggaagcctttggcttccccaccggcaatggagcggttgacgttgcctctcggcggcgcggcggcggtggacgagtacctggagtaccggagtggtgtttggtattctggagaaaccccttccgaaactggaaacggagtcgctcctttggcctgaggacgcggttcattgtcctggatcctgaccgaggctggtgcacctgcagcgacgcgctctttt

SEQ ID NO: 337392 - DNA, 1255 bp, Homo sapiens
ttttttttcacctaaattgtttttacttgcttcaccttaaatcagttattcggttcctttgaagaacatgtagctttagcaacccccaaagtgaacccagatacccagaactactgattgttacatcagagtttttgaaaacgccaatactggaaacaggccgacagttaaggagaggcaggcctcaaactaaagcagaaccttctcaaaactacttatatttcaagagatggattaagcgaaaagagctgtacaaagaaataagccattttctatgcgcctgttatatgcaaggcactgcactcccttgtcacttgttaatttacaagaagactcgccggtccagggaagggagaggggaataggtgcaaggtttgtggagggcggcaaactgcactccatgtggcgcgaggctgcgcttgcggagatccgggttctggtgcctggcgccggcagccagtaggggcgcgcgtcctgcgcagttgccgcgcgcggcctcctcgggcttcaggccgggccaatcaggaggcgggcgggagggggcgcggtaccaggagggaacgggacgggtcgggcttcgaggtcagctggtccgcagggaagcctttggcttccccaccggcaatggagcggttgacgttgcctctcggcggcgcggcggcggtggacgagtacctggagtaccggagggaggtgaggctgtggctccgggcctgcccccccgccgctccgaggggccaggatccctgggctgggggcgcgagcaggggcccggcgggcgtccgcgggggttcccggaatctgtgcctgggctgttgggggaggcctagatgaattccagtttagtctttgcctaattaaatattgtagggccacgcggttctatgcagtgatgagtcttccaataacatttaagaggcccctctgctcccttccaagaaggatgactaactctagattgatacagaggtccagctgttttttaaatggccattgaaaacaggcacatcgagtactcggggctatagaagttagcatacatcaaattaacccagtaattgagtcaaccgtgaacttctgaacgcgctccccaccccgaggtgctggttttaggagaaaggcaccgactggtgtttggtattctggagaaaccccttccgaaactggaaacggagtcgctcctttggcctgaggacgcggttcattgtcctggatcctgaccgaggctggtgcacctgcagcgacgcgctctttt

SEQ ID NO: 337393 - DNA, 2007 bp, Homo sapiens
ttttttttcacctaaattgtttttacttgcttcaccttaaatcagttattcggttcctttgaagaacatgtagctttagcaacccccaaagtgaacccagatacccagaactactgattgttacatcagagtttttgaaaacgccaatactggaaacaggccgacagttaaggagaggcaggcctcaaactaaagcagaaccttctcaaaactacttatatttcaagagatggattaagcgaaaagagctgtacaaagaaataagccattttctatgcgcctgttatatgcaaggcactgcactcccttgtcacttgttaatttacaagaagactcgccggtccagggaagggagaggggaataggtgcaaggtttgtggagggcggcaaactgcactccatgtggcgcgaggctgcgcttgcggagatccgggttctggtgcctggcgccggcagccagtaggggcgcgcgtcctgcgcagttgccgcgcgcggcctcctcgggcttcaggccgggccaatcaggaggcgggcgggagggggcgcggtaccaggagggaacgggacgggtcgggcttcgaggtcagctggtccgcagggaagcctttggcttccccaccggcaatggagcggttgacgttgcctctcggcggcgcggcggcggtggacgagtacctggagtaccggagaattgttggtgaggatgatggagggaaactttttactcctgaagaatatgaagaatacaaaagaaaagttttacctctgcgcttacaaaacagattatttgtgagctggcggtcaccaacagggatggattgtaaacttgtgggcccagagacactgtgtttttgtacacataggtataaacaacataaaactgacttggaagcgattcctcagcagtgccccattgatctgccctgccaagtgactggctgccagtgcagggcttacctttatgtccccttgaatggtagccagcccattcgctgcaggtgcaaacactttgctgatcagcacagtgctgcgcctggctttacatgcaatacatgttccaagtgttcaggattccatagctgcttcacttgtgcttgtggtcagcctgcatatgcccatgacacagtagtggaaactaagcaagaaagattggctcaggaaaaaccagtgggacaggacattccttatgcagccatgggaggattaactggtttcagctcgctggcggaaggctacatgcggttagatgacagtgggattggtgtaccttcagttgaatttttagaatctcccattacggcagtagacagcccattcctaaaagcatttcaagcatcatctagttcttctccagaaacgttaacagatgtaggtacaagtagtcaagtttcttcattaaggagacctgaagaggatgatatggctttctttgaaagacgataccaggaaaggatgaaaatggaaaaggctgctaagtggaaaggaaaagctccattgccatcagctacaaaaccttcatgaagactattggagaaattaaaaccatcatccaagtatctttttcatgtttatttaaatgtaataatacagtttatttttcctgaaattatttactttttttttttactgtataaatgtcttttgggatgtttccttaatttatttaaataactaaaaatgtctattacttttgtcaaaactcataatttactactttgtatgtacctttctttctcctgacaaatgaggttattttatatgagtctgtctgagagtacagtaaatgtttttagtacataataatttaactgtttcaggtatttaaaaaattaaagatattatcaagggttttggacaaacatatgagccatttttttgtcattcaaaatagtaagttaaaaacaagagaacaaaagaaaaaaatagttaaaatcattaatttttttatttttcaaactttgtaatgttatgttttcaaataaaaactatctcaaaattttacaacca

SEQ ID NO: 337394 - DNA, 788 bp, Homo sapiens
tgtaaatatttaatttttattctccatgtattgttttctcaggtgtaccttcagttgaatttttagaatctcccattacggcagtagacagcccattcctaaaagcatttcaagcatcatctagttcttctccagaaacgttaacagatgtaggtacaagtagtcaagtttcttcattaaggagacctgaagaggatgatatggctttctttgaaagacgataccaggaaaggatgaaaatggaaaaggctgctaagtggaaaggaaaagctccattgccatcagctacaaaaccttcatgaagactattggagaaattaaaaccatcatccaagtatctttttcatgtttatttaaatgtaataatacagtttatttttcctgaaattatttactttttttttttactgtataaatgtcttttgggatgtttccttaatttatttaaataactaaaaatgtctattacttttgtcaaaactcataatttactactttgtatgtacctttctttctcctgacaaatgaggttattttatatgagtctgtctgagagtacagtaaatgtttttagtacataataatttaactgtttcaggtatttaaaaaattaaagatattatcaagggttttggacaaacatatgagccatttttttgtcattcaaaatagtaagttaaaaacaagagaacaaaagaaaaaaatagttaaaatcattaatttttttatttttcaaactttgtaatgttatgttttcaaataaaaactatctcaaaattttacaacca

SEQ ID NO: 337395 - DNA, 1783 bp, Homo sapiens
ttttttttcacctaaattgtttttacttgcttcaccttaaatcagttattcggttcctttgaagaacatgtagctttagcaacccccaaagtgaacccagatacccagaactactgattgttacatcagagtttttgaaaacgccaatactggaaacaggccgacagttaaggagaggcaggcctcaaactaaagcagaaccttctcaaaactacttatatttcaagagatggattaagcgaaaagagctgtacaaagaaataagccattttctatgcgcctgttatatgcaaggcactgcactcccttgtcacttgttaatttacaagaagactcgccggtccagggaagggagaggggaataggtgcaaggtttgtggagggcggcaaactgcactccatgtggcgcgaggctgcgcttgcggagatccgggttctggtgcctggcgccggcagccagtaggggcgcgcgtcctgcgcagttgccgcgcgcggcctcctcgggcttcaggccgggccaatcaggaggcgggcgggagggggcgcggtaccaggagggaacgggacgggtcgggcttcgaggtcagctggtccgcagggaagcctttggcttccccaccggcaatggagcggttgacgttgcctctcggcggcgcggcggcggtggacgagtacctggagtaccggagaattgttggtgaggatgatggagggaaactttttactcctgaagaatatgaagaatacaaaagaaaagttttacctctgcgcttacaaaacagattatttgtgagctggcggtcaccaacagggatggattgtaaacttgtgggcccagagacactgtgtttttgtacacataggtataaacaacataaaactgacttggaagcgattcctcagcagtgccccattgatctgccctgccaagtgactggctgccagtgcagggcttacctttatgtccccttgaatggtagccagcccattcgctgcaggtgcaaacactttgctgatcagcacagtgctgcgcctggctttacatgcaatacatgttccaagtgttcaggattccatagctgcttcacttgtgcttgtggtcagcctgcatatgcccatgacacagtagtggaaactaagcaagaaagattggctcaggaaaaaccagtgggacaggacattccttatgcagccatgggaggattaactggtttcagctcgctggcggaaggctacatgcggttagatgacagtgggattgtaggtacaagtagtcaagtttcttcattaaggagacctgaagaggatgatatggctttctttgaaagacgataccaggaaaggatgaaaatggaaaaggctgctaagtggaaaggaaaagctccattgccatcagctacaaaaccttcatgaagactattggagaaattaaaaccatcatccaaaactaaaaatgtctattacttttgtcaaaactcataatttactactttgtatgtacctttctttctcctgacaaatgaggttattttatatgagtctgtctgagagtacagtaaatgtttttagtacataataatttaactgtttcaggtatttaaaaaattaaagatattatcaagggttttggacaaacatatgagccatttttttgtcattcaaaatagtaagttaaaaacaagagaacaaaagaaaaaaatagttaaaatcattaatttttttatttttcaaactttgtaatgttatgttttcaaataaaaactatctcaaaattttacaacca

SEQ ID NO: 337396 - DNA, 164 bp, Homo sapiens
caccttactatgaagaataataaagcaataataattaaaaaatcatatctgcctttaatataatagaaattgtaatttttgataatacctgtattgtgtttatatttctctctctttctccttttttaggtataaacaacataaaactgacttggaagcgattc

SEQ ID NO: 337397 - DNA, 1899 bp, Homo sapiens
ttttttttcacctaaattgtttttacttgcttcaccttaaatcagttattcggttcctttgaagaacatgtagctttagcaacccccaaagtgaacccagatacccagaactactgattgttacatcagagtttttgaaaacgccaatactggaaacaggccgacagttaaggagaggcaggcctcaaactaaagcagaaccttctcaaaactacttatatttcaagagatggattaagcgaaaagagctgtacaaagaaataagccattttctatgcgcctgttatatgcaaggcactgcactcccttgtcacttgttaatttacaagaagactcgccggtccagggaagggagaggggaataggtgcaaggtttgtggagggcggcaaactgcactccatgtggcgcgaggctgcgcttgcggagatccgggttctggtgcctggcgccggcagccagtaggggcgcgcgtcctgcgcagttgccgcgcgcggcctcctcgggcttcaggccgggccaatcaggaggcgggcgggagggggcgcggtaccaggagggaacgggacgggtcgggcttcgaggtcagctggtccgcagggaagcctttggcttccccaccggcaatggagcggttgacgttgcctctcggcggcgcggcggcggtggacgagtacctggagtaccggagaattgttggtgaggatgatggagggaaactttttactcctgaagaatatgaagaatacaaaagaaaagttttacctctgcgcttacaaaacagattatttgtgagctggcggtcaccaacagggatggattgtaaacttgtgggcccagagacactgtgtttttgtacacataggtataaacaacataaaactgacttggaagcgattcctcagcagtgccccattgatctgccctgccaagtgactggctgccagtgcagggcttacctttatgtccccttgaatggtagccagcccattcgctgcaggtgcaaacactttgctgatcagcacagtgctgcgcctggctttacatgcaatacatgttccaagtgttcaggattccatagctgcttcacttgtgcttgtggtcagcctgcatatgcccatgacacagtagtggaaactaagcaagaaagattggctcaggaaaaaccagtgggacaggacattccttatgcagccatgggaggattaactggtttcagctcgctggcggaaggctacatgcggttagatgacagtgggattgtaggtacaagtagtcaagtttcttcattaaggagacctgaagaggatgatatggctttctttgaaagacgataccaggaaaggatgaaaatggaaaaggctgctaagtggaaaggaaaagctccattgccatcagctacaaaaccttcatgaagactattggagaaattaaaaccatcatccaagtatctttttcatgtttatttaaatgtaataatacagtttatttttcctgaaattatttactttttttttttactgtataaatgtcttttgggatgtttccttaatttatttaaataactaaaaatgtctattacttttgtcaaaactcataatttactactttgtatgtacctttctttctcctgacaaatgaggttattttatatgagtctgtctgagagtacagtaaatgtttttagtacataataatttaactgtttcaggtatttaaaaaattaaagatattatcaagggttttggacaaacatatgagccatttttttgtcattcaaaatagtaagttaaaaacaagagaacaaaagaaaaaaatagttaaaatcattaatttttttatttttcaaactttgtaatgttatgttttcaaataaaaactatctcaaaattttacaacca

SEQ ID NO: 337398 - DNA, 1725 bp, Homo sapiens
ttttttttcacctaaattgtttttacttgcttcaccttaaatcagttattcggttcctttgaagaacatgtagctttagcaacccccaaagtgaacccagatacccagaactactgattgttacatcagagtttttgaaaacgccaatactggaaacaggccgacagttaaggagaggcaggcctcaaactaaagcagaaccttctcaaaactacttatatttcaagagatggattaagcgaaaagagctgtacaaagaaataagccattttctatgcgcctgttatatgcaaggcactgcactcccttgtcacttgttaatttacaagaagactcgccggtccagggaagggagaggggaataggtgcaaggtttgtggagggcggcaaactgcactccatgtggcgcgaggctgcgcttgcggagatccgggttctggtgcctggcgccggcagccagtaggggcgcgcgtcctgcgcagttgccgcgcgcggcctcctcgggcttcaggccgggccaatcaggaggcgggcgggagggggcgcggtaccaggagggaacgggacgggtcgggcttcgaggtcagctggtccgcagggaagcctttggcttccccaccggcaatggagcggttgacgttgcctctcggcggcgcggcggcggtggacgagtacctggagtaccggaggtataaacaacataaaactgacttggaagcgattcctcagcagtgccccattgatctgccctgccaagtgactggctgccagtgcagggcttacctttatgtccccttgaatggtagccagcccattcgctgcaggtgcaaacactttgctgatcagcacagtgctgcgcctggctttacatgcaatacatgttccaagtgttcaggattccatagctgcttcacttgtgcttgtggtcagcctgcatatgcccatgacacagtagtggaaactaagcaagaaagattggctcaggaaaaaccagtgggacaggacattccttatgcagccatgggaggattaactggtttcagctcgctggcggaaggctacatgcggttagatgacagtgggattgtaggtacaagtagtcaagtttcttcattaaggagacctgaagaggatgatatggctttctttgaaagacgataccaggaaaggatgaaaatggaaaaggctgctaagtggaaaggaaaagctccattgccatcagctacaaaaccttcatgaagactattggagaaattaaaaccatcatccaagtatctttttcatgtttatttaaatgtaataatacagtttatttttcctgaaattatttactttttttttttactgtataaatgtcttttgggatgtttccttaatttatttaaataactaaaaatgtctattacttttgtcaaaactcataatttactactttgtatgtacctttctttctcctgacaaatgaggttattttatatgagtctgtctgagagtacagtaaatgtttttagtacataataatttaactgtttcaggtatttaaaaaattaaagatattatcaagggttttggacaaacatatgagccatttttttgtcattcaaaatagtaagttaaaaacaagagaacaaaagaaaaaaatagttaaaatcattaatttttttatttttcaaactttgtaatgttatgttttcaaataaaaactatctcaaaattttacaacca

SEQ ID NO: 337399 - DNA, 2198 bp, Homo sapiens
ttttttttcacctaaattgtttttacttgcttcaccttaaatcagttattcggttcctttgaagaacatgtagctttagcaacccccaaagtgaacccagatacccagaactactgattgttacatcagagtttttgaaaacgccaatactggaaacaggccgacagttaaggagaggcaggcctcaaactaaagcagaaccttctcaaaactacttatatttcaagagatggattaagcgaaaagagctgtacaaagaaataagccattttctatgcgcctgttatatgcaaggcactgcactcccttgtcacttgttaatttacaagaagactcgccggtccagggaagggagaggggaataggtgcaaggtttgtggagggcggcaaactgcactccatgtggcgcgaggctgcgcttgcggagatccgggttctggtgcctggcgccggcagccagtaggggcgcgcgtcctgcgcagttgccgcgcgcggcctcctcgggcttcaggccgggccaatcaggaggcgggcgggagggggcgcggtaccaggagggaacgggacgggtcgggcttcgaggtcagctggtccgcagggaagcctttggcttccccaccggcaatggagcggttgacgttgcctctcggcggcgcggcggcggtggacgagtacctggagtaccggagaattgttggtgaggatgatggagggaaactttttactcctgaagaatatgaagaatacaaaagaaaagttttacctctgcgcttacaaaacagattatttgtgagctggcggtcaccaacagggatggattgtaaacttgtgggcccagagacactgtgtttttgtacacataggtataaacaacataaaactgacttggaagcgattcctcagcagtgccccattgatctgccctgccaagtgactggctgccagtgcagggcttacctttatgtccccttgaatggtagccagcccattcgctgcaggtgcaaacactttgctgatcagcacagtgctgcgcctggctttacatgcaatacatgttccaagtgttcaggattccatagctgcttcacttgtgcttgtggtcagcctgcatatgcccatgacacagtagtggaaactaagcaagaaagattggctcaggaaaaaccagtgggacaggacattccttatgcagccatgggaggattaactggtttcagctcgctggcggaaggctacatgcggttagatgacagtgggattgtaggtacaagtagtcaagtttcttcattaaggagacctgaagaggatgatatggctttctttgaaagacgataccaggaaaggatgaaaatggaaaaggctgctaagtggaaaggaaaagctccattgccatcagctacaaaaccttcatgaagactattggagaaattaaaaccatcatccaagtatctttttcatgtttatttaaatgtaataatacagtttatttttcctgaaattatttactttttttttttactgtataaatgtcttttgggatgtttccttaatttatttaaataactaaaaatgtctattacttttgtcaaaactcataatttactactttgtatgtacctttctttctcctgacaaatgaggttattttatatgagtctgtctgagagtacagtaaatgtttttagtacataataatttaactgtttcaggtatttaaaaaattaaagatattatcaagggttttggacaaacatatgagccatttttttgtcattcaaaatagtaagttaaaaacaagagaacaaaagaaaaaaatagttaaaatcattaatttttttatttttcaaactttgtaatgttatgttttcaaataaaaactatctcaaaattttacaaccaaaaaaaaacaaaacaaaaaaaacaacaaaacaaaacaaaaaacaatcaaccaaaacaaccagcactagatccatcatacaaaacaaatatactcccggaggagggcgaccagtattaagaagactgttatctctacacctagtggttgcaacgaaaagtggtacccacatactagtagggttgactatataaatcgcccgcgcttttgagacccgttattattacaagcagggatgagagtgactaataattatacattggaggtaattacagttaaaagcgtgcatctattctgattt

SEQ ID NO: 337400 - DNA, 377 bp, Homo sapiens
tcccaacacgggattgaatttcaatatggggtttagatatttggagtcaaatatccaatacatagcactcccaaaagatgctgaaatcctaatccccagtactgtgactgggacattatttggaggtagggttgtatggaaaaatcaaactgcctttcctcttctctcacaccacaagtgtcaacactcctgtgactcctgtgatgaacgggctgaggatttctccccgccagcaagtcggcactcagttctgcagcggcgccagctgggtgtcccccagtccagttcaattccagcatggtccatctgcagacagcacaagatcccacagggtgagggctcagtcccacaagacagtcaccacttttttttttttt

SEQ ID NO: 337401 - DNA, 210 bp, Homo sapiens
tcccagctacttgggaggcaggctgaggtgagaggatcacatgagcccaggaggtcaagaaatacctctctcctggctgatgatgggactcagaagtgaaaagtaggagaaggctaagcagaagccaccacctaaggggaattactttagaaatgaaggtgccgtggggctcttgattcttttggcagtagttttatggaagcatggatg

SEQ ID NO: 337402 - DNA, 233 bp, Homo sapiens
aggagctgggtgtctggttggatttcaggatgcccatgtttaaatgcacaggtctgtgcccagtgcttctgggccagggccagtgcatctgaaaggtctgtgcttggctgaccaccccatagtcaggaggcaccgtctgagtgagttatgtgaggaagccttcagggtggcttatggccttgaccacagagcctgctattgagggcacagtgggcatcagtgttgggactgac

SEQ ID NO: 337403 - DNA, 621 bp, Homo sapiens
gggtgggtagctccctaaagaaaatggggttggagagtgccaagctggctcaaaccctggctccttcctgtgcatcttgtcacctggcagctggcagggaggcaaatgcagaggtcagggctgggcttgtggggtacaggcgtggcaccggaagacctctaggatcctggtggcacacatggtgtggatacgctgctgctctgtcccagagtcccccagcattcctttgacatcatttattgcctggcataggtgcattcattcacgtttgtcaagcagcacctgtgtgctgtgttggcaagaagtctgcttagggaaacctggaagtctggttggagacccctctgacctcccctgctcccttgtagcccctgggtctcgcgcacgccactcactccagtgtttgccttggctgtacacggtgaatcagaccctggtgtgccgaggcttcggggagcatggtggggggaatgtcaccatcagtgggctgcctggctgtggactgatgccccaaggtcaagaccagagtctgtcctgcgtctgcaggagtgggatggtgtctgtttggtcatcttggtgctgtccctttctctccacctcagtcactacccacctggtctc

SEQ ID NO: 337404 - DNA, 2882 bp, Homo sapiens
ggggttggggggggcgggggggtggtttggaaaaatgactcagtaagttcagcgcgcccgctccggccggccctgcgcctcccgccgcgcccgggatgtattcgtccccgctctgcctcacccaggatgagttccacccgttcatcgaggccctgctgcctcacgtccgcgccttcgcctacacctggttcaacctgcaggcgcggaagcgcaagtacttcaagaagcacgagaagcggatgtcgaaggacgaggagcgtgcggtcaaggacgagctgctgggcgagaagcccgaggtcaagcagaagtgggcgtcgcggctgctggccaagctgcgcaaggacatccggcccgagtgccgcgaggacttcgtgctgagcatcaccggcaagaaggcgccgggctgcgtgctctccaaccccgaccagaagggcaagatgcggcgcatcgactgtctccggcaggcggacaaggtgtggcggctggacctggtcatggtcatcctgttcaagggcatcccgctggagagcaccgacggcgagcgcctggtcaaggctgcgcagtgcggtcacccggtcctgtgcgtgcagccgcaccacattggcgtggccgtcaaggagctggacctctacctggcctacttcgtgcgtgagcgagatgcagagcaaagcggcagtccccggacagggatgggctctgaccaggaggacagcaagcccatcacgctggacacgaccgacttccaggagagctttgtcacctccggcgtgttcagcgtcactgagctcatccaagtgtcccggacacccgtggtgactggaacaggacccaacttctccctgggggagctgcaggggcacctggcatacgacctgaacccagccagcactggcctcagaagaacgctgcccagcacctcctccagtgggagcaagcggcacaaatcgggctcgatggaggaagacgtggacacgagccctggcggcgattactacacttcgcccagctcgcccacgagtagcagccgcaactggacggaggacatggaaggaggcatctcgtccccggtgaagaagacagagatggacaagtcaccattcaacagcccgtccccccaggactctccccgcctctccagcttcacccagcaccaccggcccgtcatcgccgtgcacagcgggatcgcccggagcccacacccgtcctccgctctgcatttccctacgacgtccatcctaccccagacggcctccacctacttcccccacacggccatccgctacccacctcatctcaacccccaggacccgctcaaagatcttgtctcgctggcctgcgacccagccagccagcaacctggaccgtcctggtatctgggatagcaaaggtcttcttccctcgccccttctccatcgtcccaggaatcccagggggcagcacagccggcccccggcccacgttttcggtggaaaattagagtgaacaagaacacccctgccgactcccagcccggccaaaaagacaaaacacatagacgcacacactcaggaggaaaagaaaaaacaaaggcagaagaagaagaagaagaaataaaaacccacccaagcaagaagacaaaaggtaaagacgcaacgtttccaactctcgggacgccaaggccgcaggactggagggccaggccccgccacccccacgggagacccgggacagggcgtcttcctaagttattcatctcctctccgcctgctgctcgggaaggacagacgccggccgcccgcccgcgccccggaggccctggctctgtccggagaccaggtgagcacagcctggagcctgtgcccagggccgacaggcgcgacacccagcaaggccacctctccccgggcccccgcgcctctgccggacacggaccggcccctcagcccccaccgaggacgcagccactggggggaaagggagacacagcggaccccggccgggcagcggagaccgcagaggcgggcagggtggggcaggcgagtggtgtcgcgggggtgcgtggcgcttgcgagccctggccaggggaggaagtgaggcccaggcacctgctgcccctcgagggggccctgcctgccgcggggcctccccacaagcccctcccaaagcgccggccgactcgctgtctcgctggggactctttcagccctcgcgcccgcccgtttgggaggagaagtctctatgcaattggccccggcccctccaccccccacccccggcataggaggcccccccacctcgcccggctcacacccccaaagggagggacccacattgcacacactgtaagaaatgcactttccgaggaaggggatgggggagcccggacacccagagctccccgagttgggggtgcccgtctggagcgcccccgtcagcccctggcggtgggaggtgagaggcgcgacgagaaccaactctttacctaactttgcatggtgcttagtcaaggactcctgcgacctggctcccgaggtcagctggcggcgctgacacacatgcatggcagactatccctggctctatctccctgttcctcgccccctccaccccccacttcctctttaaaaaaaaaaaaaaaaaaaaaaagatacaagaaaaacctttaaaaaaattccatgtttcctaatttgcacgaaattttctaccacaagatgtgccttgccttccgagaataagtattacctttaaacaatatcagcgcacacacatagctgcatgttctgctcgtgtagtttaaaaaaaaaaagacaaaacagtgacatgaaataaaaaataaaaattgaaaagggatgtatttctatttgtaaaaaaaataaaataaaaaataagaaagtgagaatcta

SEQ ID NO: 337405 - DNA, 3225 bp, Homo sapiens
ggggttggggggggcgggggggtggtttggaaaaatgactcagtaagttcagcgcgcccgctccggccggccctgcgcctcccgccgcgcccgggatgtattcgtccccgctctgcctcacccaggatgagttccacccgttcatcgaggccctgctgcctcacgtccgcgccttcgcctacacctggttcaacctgcaggcgcggaagcgcaagtacttcaagaagcacgagaagcggatgtcgaaggacgaggagcgtgcggtcaaggacgagctgctgggcgagaagcccgaggtcaagcagaagtgggcgtcgcggctgctggccaagctgcgcaaggacatccggcccgagtgccgcgaggacttcgtgctgagcatcaccggcaagaaggcgccgggctgcgtgctctccaaccccgaccagaagggcaagatgcggcgcatcgactgtctccggcaggcggacaaggtgtggcggctggacctggtcatggtcatcctgttcaagggcatcccgctggagagcaccgacggcgagcgcctggtcaaggctgcgcagtgcggtcacccggtcctgtgcgtgcagccgcaccacattggcgtggccgtcaaggagctggacctctacctggcctacttcgtgcgtgagcgagatgcagagcaaagcggcagtccccggacagggatgggctctgaccaggaggacagcaagcccatcacgctggacacgaccgacttccaggagagctttgtcacctccggcgtgttcagcgtcactgagctcatccaagtgtcccggacacccgtggtgactggaacaggacccaacttctccctgggggagctgcaggggcacctggcatacgacctgaacccagccagcactggcctcagaagaacgctgcccagcacctcctccagtgggagcaagcggcacaaatcgggctcgatggaggaagacgtggacacgagccctggcggcgattactacacttcgcccagctcgcccacgagtagcagccgcaactggacggaggacatggaaggaggcatctcgtccccggtgaagaagacagagatggacaagtcaccattcaacagcccgtccccccaggactctccccgcctctccagcttcacccagcaccaccggcccgtcatcgccgtgcacagcgggatcgcccggagcccacacccgtcctccgctctgcatttccctacgacgtccatcctaccccagacggcctccacctacttcccccacacggccatccgctacccacctcatctcaacccccaggacccgctcaaagatcttgtctcgctggcctgcgacccagccagccagcaacctggaccgtcctggtatctgggatagcaaaggtcttcttccctcgccccttctccatcgtcccaggaatcccagggggcagcacagccggcccccggcccacgttttcggtggaaaattagagtgaacaagaacacccctgccgactcccagcccggccaaaaagacaaaacacatagacgcacacactcaggaggaaaagaaaaaacaaaggcagaagaagaagaagaagaaataaaaacccacccaagcaagaagacaaaaggtaaagacgcaacgtttccaactctcgggacgccaaggccgcaggactggagggccaggccccgccacccccacgggagacccgggacagggcgtcttcctaagttattcatctcctctccgcctgctgctcgggaaggacagacgccggccgcccgcccgcgccccggaggccctggctctgtccggagaccaggtgagcacagcctggagcctgtgcccagggccgacaggcgcgacacccagcaaggccacctctccccgggcccccgcgcctctgccggacacggaccggcccctcagcccccaccgaggacgcagccactggggggaaagggagacacagcggaccccggccgggcagcggagaccgcagaggcgggcagggtggggcaggcgagtggtgtcgcgggggtgcgtggcgcttgcgagccctggccaggggaggaagtgaggcccaggcacctgctgcccctcgagggggccctgcctgccgcggggcctccccacaagcccctcccaaagcgccggccgactcgctgtctcgctggggactctttcagccctcgcgcccgcccgtttgggaggagaagtctctatgcaattggccccggcccctccaccccccacccccggcataggaggcccccccacctcgcccggctcacacccccaaagggagggacccacattgcacacactgtaagaaatgcactttccgaggaaggggatgggggagcccggacacccagagctccccgagttgggggtgcccgtctggagcgcccccgtcagcccctggcggtgggaggtgagaggcgcgacgagaaccaactctttacctaactttgcatggtgcttagtcaaggactcctgcgacctggctcccgaggtcagctggcggcgctgacacacatgcatggcagactatccctggctctatctccctgttcctcgccccctccaccccccacttcctctttaaaaaaaaaaaaaaaaaaaaaaagatacaagaaaaacctttaaaaaaattccatgtttcctaatttgcacgaaattttctaccacaagatgtgccttgccttccgagaataagtattacctttaaacaatatcagcgcacacacatagctgcatgttctgctcgtgtagtttaaaaaaaaaaagacaaaacagtgacatgaaataaaaaataaaaattgaaaagggatgtatttctatttgtaaaaaaaataaaataaaaaataagaaagtgagaatctaaaaaaaaaaaaaaaaaaaaaaaggaagaaaaaccacgctaaaaatcaagccactgaaaacaattgcccccaggtctacccagcccctggctgtccttggtcctgtctcccctcctgctgtattcaggggtgccccctggtgctcagcctctaccacccccaaccctgctcttgggtacccagaggggtcatttctgaatcccttgcccagaggacagacctccggggcccatcttggccctgggaaagggctctcctctctgattggtccctaggccacgggccggcccccagacgcctattttacaccaaccccagctgttgtaactggagaaccgagctcg

SEQ ID NO: 337406 - DNA, 3133 bp, Homo sapiens
ggggttggggggggcgggggggtggtttggaaaaatgactcagtaagttcagcgcgcccgctccggccggccctgcgcctcccgccgcgcccgggatgtattcgtccccgctctgcctcacccaggatgagttccacccgttcatcgaggccctgctgcctcacgtccgcgccttcgcctacacctggttcaacctgcaggcgcggaagcgcaagtacttcaagaagcacgagaagcggatgtcgaaggacgaggagcgtgcggtcaaggacgagctgctgggcgagaagcccgaggtcaagcagaagtgggcgtcgcggctgctggccaagctgcgcaaggacatccggcccgagtgccgcgaggacttcgtgctgagcatcaccggcaagaaggcgccgggctgcgtgctctccaaccccgaccagaagggcaagatgcggcgcatcgactgtctccggcaggcggacaaggtgtggcggctggacctggtcatggtcatcctgttcaagggcatcccgctggagagcaccgacggcgagcgcctggtcaaggctgcgcagtgcggtcacccggtcctgtgcgtgcagccgcaccacattggcgtggccgtcaaggagctggacctctacctggcctacttcgtgcgtgagcgagatgcagagcaaagcggcagtccccggacagggatgggctctgaccaggaggacagcaagcccatcacgctggacacgaccgacttccaggagagctttgtcacctccggcgtgttcagcgtcactgagctcatccaagtgtcccggacacccgtggtgactggaacaggacccaacttctccctgggggagctgcaggggcacctggcatacgacctgaacccagccagcactggcctcagaagaacgctgcccagcacctcctccagtgggagcaagcggcacaaatcgggctcgatggaggaagacgtggacacgagccctggcggcgattactacacttcgcccagctcgcccacgagtagcagccgcaactggacggaggacatggaaggaggcatctcgtccccggtgaagaagacagagatggacaagtcaccattcaacagcccgtccccccaggactctccccgcctctccagcttcacccagcaccaccggcccgtcatcgccgtgcacagcgggatcgcccggagcccacacccgtcctccgctctgcatttccctacgacgtccatcctaccccagacggcctccacctacttcccccacacggccatccgctacccacctcatctcaacccccaggacccgctcaaagatcttgtctcgctggcctgcgacccagccagccagcaacctggaccgtcctggtatctgggatagcaaaggtcttcttccctcgccccttctccatcgtcccaggaatcccagggggcagcacagccggcccccggcccacgttttcggtggaaaattagagtgaacaagaacacccctgccgactcccagcccggccaaaaagacaaaacacatagacgcacacactcaggaggaaaagaaaaaacaaaggcagaagaagaagaagaagaaataaaaacccacccaagcaagaagacaaaaggtaaagacgcaacgtttccaactctcgggacgccaaggccgcaggactggagggccaggccccgccacccccacgggagacccgggacagggcgtcttcctaagttattcatctcctctccgcctgctgctcgggaaggacagacgccggccgcccgcccgcgccccggaggccctggctctgtccggagaccaggtgagcacagcctggagcctgtgcccagggccgacaggcgcgacacccagcaaggccacctctccccgggcccccgcgcctctgccggacacggaccggcccctcagcccccaccgaggacgcagccactggggggaaagggagacacagcggaccccggccgggcagcggagaccgcagaggcgggcagggtggggcaggcgagtggtgtcgcgggggtgcgtggcgcttgcgagccctggccaggggaggaagtgaggcccaggcacctgctgcccctcgagggggccctgcctgccgcggggcctccccacaagcccctcccaaagcgccggccgactcgctgtctcgctggggactctttcagccctcgcgcccgcccgtttgggaggagaagtctctatgcaattggccccggcccctccaccccccacccccggcataggaggcccccccacctcgcccggctcacacccccaaagggagggacccacattgcacacactgtaagaaatgcactttccgaggaaggggatgggggagcccggacacccagagctccccgagttgggggtgcccgtctggagcgcccccgtcagcccctggcggtgggaggtgagagcgagtggtttaagtgcctgattaccaccaccgcggcccgccgcgatggagcgaagagtgggaccacggaagatggccagcggagacccgccatacagacaaccgagaaaaagacaagagacacgacaaagaaagcaaacagacgaatgagagggaggagggcgaagagagagaagaagacgagcgccagagagagacaagcgaaagcagagaaaagggcgagaggaagaggagcgaggcggaggggggggacgggcaggcgagagcgaggggggagcgagagggcaagagcaggacggcgagagagcacaggcggacgaggagcacggaagacgagagaggagagagggggagcagagcgcacgagcgagcggacggagagagcagagagacagccacaccacgcggaaggccgcgcagagaagcgacgcgaagagcagacgaaggccacagcaggccggacgcgagcgaaaagaggaagagcggagagacaccgcagcgacgcaagcgtcagaggaacacgacccagcacgcagacgacagaacgcgacggagcagcacggcgaaagcaaaggagaggggagggcggagacaggacgagagaagacggaaggaaagaagaaggagagagggagcgacgacgagcgggagcgggacgggaagagggacggaagacaagagggcggagaacagcgac

SEQ ID NO: 337407 - DNA, 2793 bp, Homo sapiens
ggggttggggggggcgggggggtggtttggaaaaatgactcagtaagttcagcgcgcccgctccggccggccctgcgcctcccgccgcgcccgggatgtattcgtccccgctctgcctcacccaggatgagttccacccgttcatcgaggccctgctgcctcacgtccgcgccttcgcctacacctggttcaacctgcaggcgcggaagcgcaagtacttcaagaagcacgagaagcggatgtcgaaggacgaggagcgtgcggtcaaggacgagctgctgggcgagaagcccgaggtcaagcagaagtgggcgtcgcggctgctggccaagctgcgcaaggacatccggcccgagtgccgcgaggacttcgtgctgagcatcaccggcaagaaggcgccgggctgcgtgctctccaaccccgaccagaagggcaagatgcggcgcatcgactgtctccggcaggcggacaaggtgtggcggctggacctggtcatggtcatcctgttcaagggcatcccgctggagagcaccgacggcgagcgcctggtcaaggctgcgcagtgcggtcacccggtcctgtgcgtgcagccgcaccacattggcgtggccgtcaaggagctggacctctacctggcctacttcgtgcgtgagcgagatgcagagcaaagcggcagtccccggacagggatgggctctgaccaggaggacagcaagcccatcacgctggacacgaccgacttccaggagagctttgtcacctccggcgtgttcagcgtcactgagctcatccaagtgtcccggacacccgtggtgactggaacaggacccaacttctccctgggggagctgcaggggcacctggcatacgacctgaacccagccagcactggcctcagaagaacgctgcccagcacctcctccagtgggagcaagcggcacaaatcgggctcgatggaggaagacgtggacacgagccctggcggcgattactacacttcgcccagctcgcccacgagtagcagccgcaactggacggaggacatggaaggaggcatctcgtccccggtgaagaagacagagatggacaagtcaccattcaacagcccgtccccccaggactctccccgcctctccagcttcacccagcaccaccggcccgtcatcgccgtgcacagcgggatcgcccggagcccacacccgtcctccgctctgcatttccctacgacgtccatcctaccccagacggcctccacctacttcccccacacggccatccgctacccacctcatctcaacccccaggacccgctcaaagatcttgtctcgctggcctgcgacccagccagccagcaacctggaccgtcctggtatctgggatagcaaaggtcttcttccctcgccccttctccatcgtcccaggaatcccagggggcagcacagccggcccccggcccacgttttcggtggaaaattagagtgaacaagaacacccctgccgactcccagcccggccaaaaagacaaaacacatagacgcacacactcaggaggaaaagaaaaaacaaaggcagaagaagaagaagaagaaataaaaacccacccaagcaagaagacaaaaggtaaagacgcaacgtttccaactctcgggacgccaaggccgcaggactggagggccaggccccgccacccccacgggagacccgggacagggcgtcttcctaagttattcatctcctctccgcctgctgctcgggaaggacagacgccggccgcccgcccgcgccccggaggccctggctctgtccggagaccaggtgagcacagcctggagcctgtgcccagggccgacaggcgcgacacccagcaaggccacctctccccgggcccccgcgcctctgccggacacggaccggcccctcagcccccaccgaggacgcagccactggggggaaagggagacacagcggaccccggccgggcagcggagaccgcagaggcgggcagggtggggcaggcgagtggtgtcgcgggggtgcgtggcgcttgcgagccctggccaggggaggaagtgaggcccaggcacctgctgcccctcgagggggccctgcctgccgcggggcctccccacaagcccctcccaaagcgccggccgactcgctgtctcgctggggactctttcagccctcgcgcccgcccgtttgggaggagaagtctctatgcaattggccccggcccctccaccccccacccccggcataggaggcccccccacctcgcccggctcacacccccaaagggagggacccacattgcacacactgtaagaaatgcactttccgaggaaggggatgggggagcccggacacccagagctccccgagttgggggtgcccgtctggagcgcccccgtcagcccctggcggtgggaggtgagaggcgcgacgagaaccaactctttacctaactttgcatggtgcttagtcaaggactcctgcgacctggctcccgaggtcagctggcggcgctgacacacatgcatggcagactatccctggctctatctccctgttcctcgccccctccaccccccacttcctctttaaaaaaaaaaaaaaaaaaaaaaagatacaagaaaaacctttaaaaaaattccatgtttcctaatttgcacgaaattttctaccacaagatgtgccttgccttccgagaataagtattacctttaaacaatatcagcgcacacacatagctgcatgttctgctcgtgtagaaagtgaacgggatcctctaga

SEQ ID NO: 337408 - DNA, 2012 bp, Homo sapiens
  misc_feature (1803)..(1803): n is a, c, g, or t
ggggttggggggggcgggggggtggtttggaaaaatgactcagtaagttcagcgcgcccgctccggccggccctgcgcctcccgccgcgcccgggatgtattcgtccccgctctgcctcacccaggatgagttccacccgttcatcgaggccctgctgcctcacgtccgcgccttcgcctacacctggttcaacctgcaggcgcggaagcgcaagtacttcaagaagcacgagaagcggatgtcgaaggacgaggagcgtgcggtcaaggacgagctgctgggcgagaagcccgaggtcaagcagaagtgggcgtcgcggctgctggccaagctgcgcaaggacatccggcccgagtgccgcgaggacttcgtgctgagcatcaccggcaagaaggcgccgggctgcgtgctctccaaccccgaccagaagggcaagatgcggcgcatcgactgtctccggcaggcggacaaggtgtggcggctggacctggtcatggtcatcctgttcaagggcatcccgctggagagcaccgacggcgagcgcctggtcaaggctgcgcagtgcggtcacccggtcctgtgcgtgcagccgcaccacattggcgtggccgtcaaggagctggacctctacctggcctacttcgtgcgtgagcgagatgcagagcaaagcggcagtccccggacagggatgggctctgaccaggaggacagcaagcccatcacgctggacacgaccgacttccaggagagctttgtcacctccggcgtgttcagcgtcactgagctcatccaagtgtcccggacacccgtggtgactggaacaggacccaacttctccctgggggagctgcaggggcacctggcatacgacctgaacccagccagcactggcctcagaagaacgctgcccagcacctcctccagtgggagcaagcggcacaaatcgggctcgatggaggaagacgtggacacgagccctggcggcgattactacacttcgcccagctcgcccacgagtagcagccgcaactggacggaggacatggaaggaggcatctcgtccccggtgaagaagacagagatggacaagtcaccattcaacagcccgtccccccaggactctccccgcctctccagcttcacccagcaccaccggcccgtcatcgccgtgcacagcgggatcgcccggagcccacacccgtcctccgctctgcatttccctacgacgtccatcctaccccagacggcctccacctacttcccccacacggccatccgctacccacctcatctcaacccccaggacccgctcaaagatcttgtctcgctggcctgcgacccagccagccagcaacctggaccgtcctggtatctgggatagcaaaggtcttcttccctcgccccttctccatcgtcccaggaatcccagggggcagcacagccggcccccggcccacgttttcggtggaaaattagagtgaacaagaacacccctgccgactcccagcccggccaaaaagacaaaacacatagacgcacacactcaggaggaaaagaaaaaacaaaggcagaagaagaagaagaagaaataaaaacccacccaagcaagaagacaaaaggtaaagacgcaacgtttccaactctcgggacgccaaggccgcaggactggagggccaggccccgccacccccacgggagacccgggacagggcgtcttcctaagttattcatctcctctccgcctgctgctcgggaaggacagacgccggccgcccgcccgcgccccggaggccctggcggcngtcgggctagtcggggccccgactagcccgacaggatacagtctcaccactgaagtcaatttaaatggaactattgataaagtgagtcagcagcttgaaggagccggcatacagtatatcctatctagcccacccaaggacactggctctgcaggtgggagaagtgaggggaggggaggagtgcccagccctgtcgggctagtcggggg

SEQ ID NO: 337409 - DNA, 3094 bp, Homo sapiens
ctcgccgcctcctcccgccgcctgcggcccccccctcgccggcggaccgagcgcgctcgctccggcgccggcctcgcctcctcgcagcagcgccatggatgagttccacccgttcatcgaggccctgctgcctcacgtccgcgccttcgcctacacctggttcaacctgcaggcgcggaagcgcaagtacttcaagaagcacgagaagcggatgtcgaaggacgaggagcgtgcggtcaaggacgagctgctgggcgagaagcccgaggtcaagcagaagtgggcgtcgcggctgctggccaagctgcgcaaggacatccggcccgagtgccgcgaggacttcgtgctgagcatcaccggcaagaaggcgccgggctgcgtgctctccaaccccgaccagaagggcaagatgcggcgcatcgactgtctccggcaggcggacaaggtgtggcggctggacctggtcatggtcatcctgttcaagggcatcccgctggagagcaccgacggcgagcgcctggtcaaggctgcgcagtgcggtcacccggtcctgtgcgtgcagccgcaccacattggcgtggccgtcaaggagctggacctctacctggcctacttcgtgcgtgagcgagatgcagagcaaagcggcagtccccggacagggatgggctctgaccaggaggacagcaagcccatcacgctggacacgaccgacttccaggagagctttgtcacctccggcgtgttcagcgtcactgagctcatccaagtgtcccggacacccgtggtgactggaacaggacccaacttctccctgggggagctgcaggggcacctggcatacgacctgaacccagccagcactggcctcagaagaacgctgcccagcacctcctccagtgggagcaagcggcacaaatcgggctcgatggaggaagacgtggacacgagccctggcggcgattactacacttcgcccagctcgcccacgagtagcagccgcaactggacggaggacatggaaggaggcatctcgtccccggtgaagaagacagagatggacaagtcaccattcaacagcccgtccccccaggactctccccgcctctccagcttcacccagcaccaccggcccgtcatcgccgtgcacagcgggatcgcccggagcccacacccgtcctccgctctgcatttccctacgacgtccatcctaccccagacggcctccacctacttcccccacacggccatccgctacccacctcatctcaacccccaggacccgctcaaagatcttgtctcgctggcctgcgacccagccagccagcaacctggaccgttaaatggaagtggtcagctcaaaatgcccagccactgcctttctgctcagatgctggcacctccgcccccggggctgccacggctggcgctcccccctgccaccaaacccgccaccacctccgagggaggagccacgtcgccgacctcgccttcctactctccgcccgacacgtcccctgcaaaccgttcctttgtgggattaggaccaagggatcctgcgggcatttatcaggcacagtcctggtatctgggatagcaaaggtcttcttccctcgccccttctccatcgtcccaggaatcccagggggcagcacagccggcccccggcccacgttttcggtggaaaattagagtgaacaagaacacccctgccgactcccagcccggccaaaaagacaaaacacatagacgcacacactcaggaggaaaagaaaaaacaaaggcagaagaagaagaagaagaaataaaaacccacccaagcaagaagacaaaaggtaaagacgcaacgtttccaactctcgggacgccaaggccgcaggactggagggccaggccccgccacccccacgggagacccgggacagggcgtcttcctaagttattcatctcctctccgcctgctgctcgggaaggacagacgccggccgcccgcccgcgccccggaggccctggctctgtccggagaccaggtgagcacagcctggagcctgtgcccagggccgacaggcgcgacacccagcaaggccacctctccccgggcccccgcgcctctgccggacacggaccggcccctcagcccccaccgaggacgcagccactggggggaaagggagacacagcggaccccggccgggcagcggagaccgcagaggcgggcagggtggggcaggcgagtggtgtcgcgggggtgcgtggcgcttgcgagccctggccaggggaggaagtgaggcccaggcacctgctgcccctcgagggggccctgcctgccgcggggcctccccacaagcccctcccaaagcgccggccgactcgctgtctcgctggggactctttcagccctcgcgcccgcccgtttgggaggagaagtctctatgcaattggccccggcccctccaccccccacccccggcataggaggcccccccacctcgcccggctcacacccccaaagggagggacccacattgcacacactgtaagaaatgcactttccgaggaaggggatgggggagcccggacacccagagctccccgagttgggggtgcccgtctggagcgcccccgtcagcccctggcggtgggaggtgagaggcgcgacgagaaccaactctttacctaactttgcatggtgcttagtcaaggactcctgcgacctggctcccgaggtcagctggcggcgctgacacacatgcatggcagactatccctggctctatctccctgttcctcgccccctccaccccccacttcctctttaaaaaaaaaaaaaaaaaaaaaaagatacaagaaaaacctttaaaaaaattccatgtttcctaatttgcacgaaattttctaccacaagatgtgccttgccttccgagaataagtattacctttaaacaatatcagcgcacacacatagctgcatgttctgctcgtgtagtttaaaaaaaaaaagacaaaacagtgacatgaaataaaaaataaaaattgaaaagggatgtatttctatttgtaaaaaaaataaaataaaaaataagaaagtgagaatcta

SEQ ID NO: 337410 - DNA, 2521 bp, Homo sapiens
atgcaggttactctagaggaccccgaacggggcggctggacctggtcatggtcatcctgttcaagggcatcccgctggagagcaccgacggcgagcgcctggtcaaggctgcgcagtgcggtcacccggtcctgtgcgtgcagccgcaccacattggcgtggccgtcaaggagctggacctctacctggcctacttcgtgcgtgagcgagatgcagagcaaagcggcagtccccggacagggatgggctctgaccaggaggacagcaagcccatcacgctggacacgaccgacttccaggagagctttgtcacctccggcgtgttcagcgtcactgagctcatccaagtgtcccggacacccgtggtgactggaacaggacccaacttctccctgggggagctgcaggggcacctggcatacgacctgaacccagccagcactggcctcagaagaacgctgcccagcacctcctccagtgggagcaagcggcacaaatcgggctcgatggaggaagacgtggacacgagccctggcggcgattactacacttcgcccagctcgcccacgagtagcagccgcaactggacggaggacatggaaggaggcatctcgtccccggtgaagaagacagagatggacaagtcaccattcaacagcccgtccccccaggactctccccgcctctccagcttcacccagcaccaccggcccgtcatcgccgtgcacagcgggatcgcccggagcccacacccgtcctccgctctgcatttccctacgacgtccatcctaccccagacggcctccacctacttcccccacacggccatccgctacccacctcatctcaacccccaggacccgctcaaagatcttgtctcgctggcctgcgacccagccagccagcaacctggaccgcctactctccgcccgacacgtcccctgcaaaccgttcctttgtgggattaggaccaagggatcctgcgggcatttatcaggcacagtcctggtatctgggatagcaaaggtcttcttccctcgccccttctccatcgtcccaggaatcccagggggcagcacagccggcccccggcccacgttttcggtggaaaattagagtgaacaagaacacccctgccgactcccagcccggccaaaaagacaaaacacatagacgcacacactcaggaggaaaagaaaaaacaaaggcagaagaagaagaagaagaaataaaaacccacccaagcaagaagacaaaaggtaaagacgcaacgtttccaactctcgggacgccaaggccgcaggactggagggccaggccccgccacccccacgggagacccgggacagggcgtcttcctaagttattcatctcctctccgcctgctgctcgggaaggacagacgccggccgcccgcccgcgccccggaggccctggctctgtccggagaccaggtgagcacagcctggagcctgtgcccagggccgacaggcgcgacacccagcaaggccacctctccccgggcccccgcgcctctgccggacacggaccggcccctcagcccccaccgaggacgcagccactggggggaaagggagacacagcggaccccggccgggcagcggagaccgcagaggcgggcagggtggggcaggcgagtggtgtcgcgggggtgcgtggcgcttgcgagccctggccaggggaggaagtgaggcccaggcacctgctgcccctcgagggggccctgcctgccgcggggcctccccacaagcccctcccaaagcgccggccgactcgctgtctcgctggggactctttcagccctcgcgcccgcccgtttgggaggagaagtctctatgcaattggccccggcccctccaccccccacccccggcataggaggcccccccacctcgcccggctcacacccccaaagggagggacccacattgcacacactgtaagaaatgcactttccgaggaaggggatgggggagcccggacacccagagctccccgagttgggggtgcccgtctggagcgcccccgtcagcccctggcggtgggaggtgagaggcgcgacgagaaccaactctttacctaactttgcatggtgcttagtcaaggactcctgcgacctggctcccgaggtcagctggcggcgctgacacacatgcatggcagactatccctggctctatctccctgttcctcgccccctccaccccccacttcctctttaaaaaaaaaaaaaaaaaaaaaaagatacaagaaaaacctttaaaaaaattccatgtttcctaatttgcacgaaattttctaccacaagatgtgccttgccttccgagaataagtattacctttaaacaatatcagcgcacacacatagctgcatgttctgctcgtgtagtttaaaaaaaaaaagacaaaacagtgacatgaaataaaaaataaaaattgaaaagggatgtatttctatttgtaaaaaaaataaaataaaaaataagaaagtgagaatcta

SEQ ID NO: 337411 - DNA, 2538 bp, Homo sapiens
tcgcgtcatagctgactcttgaggataaaccgaccgcggaggagtctggcggctggacctggtcatggtcatcctgttcaagggcatcccgctggagagcaccgacggcgagcgcctggtcaaggctgcgcagtgcggtcacccggtcctgtgcgtgcagccgcaccacattggcgtggccgtcaaggagctggacctctacctggcctacttcgtgcgtgagcgagatgcagagcaaagcggcagtccccggacagggatgggctctgaccaggaggacagcaagcccatcacgctggacacgaccgacttccaggagagctttgtcacctccggcgtgttcagcgtcactgagctcatccaagtgtcccggacacccgtggtgactggaacaggacccaacttctccctgggggagctgcaggggcacctggcatacgacctgaacccagccagcactggcctcagaagaacgctgcccagcacctcctccagtgggagcaagcggcacaaatcgggctcgatggaggaagacgtggacacgagccctggcggcgattactacacttcgcccagctcgcccacgagtagcagccgcaactggacggaggacatggaaggaggcatctcgtccccggtgaagaagacagagatggacaagtcaccattcaacagcccgtccccccaggactctccccgcctctccagcttcacccagcaccaccggcccgtcatcgccgtgcacagcgggatcgcccggagcccacacccgtcctccgctctgcatttccctacgacgtccatcctaccccagacggcctccacctacttcccccacacggccatccgctacccacctcatctcaacccccaggacccgctcaaagatcttgtctcgctggcctgcgacccagccagccagcaacctggaccgcctactctccgcccgacacgtcccctgcaaaccgttcctttgtgggattaggaccaagggatcctgcgggcatttatcaggcacagtcctggtatctgggatagcaaaggtcttcttccctcgccccttctccatcgtcccaggaatcccagggggcagcacagccggcccccggcccacgttttcggtggaaaattagagtgaacaagaacacccctgccgactcccagcccggccaaaaagacaaaacacatagacgcacacactcaggaggaaaagaaaaaacaaaggcagaagaagaagaagaagaaataaaaacccacccaagcaagaagacaaaaggtaaagacgcaacgtttccaactctcgggacgccaaggccgcaggactggagggccaggccccgccacccccacgggagacccgggacagggcgtcttcctaagttattcatctcctctccgcctgctgctcgggaaggacagacgccggccgcccgcccgcgccccggaggccctggctctgtccggagaccaggtgagcacagcctggagcctgtgcccagggccgacaggcgcgacacccagcaaggccacctctccccgggcccccgcgcctctgccggacacggaccggcccctcagcccccaccgaggacgcagccactggggggaaagggagacacagcggaccccggccgggcagcggagaccgcagaggcgggcagggtggggcaggcgagtggtgtcgcgggggtgcgtggcgcttgcgagccctggccaggggaggaagtgaggcccaggcacctgctgcccctcgagggggccctgcctgccgcggggcctccccacaagcccctcccaaagcgccggccgactcgctgtctcgctggggactctttcagccctcgcgcccgcccgtttgggaggagaagtctctatgcaattggccccggcccctccaccccccacccccggcataggaggcccccccacctcgcccggctcacacccccaaagggagggacccacattgcacacactgtaagaaatgcactttccgaggaaggggatgggggagcccggacacccagagctccccgagttgggggtgcccgtctggagcgcccccgtcagcccctggcggtgggaggtgagaggcgcgacgagaaccaactctttacctaactttgcatggtgcttagtcaaggactcctgcgacctggctcccgaggtcagctggcggcgctgacacacatgcatggcagactatccctggctctatctccctgttcctcgccccctccaccccccacttcctctttaaaaaaaaaaaaaaaaaaaaaaagatacaagaaaaacctttaaaaaaattccatgtttcctaatttgcacgaaattttctaccacaagatgtgccttgccttccgagaataagtattacctttaaacaatatcagcgcacacacatagctgcatgttctgctcgtgtagtttaaaaaaaaaaagacaaaacagtgacatgaaataaaaaataaaaattgaaaagggatgtatttctatttgtaaaaaaaataaaataaaaaataagaaagtgagaatcta

SEQ ID NO: 337412 - DNA, 2693 bp, Homo sapiens
ggggttggggggggcgggggggtggtttggaaaaatgactcagtaagttcagcgcgcccgctccggccggccctgcgcctcccgccgcgcccgggatgtattcgtccccgctctgcctcacccaggatgagttccacccgttcatcgaggccctgctgcctcacgtccgcgccttcgcctacacctggttcaacctgcaggcgcggaagcgcaagtacttcaagaagcacgagaagcggatgtcgaaggacgaggagcgtgcggtcaaggacgagctgctgggcgagaagcccgaggtcaagcagaagtgggcgtcgcggctgctggccaagctgcgcaaggacatccggcccgagtgccgcgaggacttcgtgctgagcatcaccggcaagaaggcgccgggctgcgtgctctccaaccccgaccagaagggcaagatgcggcgcatcgactgtctccggcaggcggacaaggtgtggcggctggacctggtcatggtcatcctgttcaagggcatcccgctggagagcaccgacggcgagcgcctggtcaaggctgcgcagtgcggtcacccggtcctgtgcgtgcagccgcaccacattggcgtggccgtcaaggagctggacctctacctggcctacttcgtgcgtgagcgagatgcagagcaaagcggcagtccccggacagggatgggctctgaccaggaggacagcaagcccatcacgctggacacgaccgacttccaggagagctttgtcacctccggcgtgttcagcgtcactgagctcatccaagtgtcccggacacccgtggtgactggaacaggacccaacttctccctgggggagctgcaggggcacctggcatacgacctgaacccagccagcactggcctcagaagaacgctgcccagcacctcctccagtgggagcaagcggcacaaatcgggctcgatggaggaagacgtggacacgagccctggcggcgattactacacttcgcccagctcgcccacgagtagcagccgcaactggacggaggacatggaaggaggcatctcgtccccggtgaagaagacagagatggacaagtcaccattcaacagcccgtcccctgcaaaccgttcctttgtgggattaggaccaagggatcctgcgggcatttatcaggcacagtcctggtatctgggatagcaaaggtcttcttccctcgccccttctccatcgtcccaggaatcccagggggcagcacagccggcccccggcccacgttttcggtggaaaattagagtgaacaagaacacccctgccgactcccagcccggccaaaaagacaaaacacatagacgcacacactcaggaggaaaagaaaaaacaaaggcagaagaagaagaagaagaaataaaaacccacccaagcaagaagacaaaaggtaaagacgcaacgtttccaactctcgggacgccaaggccgcaggactggagggccaggccccgccacccccacgggagacccgggacagggcgtcttcctaagttattcatctcctctccgcctgctgctcgggaaggacagacgccggccgcccgcccgcgccccggaggccctggctctgtccggagaccaggtgagcacagcctggagcctgtgcccagggccgacaggcgcgacacccagcaaggccacctctccccgggcccccgcgcctctgccggacacggaccggcccctcagcccccaccgaggacgcagccactggggggaaagggagacacagcggaccccggccgggcagcggagaccgcagaggcgggcagggtggggcaggcgagtggtgtcgcgggggtgcgtggcgcttgcgagccctggccaggggaggaagtgaggcccaggcacctgctgcccctcgagggggccctgcctgccgcggggcctccccacaagcccctcccaaagcgccggccgactcgctgtctcgctggggactctttcagccctcgcgcccgcccgtttgggaggagaagtctctatgcaattggccccggcccctccaccccccacccccggcataggaggcccccccacctcgcccggctcacacccccaaagggagggacccacattgcacacactgtaagaaatgcactttccgaggaaggggatgggggagcccggacacccagagctccccgagttgggggtgcccgtctggagcgcccccgtcagcccctggcggtgggaggtgagaggcgcgacgagaaccaactctttacctaactttgcatggtgcttagtcaaggactcctgcgacctggctcccgaggtcagctggcggcgctgacacacatgcatggcagactatccctggctctatctccctgttcctcgccccctccaccccccacttcctctttaaaaaaaaaaaaaaaaaaaaaaagatacaagaaaaacctttaaaaaaattccatgtttcctaatttgcacgaaattttctaccacaagatgtgccttgccttccgagaataagtattacctttaaacaatatcagcgcacacacatagctgcatgttctgctcgtgtagtttaaaaaaaaaaagacaaaacagtgacatgaaataaaaaataaaaattgaaaagggatgtatttctatttgtaaaaaaaataaaataaaaaataagaaagtgagaatcta

SEQ ID NO: 337413 - DNA, 1304 bp, Homo sapiens
ggggttggggggggcgggggggtggtttggaaaaatgactcagtaagttcagcgcgcccgctccggccggccctgcgcctcccgccgcgcccgggatgtattcgtccccgctctgcctcacccaggatgagttccacccgttcatcgaggccctgctgcctcacgtccgcgccttcgcctacacctggttcaacctgcaggcgcggaagcgcaagtacttcaagaagcacgagaagcggatgtcgaaggacgaggagcgtgcggtcaaggacgagctgctgggcgagaagcccgaggtcaagcagaagtgggcgtcgcggctgctggccaagctgcgcaaggacatccggcccgagtgccgcgaggacttcgtgctgagcatcaccggcaagaaggcgccgggctgcgtgctctccaaccccgaccagaagggcaagatgcggcgcatcgactgtctccggcaggcggacaaggtgtggcggctggacctggtcatggtcatcctgttcaagggcatcccgctggagagcaccgacggcgagcgcctggtcaaggctgcgcagtgcggtcacccggtcctgtgcgtgcagccgcaccacattggcgtggccgtcaaggagctggacctctacctggcctacttcgtgcgtgagcgagatgcagagcaaagcggcagtccccggacagggatgggctctgaccaggaggacagcaagcccatcacgctggacacgaccgacttccaggagagctttgtcacctccggcgtgttcagcgtcactgagctcatccaagtgtcccggacacccgtggtgactggaacaggacccaacttctccctgggggagctgcaggggcacctggcatacgacctgaacccagccagcactggcctcagaagaacgctgcccagcacctcctccagtgggagcaagcggcacaaatcgggctcgatggaggaagacgtggacacgagccctggcggcgattactacacttcgcccagctcgcccacgagtagcagccgcaactggacggaggacatggaaggaggcatctcgtccccggtgaagaagacagagatggacaagtcaccattcaacagcccgtccccccaggactctccccgcctctccagcttcacccagcaccaccggcccgtcatcgccgtgcacagcgggatcgcccggagcccacacccgtcctccgctctgcatttccctacgacgtccatcctaccccagacggcctccacctacttcccccacacggccatccgcttttgtgatccgggtacgagctgc

SEQ ID NO: 337414 - DNA, 1980 bp, Homo sapiens
gcctctccccttccctcgcccataaggagcaagcggcacaaatcgggctcgatggaggaagacgtggacacgagccctggcggcgattactacacttcgcccagctcgcccacgagtagcagccgcaactggacggaggacatggaaggaggcatctcgtccccggtgaagaagacagagatggacaagtcaccattcaacagcccgtccccccaggactctccccgcctctccagcttcacccagcaccaccggcccgtcatcgccgtgcacagcgggatcgcccggagcccacacccgtcctccgctctgcatttccctacgacgtccatcctaccccagacggcctccacctacttcccccacacggccatccgctacccacctcatctcaacccccaggacccgctcaaagatcttgtctcgctggcctgcgacccagccagccagcaacctggaccgtcctggtatctgggatagcaaaggtcttcttccctcgccccttctccatcgtcccaggaatcccagggggcagcacagccggcccccggcccacgttttcggtggaaaattagagtgaacaagaacacccctgccgactcccagcccggccaaaaagacaaaacacatagacgcacacactcaggaggaaaagaaaaaacaaaggcagaagaagaagaagaagaaataaaaacccacccaagcaagaagacaaaaggtaaagacgcaacgtttccaactctcgggacgccaaggccgcaggactggagggccaggccccgccacccccacgggagacccgggacagggcgtcttcctaagttattcatctcctctccgcctgctgctcgggaaggacagacgccggccgcccgcccgcgccccggaggccctggctctgtccggagaccaggtgagcacagcctggagcctgtgcccagggccgacaggcgcgacacccagcaaggccacctctccccgggcccccgcgcctctgccggacacggaccggcccctcagcccccaccgaggacgcagccactggggggaaagggagacacagcggaccccggccgggcagcggagaccgcagaggcgggcagggtggggcaggcgagtggtgtcgcgggggtgcgtggcgcttgcgagccctggccaggggaggaagtgaggcccaggcacctgctgcccctcgagggggccctgcctgccgcggggcctccccacaagcccctcccaaagcgccggccgactcgctgtctcgctggggactctttcagccctcgcgcccgcccgtttgggaggagaagtctctatgcaattggccccggcccctccaccccccacccccggcataggaggcccccccacctcgcccggctcacacccccaaagggagggacccacattgcacacactgtaagaaatgcactttccgaggaaggggatgggggagcccggacacccagagctccccgagttgggggtgcccgtctggagcgcccccgtcagcccctggcggtgggaggtgagaggcgcgacgagaaccaactctttacctaactttgcatggtgcttagtcaaggactcctgcgacctggctcccgaggtcagctggcggcgctgacacacatgcatggcagactatccctggctctatctccctgttcctcgccccctccaccccccacttcctctttaaaaaaaaaaaaaaaaaaaaaaagatacaagaaaaacctttaaaaaaattccatgtttcctaatttgcacgaaattttctaccacaagatgtgccttgccttccgagaataagtattacctttaaacaatatcagcgcacacacatagctgcatgttctgctcgtgtagtttaaaaaaaaaaagacaaaacagtgacatgaaataaaaaataaaaattgaaaagggatgtatttctatttgtaaaaaaaataaaataaaaaataagaaagtgagaatcta

SEQ ID NO: 337415 - DNA, 1889 bp, Homo sapiens
ctgagctagctgtgttccaccgggatgtccacatgctcctggtggatctggagctgctgctgggcatagccaagggcctcgggaaggacaaccagcgcagcttccaggccctgtacacagccaatcagatggtgaacgtgtgtgaccctgcccagcccgagaccttcccagtggcccaggccctggcctccaggttctttggccaacatgggggtgaaagccaacacaccattcatgccacagggcactgccacattgatacaggtaggacagcaacctggaccgcctactctccgcccgacacgtcccctgcaaaccgttcctttgtgggattaggaccaagggatcctgcgggcatttatcaggcacagtcctggtatctgggatagcaaaggtcttcttccctcgccccttctccatcgtcccaggaatcccagggggcagcacagccggcccccggcccacgttttcggtggaaaattagagtgaacaagaacacccctgccgactcccagcccggccaaaaagacaaaacacatagacgcacacactcaggaggaaaagaaaaaacaaaggcagaagaagaagaagaagaaataaaaacccacccaagcaagaagacaaaaggtaaagacgcaacgtttccaactctcgggacgccaaggccgcaggactggagggccaggccccgccacccccacgggagacccgggacagggcgtcttcctaagttattcatctcctctccgcctgctgctcgggaaggacagacgccggccgcccgcccgcgccccggaggccctggctctgtccggagaccaggtgagcacagcctggagcctgtgcccagggccgacaggcgcgacacccagcaaggccacctctccccgggcccccgcgcctctgccggacacggaccggcccctcagcccccaccgaggacgcagccactggggggaaagggagacacagcggaccccggccgggcagcggagaccgcagaggcgggcagggtggggcaggcgagtggtgtcgcgggggtgcgtggcgcttgcgagccctggccaggggaggaagtgaggcccaggcacctgctgcccctcgagggggccctgcctgccgcggggcctccccacaagcccctcccaaagcgccggccgactcgctgtctcgctggggactctttcagccctcgcgcccgcccgtttgggaggagaagtctctatgcaattggccccggcccctccaccccccacccccggcataggaggcccccccacctcgcccggctcacacccccaaagggagggacccacattgcacacactgtaagaaatgcactttccgaggaaggggatgggggagcccggacacccagagctccccgagttgggggtgcccgtctggagcgcccccgtcagcccctggcggtgggaggtgagaggcgcgacgagaaccaactctttacctaactttgcatggtgcttagtcaaggactcctgcgacctggctcccgaggtcagctggcggcgctgacacacatgcatggcagactatccctggctctatctccctgttcctcgccccctccaccccccacttcctctttaaaaaaaaaaaaaaaaaaaaaaagatacaagaaaaacctttaaaaaaattccatgtttcctaatttgcacgaaattttctaccacaagatgtgccttgccttccgagaataagtattacctttaaacaatatcagcgcacacacatagctgcatgttctgctcgtgtagtttaaaaaaaaaaagacaaaacagtgacatgaaataaaaaataaaaattgaaaagggatgtatttctatttgtaaaaaaaataaaataaaaaataagaaagtgagaatcta

SEQ ID NO: 337416 - DNA, 1831 bp, Homo sapiens
gtgtgtggtgtgtaagtatatccccaatgttgcgtgggctagacttatactaaaagaattctgtgttaaccagaactccagtttcactgggcatcctgtactgtgtctggaagcctccctcagagacaaagtcacttgccatgggtcacccagcaggttgttagagcctgggatggggaaactgaggtcacagggttgcaggaggtggggggtgagcgtgggaagaggtaaaccatgtctgcagcagagtctgacccctcgacttctctccctttttctctctccctctttctgtcgccactgggccactcagtcctggtatctgggatagcaaaggtcttcttccctcgccccttctccatcgtcccaggaatcccagggggcagcacagccggcccccggcccacgttttcggtggaaaattagagtgaacaagaacacccctgccgactcccagcccggccaaaaagacaaaacacatagacgcacacactcaggaggaaaagaaaaaacaaaggcagaagaagaagaagaagaaataaaaacccacccaagcaagaagacaaaaggtaaagacgcaacgtttccaactctcgggacgccaaggccgcaggactggagggccaggccccgccacccccacgggagacccgggacagggcgtcttcctaagttattcatctcctctccgcctgctgctcgggaaggacagacgccggccgcccgcccgcgccccggaggccctggctctgtccggagaccaggtgagcacagcctggagcctgtgcccagggccgacaggcgcgacacccagcaaggccacctctccccgggcccccgcgcctctgccggacacggaccggcccctcagcccccaccgaggacgcagccactggggggaaagggagacacagcggaccccggccgggcagcggagaccgcagaggcgggcagggtggggcaggcgagtggtgtcgcgggggtgcgtggcgcttgcgagccctggccaggggaggaagtgaggcccaggcacctgctgcccctcgagggggccctgcctgccgcggggcctccccacaagcccctcccaaagcgccggccgactcgctgtctcgctggggactctttcagccctcgcgcccgcccgtttgggaggagaagtctctatgcaattggccccggcccctccaccccccacccccggcataggaggcccccccacctcgcccggctcacacccccaaagggagggacccacattgcacacactgtaagaaatgcactttccgaggaaggggatgggggagcccggacacccagagctccccgagttgggggtgcccgtctggagcgcccccgtcagcccctggcggtgggaggtgagaggcgcgacgagaaccaactctttacctaactttgcatggtgcttagtcaaggactcctgcgacctggctcccgaggtcagctggcggcgctgacacacatgcatggcagactatccctggctctatctccctgttcctcgccccctccaccccccacttcctctttaaaaaaaaaaaaaaaaaaaaaaagatacaagaaaaacctttaaaaaaattccatgtttcctaatttgcacgaaattttctaccacaagatgtgccttgccttccgagaataagtattacctttaaacaatatcagcgcacacacatagctgcatgttctgctcgtgtagtttaaaaaaaaaaagacaaaacagtgacatgaaataaaaaataaaaattgaaaagggatgtatttctatttgtaaaaaaaataaaataaaaaataagaaagtgagaatcta

SEQ ID NO: 337417 - DNA, 560 bp, Homo sapiens
cggcacgaggcatatgcttgtctcaaagattaagccatgcatgtctaagcttctcagccagggtgggggtcgtggagtgggggagggaggccagccgggctccagaggggtcagggcgcgacgagaaccaactctttacctaactttgcatggtgcttagtcaaggactcctgcgacctggctcccgaggtcagctggcggcgctgacacacatgcatggcagactatccctggctctatctccctgttcctcgccccctccaccccccacttcctctttaaaaaaaaaaaaaaaaaaaaaaagatacaagaaaaacctttaaaaaaattccatgtttcctaatttgcacgaaattttctaccacaagatgtgccttgccttccgagaataagtattacctttaaacaatatcagcgcacacacatagctgcatgttctgctcgtgtagtttaaaaaaaaaaagacaaaacagtgacatgaaataaaaaataaaaattgaaaagggatgtatttctatttgtaaaaaaaataaaataaaaaataagaaagtgagaatcta

SEQ ID NO: 337418 - DNA, 2882 bp, Homo sapiens
cgccggagcactactcggcgctattttctggaacaatgactattttgttcagcgcgcccgctccggccggccctgcgcctcccgccgcgcccgggatgtattcgtccccgctctgcctcacccaggatgagttccacccgttcatcgaggccctgctgcctcacgtccgcgccttcgcctacacctggttcaacctgcaggcgcggaagcgcaagtacttcaagaagcacgagaagcggatgtcgaaggacgaggagcgtgcggtcaaggacgagctgctgggcgagaagcccgaggtcaagcagaagtgggcgtcgcggctgctggccaagctgcgcaaggacatccggcccgagtgccgcgaggacttcgtgctgagcatcaccggcaagaaggcgccgggctgcgtgctctccaaccccgaccagaagggcaagatgcggcgcatcgactgtctccggcaggcggacaaggtgtggcggctggacctggtcatggtcatcctgttcaagggcatcccgctggagagcaccgacggcgagcgcctggtcaaggctgcgcagtgcggtcacccggtcctgtgcgtgcagccgcaccacattggcgtggccgtcaaggagctggacctctacctggcctacttcgtgcgtgagcgagatgcagagcaaagcggcagtccccggacagggatgggctctgaccaggaggacagcaagcccatcacgctggacacgaccgacttccaggagagctttgtcacctccggcgtgttcagcgtcactgagctcatccaagtgtcccggacacccgtggtgactggaacaggacccaacttctccctgggggagctgcaggggcacctggcatacgacctgaacccagccagcactggcctcagaagaacgctgcccagcacctcctccagtgggagcaagcggcacaaatcgggctcgatggaggaagacgtggacacgagccctggcggcgattactacacttcgcccagctcgcccacgagtagcagccgcaactggacggaggacatggaaggaggcatctcgtccccggtgaagaagacagagatggacaagtcaccattcaacagcccgtccccccaggactctccccgcctctccagcttcacccagcaccaccggcccgtcatcgccgtgcacagcgggatcgcccggagcccacacccgtcctccgctctgcatttccctacgacgtccatcctaccccagacggcctccacctacttcccccacacggccatccgctacccacctcatctcaacccccaggacccgctcaaagatcttgtctcgctggcctgcgacccagccagccagcaacctggaccgtcctggtatctgggatagcaaaggtcttcttccctcgccccttctccatcgtcccaggaatcccagggggcagcacagccggcccccggcccacgttttcggtggaaaattagagtgaacaagaacacccctgccgactcccagcccggccaaaaagacaaaacacatagacgcacacactcaggaggaaaagaaaaaacaaaggcagaagaagaagaagaagaaataaaaacccacccaagcaagaagacaaaaggtaaagacgcaacgtttccaactctcgggacgccaaggccgcaggactggagggccaggccccgccacccccacgggagacccgggacagggcgtcttcctaagttattcatctcctctccgcctgctgctcgggaaggacagacgccggccgcccgcccgcgccccggaggccctggctctgtccggagaccaggtgagcacagcctggagcctgtgcccagggccgacaggcgcgacacccagcaaggccacctctccccgggcccccgcgcctctgccggacacggaccggcccctcagcccccaccgaggacgcagccactggggggaaagggagacacagcggaccccggccgggcagcggagaccgcagaggcgggcagggtggggcaggcgagtggtgtcgcgggggtgcgtggcgcttgcgagccctggccaggggaggaagtgaggcccaggcacctgctgcccctcgagggggccctgcctgccgcggggcctccccacaagcccctcccaaagcgccggccgactcgctgtctcgctggggactctttcagccctcgcgcccgcccgtttgggaggagaagtctctatgcaattggccccggcccctccaccccccacccccggcataggaggcccccccacctcgcccggctcacacccccaaagggagggacccacattgcacacactgtaagaaatgcactttccgaggaaggggatgggggagcccggacacccagagctccccgagttgggggtgcccgtctggagcgcccccgtcagcccctggcggtgggaggtgagaggcgcgacgagaaccaactctttacctaactttgcatggtgcttagtcaaggactcctgcgacctggctcccgaggtcagctggcggcgctgacacacatgcatggcagactatccctggctctatctccctgttcctcgccccctccaccccccacttcctctttaaaaaaaaaaaaaaaaaaaaaaagatacaagaaaaacctttaaaaaaattccatgtttcctaatttgcacgaaattttctaccacaagatgtgccttgccttccgagaataagtattacctttaaacaatatcagcgcacacacatagctgcatgttctgctcgtgtagtttaaaaaaaaaaagacaaaacagtgacatgaaataaaaaataaaaattgaaaagggatgtatttctatttgtaaaaaaaataaaataaaaaataagaaagtgagaatcta

SEQ ID NO: 337419 - DNA, 2539 bp, Homo sapiens
ggggttggggggggcgggggggtggtttggaaaaatgactcagtaagttcagcgcgcccgctccggccggccctgcgcctcccgccgcgcccgggatgtattcgtccccgctctgcctcacccaggatgagttccacccgttcatcgaggccctgctgcctcacgtccgcgccttcgcctacacctggttcaacctgcaggcgcggaagcgcaagtacttcaagaagcacgagaagcggatgtcgaaggacgaggagcgtgcggtcaaggacgagctgctgggcgagaagcccgaggtcaagcagaagtgggcgtcgcggctgctggccaagctgcgcaaggacatccggcccgagtgccgcgaggacttcgtgctgagcatcaccggcaagaaggcgccgggctgcgtgctctccaaccccgaccagaagggcaagatgcggcgcatcgactgtctccggcaggcggacaaggtgtggcggctggacctggtcatggtcatcctgttcaagggcatcccgctggagagcaccgacggcgagcgcctggtcaaggctgcgcagtgcggtcacccggtcctgtgcgtgcagccgcaccacattggcgtggccgtcaaggagctggacctctacctggcctacttcgtgcgtgagcgagatgcagagcaaagcggcagtccccggacagggatgggctctgaccaggaggacagcaagcccatcacgctggacacgaccgacttccaggagagctttgtcacctccggcgtgttcagcgtcactgagctcatccaagtgtcccggacacccgtggtgactggaacaggacccaacttctccctgggggagctgcaggggcacctggcatacgacctgaacccagccagcactggcctcagaagaacgctgcccagcacctcctccagtgggagcaagcggcacaaatcgggctcgatggaggaagacgtggacacgagccctggcggcgattactacacttcgcccagctcgcccacgagtagcagccgcaactggacggaggacatggaaggaggcatctcgtccccggtgaagaagacagagatggacaagtcaccattcaacagcccgtccccccaggactctccccgcctctccagcttcacccagcaccaccggcccgtcatcgccgtgcacagcgggatcgcccggagcccacacccgtcctccgctctgcatttccctacgacgtccatcctaccccagacggcctccacctacttcccccacacggccatccgctacccacctcatctcaacccccaggacccgctcaaagatcttgtctcgctggcctgcgacccagccagccagcaacctggaccgtcctggtatctgggatagcaaaggtcttcttccctcgccccttctccatcgtcccaggaatcccagggggcagcacagccggcccccggcccacgttttcggtggaaaattagagtgaacaagaacacccctgccgactcccagcccggccaaaaagacaaaacacatagacgcacacactcaggaggaaaagaaaaaacaaaggcagaagaagaagaagaagaaataaaaacccacccaagcaagaagacaaaaggtaaagacgcaacgtttccaactctcgggacgccaaggccgcaggactggagggccaggccccgccacccccacgggagacccgggacagggcgtcttcctaagttattcatctcctctccgcctgctgctcgggaaggacagacgccggccgcccgcccgcgccccggaggccctggctctgtccggagaccaggtgagcacagcctggagcctgtgcccagggccgacaggcgcgacacccagcaaggccacctctccccgggcccccgcgcctctgccggacacggaccggcccctcagcccccaccgaggacgcagccactggggggaaagggagacacagcggaccccggccgggcagcggagaccgcagaggcgggcagggtggggcaggcgagtggtgtcgcgggggtgcgtggcgcttgcgagccctggccaggggaggaagtgaggcccaggcacctgctgcccctcgagggggccctgcctgccgcggggcctccccacaagcccctcccaaagcgccggccgactcgctgtctcgctggggactctttcagccctcgcgcccgcccgtttgggaggagaagtctctatgcaattggccccggccccctccaccccccacttcctctttaaaaaaaaaaaaaaaaaaaaaaagatacaagaaaaacctttaaaaaaattccatgtttcctaatttgcacgaaattttctaccacaagatgtgccttgccttccgagaataagtattacctttaaacaatatcagcgcacacacatagctgcatgttctgctcgtgtagtttaaaaaaaaaaagacaaaacagtgacatgaaataaaaaataaaaattgaaaagggatgtatttctatttgtaaaaaaaataaaataaaaaataagaaagtgagaatcta

SEQ ID NO: 337420 - DNA, 1948 bp, Homo sapiens
ggggttggggggggcgggggggtggtttggaaaaatgactcagtaagttcagcgcgcccgctccggccggccctgcgcctcccgccgcgcccgggatgtattcgtccccgctctgcctcacccaggatgagttccacccgttcatcgaggccctgctgcctcacgtccgcgccttcgcctacacctggttcaacctgcaggcgcggaagcgcaagtacttcaagaagcacgagaagcggatgtcgaaggacgaggagcgtgcggtcaaggacgagctgctgggcgagaagcccgaggtcaagcagaagtgggcgtcgcggctgctggccaagctgcgcaaggacatccggcccgagtgccgcgaggacttcgtgctgagcatcaccggcaagaaggcgccgggctgcgtgctctccaaccccgaccagaagggcaagatgcggcgcatcgactgtctccggcaggcggacaaggtgtggcggctggacctggtcatggtcatcctgttcaagggcatcccgctggagagcaccgacggcgagcgcctggtcaaggctgcgcagtgcggtcacccggtcctgtgcgtgcagccgcaccacattggcgtggccgtcaaggagctggacctctacctggcctacttcgtgcgtgagcgagatgcagagcaaagcggcagtccccggacagggatgggctctgaccaggaggacagcaagcccatcacgctggacacgaccgacttccaggagagctttgtcacctccggcgtgttcagcgtcactgagctcatccaagtgtcccggacacccgtggtgactggaacaggacccaacttctccctgggggagctgcaggggcacctggcatacgacctgaacccagccagcactggcctcagaagaacgctgcccagcacctcctccagtgggagcaagcggcacaaatcgggctcgatggaggaagacgtggacacgagccctggcggcgattactacacttcgcccagctcgcccacgagtagcagccgcaactggacggaggacatggaaggaggcatctcgtccccggtgaagaagacagagatggacaagtcaccattcaacagcccgtccccccaggactctccccgcctctccagcttcacccagcaccaccggcccgtcatcgccgtgcacagcgggatcgcccggagcccacacccgtcctccgctctgcatttccctacgacgtccatcctaccccagacggcctccacctacttcccccacacggccatccgctacccacctcatctcaacccccaggacccgctcaaagatcttgtctcgctggcctgcgacccagccagccagcaacctggaccgtcctggtatctgggatagcaaaggtcttcttccctcgccccttctccatcgtcccaggaatcccagggggcagcacagccggcccccggcccacgttttcggtggaaaattagagtgaacaagaacacccctgccgactcccagcccggccaaaaagacaaaacacatagacgcacacactcaggaggaaaagaaaaaacaaaggcagaagaagaagaagaagaaataaaaacccacccaagcaagaagacaaaaggagcaagcggcacatatcgggctcgatggaggaagacgtggacacgagccctggcggcgattactacacttcgcccagctcgcccacgagtagcagccgcaactggacggaggacatggaaggaggcatctcgtccccggtgaagaagacagagatggacaagtcaccattcaacagcccgtccccccaggactctccccgcctctccagcttcacccagcaccaccggcccgtcatcgccgtgcacagcgggatcgcccggagcccacacccgtcctccgctctgcatttccctacgacgtccatcctacacacggactcgccttta

SEQ ID NO: 337421 - DNA, 2968 bp, Homo sapiens
ggggttggggggggcgggggggtggtttggaaaaatgactcagtaagttcagcgcgcccgctccggccggccctgcgcctcccgccgcgcccgggatgtattcgtccccgctctgcctcacccaggatgagttccacccgttcatcgaggccctgctgcctcacgtccgcgccttcgcctacacctggttcaacctgcaggcgcggaagcgcaagtacttcaagaagcacgagaagcggatgtcgaaggacgaggagcgtgcggtcaaggacgagctgctgggcgagaagcccgaggtcaagcagaagtgggcgtcgcggctgctggccaagctgcgcaaggacatccggcccgagtgccgcgaggacttcgtgctgagcatcaccggcaagaaggcgccgggctgcgtgctctccaaccccgaccagaagggcaagatgcggcgcatcgactgtctccggcaggcggacaaggtgtggcggctggacctggtcatggtcatcctgttcaagggcatcccgctggagagcaccgacggcgagcgcctggtcaaggctgcgcagtgcggtcacccggtcctgtgcgtgcagccgcaccacattggcgtggccgtcaaggagctggacctctacctggcctacttcgtgcgtgagcgagatgcagagcaaagcggcagtccccggacagggatgggctctgaccaggaggacagcaagcccatcacgctggacacgaccgacttccaggagagctttgtcacctccggcgtgttcagcgtcactgagctcatccaagtgtcccggacacccgtggtgactggaacaggacccaacttctccctgggggagctgcaggggcacctggcatacgacctgaacccagccagcactggcctcagaagaacgctgcccagcacctcctccagtgggagcaagcggcacaaatcgggctcgatggaggaagacgtggacacgagccctggcggcgattactacacttcgcccagctcgcccacgagtagcagccgcaactggacggaggacatggaaggaggcatctcgtccccggtgaagaagacagagatggacaagtcaccattcaacagcccgtccccccaggactctccccgcctctccagcttcacccagcaccaccggcccgtcatcgccgtgcacagcgggatcgcccggagcccacacccgtcctccgctctgcatttccctacgacgtccatcctaccccagacggcctccacctacttcccccacacggccatccgctacccacctcatctcaacccccaggacccgctcaaagatcttgtctcgctggcctgcgacccagccagccagcaacctggaccgcctactctccgcccgacacgtcccctgcaaaccgttcctttgtgggattaggaccaagggatcctgcgggcatttatcaggcacagtcctggtatctgggatagcaaaggtcttcttccctcgccccttctccatcgtcccaggaatcccagggggcagcacagccggcccccggcccacgttttcggtggaaaattagagtgaacaagaacacccctgccgactcccagcccggccaaaaagacaaaacacatagacgcacacactcaggaggaaaagaaaaaacaaaggcagaagaagaagaagaagaaataaaaacccacccaagcaagaagacaaaaggtaaagacgcaacgtttccaactctcgggacgccaaggccgcaggactggagggccaggccccgccacccccacgggagacccgggacagggcgtcttcctaagttattcatctcctctccgcctgctgctcgggaaggacagacgccggccgcccgcccgcgccccggaggccctggctctgtccggagaccaggtgagcacagcctggagcctgtgcccagggccgacaggcgcgacacccagcaaggccacctctccccgggcccccgcgcctctgccggacacggaccggcccctcagcccccaccgaggacgcagccactggggggaaagggagacacagcggaccccggccgggcagcggagaccgcagaggcgggcagggtggggcaggcgagtggtgtcgcgggggtgcgtggcgcttgcgagccctggccaggggaggaagtgaggcccaggcacctgctgcccctcgagggggccctgcctgccgcggggcctccccacaagcccctcccaaagcgccggccgactcgctgtctcgctggggactctttcagccctcgcgcccgcccgtttgggaggagaagtctctatgcaattggccccggcccctccaccccccacccccggcataggaggcccccccacctcgcccggctcacacccccaaagggagggacccacattgcacacactgtaagaaatgcactttccgaggaaggggatgggggagcccggacacccagagctccccgagttgggggtgcccgtctggagcgcccccgtcagcccctggcggtgggaggtgagaggcgcgacgagaaccaactctttacctaactttgcatggtgcttagtcaaggactcctgcgacctggctcccgaggtcagctggcggcgctgacacacatgcatggcagactatccctggctctatctccctgttcctcgccccctccaccccccacttcctctttaaaaaaaaaaaaaaaaaaaaaaagatacaagaaaaacctttaaaaaaattccatgtttcctaatttgcacgaaattttctaccacaagatgtgccttgccttccgagaataagtattacctttaaacaatatcagcgcacacacatagctgcatgttctgctcgtgtagtttaaaaaaaaaaagacaaaacagtgacatgaaataaaaaataaaaattgaaaagggatgtatttctatttgtaaaaaaaataaaataaaaaataagaaagtgagaatcta

SEQ ID NO: 337422 - DNA, 3036 bp, Homo sapiens
ggggttggggggggcgggggggtggtttggaaaaatgactcagtaagttcagcgcgcccgctccggccggccctgcgcctcccgccgcgcccgggatgtattcgtccccgctctgcctcacccaggatgagttccacccgttcatcgaggccctgctgcctcacgtccgcgccttcgcctacacctggttcaacctgcaggcgcggaagcgcaagtacttcaagaagcacgagaagcggatgtcgaaggacgaggagcgtgcggtcaaggacgagctgctgggcgagaagcccgaggtcaagcagaagtgggcgtcgcggctgctggccaagctgcgcaaggacatccggcccgagtgccgcgaggacttcgtgctgagcatcaccggcaagaaggcgccgggctgcgtgctctccaaccccgaccagaagggcaagatgcggcgcatcgactgtctccggcaggcggacaaggtgtggcggctggacctggtcatggtcatcctgttcaagggcatcccgctggagagcaccgacggcgagcgcctggtcaaggctgcgcagtgcggtcacccggtcctgtgcgtgcagccgcaccacattggcgtggccgtcaaggagctggacctctacctggcctacttcgtgcgtgagcgagatgcagagcaaagcggcagtccccggacagggatgggctctgaccaggaggacagcaagcccatcacgctggacacgaccgacttccaggagagctttgtcacctccggcgtgttcagcgtcactgagctcatccaagtgtcccggacacccgtggtgactggaacaggacccaacttctccctgggggagctgcaggggcacctggcatacgacctgaacccagccagcactggcctcagaagaacgctgcccagcacctcctccagtgggagcaagcggcacaaatcgggctcgatggaggaagacgtggacacgagccctggcggcgattactacacttcgcccagctcgcccacgagtagcagccgcaactggacggaggacatggaaggaggcatctcgtccccggtgaagaagacagagatggacaagtcaccattcaacagcccgtccccccaggactctccccgcctctccagcttcacccagcaccaccggcccgtcatcgccgtgcacagcgggatcgcccggagcccacacccgtcctccgctctgcatttccctacgacgtccatcctaccccagacggcctccacctacttcccccacacggccatccgctacccacctcatctcaacccccaggacccgctcaaagatcttgtctcgctggcctgcgacccagccagccagcaacctggaccgttaaatggaagtggtcagctcaaaatgcccagccactgcctttctgctcagatgctggcacctccgcccccggggctgccacggctggcgctcccccctgccaccaaacccgccaccacctccgagggaggagccacgtcgccgacctcgcctttcctggtatctgggatagcaaaggtcttcttccctcgccccttctccatcgtcccaggaatcccagggggcagcacagccggcccccggcccacgttttcggtggaaaattagagtgaacaagaacacccctgccgactcccagcccggccaaaaagacaaaacacatagacgcacacactcaggaggaaaagaaaaaacaaaggcagaagaagaagaagaagaaataaaaacccacccaagcaagaagacaaaaggtaaagacgcaacgtttccaactctcgggacgccaaggccgcaggactggagggccaggccccgccacccccacgggagacccgggacagggcgtcttcctaagttattcatctcctctccgcctgctgctcgggaaggacagacgccggccgcccgcccgcgccccggaggccctggctctgtccggagaccaggtgagcacagcctggagcctgtgcccagggccgacaggcgcgacacccagcaaggccacctctccccgggcccccgcgcctctgccggacacggaccggcccctcagcccccaccgaggacgcagccactggggggaaagggagacacagcggaccccggccgggcagcggagaccgcagaggcgggcagggtggggcaggcgagtggtgtcgcgggggtgcgtggcgcttgcgagccctggccaggggaggaagtgaggcccaggcacctgctgcccctcgagggggccctgcctgccgcggggcctccccacaagcccctcccaaagcgccggccgactcgctgtctcgctggggactctttcagccctcgcgcccgcccgtttgggaggagaagtctctatgcaattggccccggcccctccaccccccacccccggcataggaggcccccccacctcgcccggctcacacccccaaagggagggacccacattgcacacactgtaagaaatgcactttccgaggaaggggatgggggagcccggacacccagagctccccgagttgggggtgcccgtctggagcgcccccgtcagcccctggcggtgggaggtgagaggcgcgacgagaaccaactctttacctaactttgcatggtgcttagtcaaggactcctgcgacctggctcccgaggtcagctggcggcgctgacacacatgcatggcagactatccctggctctatctccctgttcctcgccccctccaccccccacttcctctttaaaaaaaaaaaaaaaaaaaaaaagatacaagaaaaacctttaaaaaaattccatgtttcctaatttgcacgaaattttctaccacaagatgtgccttgccttccgagaataagtattacctttaaacaatatcagcgcacacacatagctgcatgttctgctcgtgtagtttaaaaaaaaaaagacaaaacagtgacatgaaataaaaaataaaaattgaaaagggatgtatttctatttgtaaaaaaaataaaataaaaaataagaaagtgagaatcta

SEQ ID NO: 337423 - DNA, 1675 bp, Homo sapiens
ggggttggggggggcgggggggtggtttggaaaaatgactcagtaagttcagcgcgcccgctccggccggccctgcgcctcccgccgcgcccgggatgtattcgtccccgctctgcctcacccaggatgagttccacccgttcatcgaggccctgctgcctcacgtccgcgccttcgcctacacctggttcaacctgcaggcgcggaagcgcaagtacttcaagaagcacgagaagcggatgtcgaaggacgaggagcgtgcggtcaaggacgagctgctgggcgagaagcccgaggtcaagcagaagtgggcgtcgcggctgctggccaagctgcgcaaggacatccggcccgagtgccgcgaggacttcgtgctgagcatcaccggcaagaaggcgccgggctgcgtgctctccaaccccgaccagaagggcaagatgcggcgcatcgactgtctccggcaggcggacaaggtgtggcggctggacctggtcatggtcatcctgttcaagggcatcccgctggagagcaccgacggcgagcgcctggtcaaggctgcgcagtgcggtcacccggtcctgtgcgtgcagccgcaccacattggcgtggccgtcaaggagctggacctctacctggcctacttcgtgcgtgagcgagatgcagagcaaagcggcagtccccggacagggatgggctctgaccaggaggacagcaagcccatcacgctggacacgaccgacttccaggagagctttgtcacctccggcgtgttcagcgtcactgagctcatccaagtgtcccggacacccgtggtgactggaacaggacccaacttctccctgggggagctgcaggggcacctggcatacgacctgaacccagccagcactggcctcagaagaacgctgcccagcacctcctccagtgggagcaagcggcacaaatcgggctcgatggaggaagacgtggacacgagccctggcggcgattactacacttcgcccagctcgcccacgagtagcagccgcaactggacggaggacatggaaggaggcatctcgtccccggtgaagaagacagagatggacaagtcaccattcaacagcccgtccccccaggactctccccgcctctccagcttcacccagcaccaccggcccgtcatcgccgtgcacagcgggatcgcccggagcccacacccgtcctccgctctgcatttccctacgacgtccatcctaccccagacggcctccacctacttcccccacacggccatccgctacccacctcatctcaacccccaggacccgctcaaagatcttgtctcgctggcctgcgacccagccagccagcaacctggaccgcctactctccgcccgacacgtcccctgcaaaccgttcctttgtgggattaggaccaagggatcctgcgggcatttatcaggcacagtcctggtatctgggatagcaaaggtcttcttccctcgccccttctccatcgtcccaggaatcccagggggcagcacagccggcccccggcccacgttttcggtggaaaattagagtgaacaagaacacccctgccgactcccagcccggccaaaaagacaaaacacatagacgcacacactcaggaggatcgtgagagagtgaaggatcgtgagagagggaggat

SEQ ID NO: 337424 - DNA, 1711 bp, Homo sapiens
ggggttggggggggcgggggggtggtttggaaaaatgactcagtaagttcagcgcgcccgctccggccggccctgcgcctcccgccgcgcccgggatgtattcgtccccgctctgcctcacccaggatgagttccacccgttcatcgaggccctgctgcctcacgtccgcgccttcgcctacacctggttcaacctgcaggcgcggaagcgcaagtacttcaagaagcacgagaagcggatgtcgaaggacgaggagcgtgcggtcaaggacgagctgctgggcgagaagcccgaggtcaagcagaagtgggcgtcgcggctgctggccaagctgcgcaaggacatccggcccgagtgccgcgaggacttcgtgctgagcatcaccggcaagaaggcgccgggctgcgtgctctccaaccccgaccagaagggcaagatgcggcgcatcgactgtctccggcaggcggacaaggtgtggcggctggacctggtcatggtcatcctgttcaagggcatcccgctggagagcaccgacggcgagcgcctggtcaaggctgcgcagtgcggtcacccggtcctgtgcgtgcagccgcaccacattggcgtggccgtcaaggagctggacctctacctggcctacttcgtgcgtgagcgagatgcagagcaaagcggcagtccccggacagggatgggctctgaccaggaggacagcaagcccatcacgctggacacgaccgacttccaggagagctttgtcacctccggcgtgttcagcgtcactgagctcatccaagtgtcccggacacccgtggtgactggaacaggacccaacttctccctgggggagctgcaggggcacctggcatacgacctgaacccagccagcactggcctcagaagaacgctgcccagcacctcctccagtgggagcaagcggcacaaatcgggctcgatggaggaagacgtggacacgagccctggcggcgattactacacttcgcccagctcgcccacgagtagcagccgcaactggacggaggacatggaaggaggcatctcgtccccggtgaagaagacagagatggacaagtcaccattcaacagcccgtccccccaggactctccccgcctctccagcttcacccagcaccaccggcccgtcatcgccgtgcacagcgggatcgcccggagcccacacccgtcctccgctctgcatttccctacgacgtccatcctaccccagacggcctccacctacttcccccacacggccatccgctacccacctcatctcaacccccaggacccgctcaaagatcttgtctcgctggcctgcgacccagccagccagcaacctggaccgttaaatggaagtggtcagctcaaaatgcccagccactgcctttctgctcagatgctggcacctccgcccccggggctgccacggctggcgctcccccctgccaccaaacccgccaccacctccgagggaggagccacgtcgccgacctcgccttcctactctccgcccgacacgtcccctgcaaaccgttcctttgtgggattaggaccaagggatcctgcgggcatttatcaggcacaggctccgcaaaaccagccggaggaggaagcagggatggaggctgcttctcctgagttcagaggagatccatgtgctatgggtggagggaatcctgggtcaggggccag

SEQ ID NO: 337425 - DNA, 1169 bp, Homo sapiens
  misc_feature (1100)..(1100): n is a, c, g, or t
  misc_feature (1157)..(1157): n is a, c, g, or t
ggggttggggggggcgggggggtggtttggaaaaatgactcagtaagttcagcgcgcccgctccggccggccctgcgcctcccgccgcgcccgggatgtattcgtccccgctctgcctcacccaggatgagttccacccgttcatcgaggccctgctgcctcacgtccgcgccttcgcctacacctggttcaacctgcaggcgcggaagcgcaagtacttcaagaagcacgagaagcggatgtcgaaggacgaggagcgtgcggtcaaggacgagctgctgggcgagaagcccgaggtcaagcagaagtgggcgtcgcggctgctggccaagctgcgcaaggacatccggcccgagtgccgcgaggacttcgtgctgagcatcaccggcaagaaggcgccgggctgcgtgctctccaaccccgaccagaagggcaagatgcggcgcatcgactgtctccggcaggcggacaaggtgtggcggctggacctggtcatggtcatcctgttcaagggcatcccgctggagagcaccgacggcgagcgcctggtcaaggctgcgcagtgcggtcacccggtcctgtgcgtgcagccgcaccacattggcgtggccgtcaaggagctggacctctacctggcctacttcgtgcgtgagcgagatgcagagcaaagcggcagtccccggacagggatgggctctgaccaggaggacagcaagcccatcacgctggacacgaccgacttccaggagagctttgtcacctccggcgtgttcagcgtcactgagctcatccaagtgtcccggacacccgtggtgactggaacaggacccaacttctccctgggggagctgcaggggcacctggcatacgacctgaacccagccagcactggcctcagaagaacgctgcccagcacctcctccagtgggagcaagcggcacaaatcgggctcgatggaggaagacgtggacacgagccctggcggcgattactacacttcgcccagctcgcccacgagtagcagccgcaactggacggaggacatggaaggagtcgagacattcctgcgcatggtgcagtgccgctctgtggagggcagntgtggcttctaggtgcccgagtagcatcctgtgacccctccccagtgcctctcctgnccctgaaggtgc

SEQ ID NO: 337426 - DNA, 769 bp, Homo sapiens
gaaaaccagactctcctcccaaactagcctcaggagcttggcgaacccgctcgctcctaaagagaaagacccaggaccctcccccatcacccccaagagaggttcgccatcctctggcctcgagcccttggtccctccgtccgtctgtcctcggggcccgctcccccggtggcccttggggatcaaagcgtgggccgctctccgggagggcgggcgggggagggggtggtcgggttgtgccattggggtgtccggaagcttctcagccagggtgggggtcgtggagtgggggagggaggccagccgggctccagaggggtcagggcgcgacgagaaccaactctttacctaactttgcatggtgcttagtcaaggactcctgcgacctggctcccgaggtcagctggcggcgctgacacacatgcatggcagactatccctggctctatctccctgttcctcgccccctccaccccccacttcctctttaaaaaaaaaaaaaaaaaaaaaaagatacaagaaaaacctttaaaaaaattccatgtttcctaatttgcacgaaattttctaccacaagatgtgccttgccttccgagaataagtattacctttaaacaatatcagcgcacacacatagctgcatgttctgctcgtgtagtttaaaaaaaaaaagacaaaacagtgacatgaaataaaaaataaaaattgaaaagggatgtatttctatttgtaaaaaaaataaaataaaaaataagaaagtgagaatcta

SEQ ID NO: 337427 - DNA, 2152 bp, Homo sapiens
agaagaagatcggtagattgagtggctagagaggtcggaggtaagtggctatagaagtcgggcggacccggaacccagaggacgcgacaccatgacttatgcttatctcttcaagtatatcatcatcggagacacaggtgtggggaagtcatgtctcctcctgcagtttacagataagcggttccagcctgtccacgacctcacaataggtgtggagtttggagctcgtatggtcaacattgatggaaaacaaatcaaactgcaaatctgggatacgctggagcactgctggtgtacgacattacaaggcgtgaaaccttcaaccacctgacctcatggttagaggatgcccggcagcactctagttccaacatggttatcatgctcattgggaataagagtgacctagagtcccgcagggatgtgaagagagaagaaggagaggcctttgctagggagcatggacttatattcatggaaacttcagccaaaacagcctgcaatgttgaagaggccttcattaacacagccaaagaaatatataggaagatccagcagggtttatttgatgtccacaatgagttcccactaagaattagggtcaaagacattctatttgaacacttgcaattacctagatctagttggcctttggttgatagatcctctgcctcggaatttcattgagtttttttcttccttgcctttgggtgtctgcttgccacttcctaagaattcttgtagaaggcagtttcctctacttgcccaagagcactgagtacttctctactatcctattattagcttctatctcttagtgtaacttcaaaacttttaagagcagtgaagttggtcagggacatgtggccacttattattacctaaagaaaacatttgttccctgttcattttattttaggggccagatctaacattgtagtgtctttcaccagatagacttctactgtttcatcaaactcccttcttaactagacctagactttctactccaatcaggctaatctacttactgaatgtgacatatttattcctagttccatacctttgcacatgccctactctccactaattatacttaaaagtccaaaaattttttctttagtaacagacttaggtactgctaagcagttattaacacaatattccttagttttcatatgttggttattcatatgtctatttatatgtatatttatttttatgtatgttactatgtaaatatggtttgcagttgtttttgtgtggaatcttgtctttccgtataagttgtaagctccttgagagcaggatccatgtcattcctttatttttataaattattccccctatcattcctttacagtgcctagtgctactcattatgtgttcattgaatttgactgacatagttaaaaacttaaggtttattttagactttcaaggaaacaaaagactttagagtcctctctctgtaattctgccccactcatttgtttaccctgggttttatacagttctcttccttctcccctcccacctttccctggctttttgcctccattccatgaggcatacagtaaggctgcctgctagtaagcagtcacataagtgggtacctatccagccattctcttttcagagcatataatactatcttagccaaacttgcctttgcttcactcatcatgcagccttctgggttggttgctatatatatcttttttccttgatgtcccattctcttccacagccctgaggtcttacgaatttttctactttctttttgctgttgatgaattgtttcattattaaatatatgcatgtatcaaagctattcatactccatgtgtcatttctaattgtatcccaaacattagtagatactctcctctcagggaattaaatcaaagataatgaagaagcctctttgggattcatgctatactcgattctgaccccagtagtagtagtaatagttgacagtgcaccacaggaagttggaagacatttggggtattgctttggttatgcttttgttttgtttttaaaatcctatctgattccaaaaaggatttgaagctgttgaacttggagttagcctgcccccttacctctgggcgaaaactaaagtaataaaaactagtttctgtac

SEQ ID NO: 337428 - DNA, 415 bp, Homo sapiens
agaagaagatcggtagattgagtggctagagaggtcggaggtaagtggctatagaagtcgggcggacccggaacccagaggacgcgacaccatgacttatgcttatctcttcaagtatatcatcatcggagacacaggtgtggggaagtcatgtctcctcctgcagtttacagataagcggttccagcctgtccacgacctcacaataggtaagtgcatctacttgttccagaacagatgataaaacctgactagctaaattgctaaagtggaaagttagcagccttcagtgttcgaagtaaaaagttacccctcactactttaaactagtccaaacttatgttaatgaagtgaccaatgaaacgttgatatgtggggagtagtgtaagggagagtatataattgaaaggtaact

SEQ ID NO: 337429 - DNA, 2642 bp, Homo sapiens
ctctggtccgggaagtccatactctggaaggtgttccagggctagcgtgattccgggagtgtgctttctctttcaggtgtggggaagtcatgtctcctcctgcagtttacagataagcggttccagcctgtccacgacctcacaataggtgtggagtttggagctcgtatggtcaacattgatggaaaacaaatcaaactgcaaatctgggatacggctgggcaagaatccttccgttctatcacccgttcctactacaggggagcagctggagcactgctggtgtacgacattacaaggcgtgaaaccttcaaccacctgacctcatggttagaggatgcccggcagcactctagttccaacatggttatcatgctcattgggaataagagtgacctagagtcccgcagggatgtgaagagagaagaaggagaggcctttgctagggagcatggacttatattcatggaaacttcagccaaaacagcctgcaatgttgaagaggccttcattaacacagccaaagaaatatataggaagatccagcagggtttatttgatgtccacaatgaggcaaatggcatcaagattgggccccaacagtcaatttcaacatcagtgggacccagtgcctcccagcggaactctcgtgacatagggtccaactctggctgctgctgaacatctggcttgaactttttttgtccttcctggaatagcttcagatcaataggcttaatgaaagaggtctttcttgctttggctgagagcagcctctttttaaagtgtgatgttttgcctttccacctaaagaccaggagagaatttgggcccttactgacctgtcctccttcagggacatgagcattccctatagattagggttcttcttatcctcctatacaaatttcttaaattgttaggatcaaagttgattatcacagtagttaaaaaataatttcatggcggggcgccatggctcatgcctgtaatcctcccaaagtgctggattacaggtgtgagccaccgtgcctggcctaaataaataatttcgtaagcatatacaatccacttcccactaagaattagggtcaaagacattctatttgaacacttgcaattacctagatctagttggcctttggttgatagatcctctgcctcggaatttcattgagtttttttcttccttgcctttgggtgtctgcttgccacttcctaagaattcttgtagaaggcagtttcctctacttgcccaagagcactgagtacttctctactatcctattattagcttctatctcttagtgtaacttcaaaacttttaagagcagtgaagttggtcagggacatgtggccacttattattacctaaagaaaacatttgttccctgttcattttattttaggggccagatctaacattgtagtgtctttcaccagatagacttctactgtttcatcaaactcccttcttaactagacctagactttctactccaatcaggctaatctacttactgaatgtgacatatttattcctagttccatacctttgcacatgccctactctccactaattatacttaaaagtccaaaaattttttctttagtaacagacttaggtactgctaagcagttattaacacaatattccttagttttcatatgttggttattcatatgtctatttatatgtatatttatttttatgtatgttactatgtaaatatggtttgcagttgtttttgtgtggaatcttgtctttccgtataagttgtaagctccttgagagcaggatccatgtcattcctttatttttataaattattccccctatcattcctttacagtgcctagtgctactcattatgtgttcattgaatttgactgacatagttaaaaacttaaggtttattttagactttcaaggaaacaaaagactttagagtcctctctctgtaattctgccccactcatttgtttaccctgggttttatacagttctcttccttctcccctcccacctttccctggctttttgcctccattccatgaggcatacagtaaggctgcctgctagtaagcagtcacataagtgggtacctatccagccattctcttttcagagcatataatactatcttagccaaacttgcctttgcttcactcatcatgcagccttctgggttggttgctatatatatcttttttccttgatgtcccattctcttccacagccctgaggtcttacgaatttttctactttctttttgctgttgatgaattgtttcattattaaatatatgcatgtatcaaagctattcatactccatgtgtcatttctaattgtatcccaaacattagtagatactctcctctcagggaattaaatcaaagataatgaagaagcctctttgggattcatgctatactcgattctgaccccagtagtagtagtaatagttgacagtgcaccacaggaagttggaagacatttggggtattgctttggttatgcttttgttttgtttttaaaatcctatctgattccaaaaaggatttgaagctgttgaacttggagttagcctgcccccttacctctgggcgaaaactaaagtaataaaaactagtttctgtac

SEQ ID NO: 337430 - DNA, 2554 bp, Homo sapiens
gaaaaacaagcaatagagcataagctttgtgtaactatgggggcttgcctaacccttgataagccattttctctgtaatagagtgaggtattatcttcaactatgcagcagctgtcccaaaactaaagaatattttccaagatgctacaaaaatcagtaactctgtataagagtatcatgtaggatctacattctttatgaaataactggcagttgaaaccacgacggaattcttttagaaatagactttcctctttcacttggatcttttttttaaattttctccttaattaatctcttgcagtgacctagagtcccgcagggatgtgaagagagaagaaggagaggcctttgctagggagcatggacttatattcatggaaacttcagccaaaacagcctgcaatgttgaagaggccttcattaacacagccaaagaaatatataggaagatccagcagggtttatttgatgtccacaatgaggcaaatggcatcaagattgggccccaacagtcaatttcaacatcagtgggacccagtgcctcccagcggaactctcgtgacatagggtccaactctggctgctgctgaacatctggcttgaactttttttgtccttcctggaatagcttcagatcaataggcttaatgaaagaggtctttcttgctttggctgagagcagcctctttttaaagtgtgatgttttgcctttccacctaaagaccaggagagaatttgggcccttactgacctgtcctccttcagggacatgagcattccctatagattagggttcttcttatcctcctatacaaatttcttaaattgttaggatcaaagttgattatcacagtagttaaaaaataatttcatggcggggcgccatggctcatgcctgtaatcctcccaaagtgctggattacaggtgtgagccaccgtgcctggcctaaataaataatttcgtaagcatatacaatccacttcccactaagaattagggtcaaagacattctatttgaacacttgcaattacctagatctagttggcctttggttgatagatcctctgcctcggaatttcattgagtttttttcttccttgcctttgggtgtctgcttgccacttcctaagaattcttgtagaaggcagtttcctctacttgcccaagagcactgagtacttctctactatcctattattagcttctatctcttagtgtaacttcaaaacttttaagagcagtgaagttggtcagggacatgtggccacttattattacctaaagaaaacatttgttccctgttcattttattttaggggccagatctaacattgtagtgtctttcaccagatagacttctactgtttcatcaaactcccttcttaactagacctagactttctactccaatcaggctaatctacttactgaatgtgacatatttattcctagttccatacctttgcacatgccctactctccactaattatacttaaaagtccaaaaattttttctttagtaacagacttaggtactgctaagcagttattaacacaatattccttagttttcatatgttggttattcatatgtctatttatatgtatatttatttttatgtatgttactatgtaaatatggtttgcagttgtttttgtgtggaatcttgtctttccgtataagttgtaagctccttgagagcaggatccatgtcattcctttatttttataaattattccccctatcattcctttacagtgcctagtgctactcattatgtgttcattgaatttgactgacatagttaaaaacttaaggtttattttagactttcaaggaaacaaaagactttagagtcctctctctgtaattctgccccactcatttgtttaccctgggttttatacagttctcttccttctcccctcccacctttccctggctttttgcctccattccatgaggcatacagtaaggctgcctgctagtaagcagtcacataagtgggtacctatccagccattctcttttcagagcatataatactatcttagccaaacttgcctttgcttcactcatcatgcagccttctgggttggttgctatatatatcttttttccttgatgtcccattctcttccacagccctgaggtcttacgaatttttctactttctttttgctgttgatgaattgtttcattattaaatatatgcatgtatcaaagctattcatactccatgtgtcatttctaattgtatcccaaacattagtagatactctcctctcagggaattaaatcaaagataatgaagaagcctctttgggattcatgctatactcgattctgaccccagtagtagtagtaatagttgacagtgcaccacaggaagttggaagacatttggggtattgctttggttatgcttttgttttgtttttaaaatcctatctgattccaaaaaggatttgaagctgttgaacttggagttagcctgcccccttacctctgggcgaaaactaaagtaataaaaactagtttctgtac

SEQ ID NO: 337431 - DNA, 2378 bp, Homo sapiens
atgagatggagtttcactcttgtcacccaggctagagcacaatggcatgatctcgtcttactgcaacctccacctcctgggttcaagcgattctcctgcctcagtctcccgagtagctgggattacagtgacctagagtcccgcagggatgtgaagagagaagaaggagaggcctttgctagggagcatggacttatattcatggaaacttcagccaaaacagcctgcaatgttgaagaggccttcattaacacagccaaagaaatatataggaagatccagcagggtttatttgatgtccacaatgaggcaaatggcatcaagattgggccccaacagtcaatttcaacatcagtgggacccagtgcctcccagcggaactctcgtgacatagggtccaactctggctgctgctgaacatctggcttgaactttttttgtccttcctggaatagcttcagatcaataggcttaatgaaagaggtctttcttgctttggctgagagcagcctctttttaaagtgtgatgttttgcctttccacctaaagaccaggagagaatttgggcccttactgacctgtcctccttcagggacatgagcattccctatagattagggttcttcttatcctcctatacaaatttcttaaattgttaggatcaaagttgattatcacagtagttaaaaaataatttcatggcggggcgccatggctcatgcctgtaatcctcccaaagtgctggattacaggtgtgagccaccgtgcctggcctaaataaataatttcgtaagcatatacaatccacttcccactaagaattagggtcaaagacattctatttgaacacttgcaattacctagatctagttggcctttggttgatagatcctctgcctcggaatttcattgagtttttttcttccttgcctttgggtgtctgcttgccacttcctaagaattcttgtagaaggcagtttcctctacttgcccaagagcactgagtacttctctactatcctattattagcttctatctcttagtgtaacttcaaaacttttaagagcagtgaagttggtcagggacatgtggccacttattattacctaaagaaaacatttgttccctgttcattttattttaggggccagatctaacattgtagtgtctttcaccagatagacttctactgtttcatcaaactcccttcttaactagacctagactttctactccaatcaggctaatctacttactgaatgtgacatatttattcctagttccatacctttgcacatgccctactctccactaattatacttaaaagtccaaaaattttttctttagtaacagacttaggtactgctaagcagttattaacacaatattccttagttttcatatgttggttattcatatgtctatttatatgtatatttatttttatgtatgttactatgtaaatatggtttgcagttgtttttgtgtggaatcttgtctttccgtataagttgtaagctccttgagagcaggatccatgtcattcctttatttttataaattattccccctatcattcctttacagtgcctagtgctactcattatgtgttcattgaatttgactgacatagttaaaaacttaaggtttattttagactttcaaggaaacaaaagactttagagtcctctctctgtaattctgccccactcatttgtttaccctgggttttatacagttctcttccttctcccctcccacctttccctggctttttgcctccattccatgaggcatacagtaaggctgcctgctagtaagcagtcacataagtgggtacctatccagccattctcttttcagagcatataatactatcttagccaaacttgcctttgcttcactcatcatgcagccttctgggttggttgctatatatatcttttttccttgatgtcccattctcttccacagccctgaggtcttacgaatttttctactttctttttgctgttgatgaattgtttcattattaaatatatgcatgtatcaaagctattcatactccatgtgtcatttctaattgtatcccaaacattagtagatactctcctctcagggaattaaatcaaagataatgaagaagcctctttgggattcatgctatactcgattctgaccccagtagtagtagtaatagttgacagtgcaccacaggaagttggaagacatttggggtattgctttggttatgcttttgttttgtttttaaaatcctatctgattccaaaaaggatttgaagctgttgaacttggagttagcctgcccccttacctctgggcgaaaactaaagtaataaaaactagtttctgtac

SEQ ID NO: 337432 - DNA, 1847 bp, Homo sapiens
cagtggcatgatcttggctcactgcaacctccactttccaggttcaagcagttctcctgcctcaacctcccgagtagctgggactacaggcatgtgccaccacacctggctcatttttgtatttttagtagagacagggtttcaccatgttggccaggatggtcttgatctcttgacctcgtgatccgcccaccttggcctcccaaagtgctggattacaggtgtgagccaccgtgcctggcctaaataaataatttcgtaagcatatacaatccacttcccactaagaattagggtcaaagacattctatttgaacacttgcaattacctagatctagttggcctttggttgatagatcctctgcctcggaatttcattgagtttttttcttccttgcctttgggtgtctgcttgccacttcctaagaattcttgtagaaggcagtttcctctacttgcccaagagcactgagtacttctctactatcctattattagcttctatctcttagtgtaacttcaaaacttttaagagcagtgaagttggtcagggacatgtggccacttattattacctaaagaaaacatttgttccctgttcattttattttaggggccagatctaacattgtagtgtctttcaccagatagacttctactgtttcatcaaactcccttcttaactagacctagactttctactccaatcaggctaatctacttactgaatgtgacatatttattcctagttccatacctttgcacatgccctactctccactaattatacttaaaagtccaaaaattttttctttagtaacagacttaggtactgctaagcagttattaacacaatattccttagttttcatatgttggttattcatatgtctatttatatgtatatttatttttatgtatgttactatgtaaatatggtttgcagttgtttttgtgtggaatcttgtctttccgtataagttgtaagctccttgagagcaggatccatgtcattcctttatttttataaattattccccctatcattcctttacagtgcctagtgctactcattatgtgttcattgaatttgactgacatagttaaaaacttaaggtttattttagactttcaaggaaacaaaagactttagagtcctctctctgtaattctgccccactcatttgtttaccctgggttttatacagttctcttccttctcccctcccacctttccctggctttttgcctccattccatgaggcatacagtaaggctgcctgctagtaagcagtcacataagtgggtacctatccagccattctcttttcagagcatataatactatcttagccaaacttgcctttgcttcactcatcatgcagccttctgggttggttgctatatatatcttttttccttgatgtcccattctcttccacagccctgaggtcttacgaatttttctactttctttttgctgttgatgaattgtttcattattaaatatatgcatgtatcaaagctattcatactccatgtgtcatttctaattgtatcccaaacattagtagatactctcctctcagggaattaaatcaaagataatgaagaagcctctttgggattcatgctatactcgattctgaccccagtagtagtagtaatagttgacagtgcaccacaggaagttggaagacatttggggtattgctttggttatgcttttgttttgtttttaaaatcctatctgattccaaaaaggatttgaagctgttgaacttggagttagcctgcccccttacctctgggcgaaaactaaagtaataaaaactagtttctgtac

SEQ ID NO: 337433 - DNA, 2213 bp, Homo sapiens
agaagaagatcggtagattgagtggctagagaggtcggaggtaagtggctatagaagtcgggcggacccggaacccagaggacgcgacaccatgacttatgcttatctcttcaagtatatcatcatcggagacacaggtgtggggaagtcatgtctcctcctgcagtttacagataagcggttccagcctgtccacgacctcacaataggtgtggagtttggagctcgtatggtcaacattgatggaaaacaaatcaaactgcaaatctgggatacggctgggcaagaatccttccgttctatcacccgttcctactacaggggagcagctggagcactgctggtgtacgacattacaaggcgtgaaaccttcaaccacctgacctcatggttagaggatgcccggcagcactctagttccaacatggttatcatgctcattgggaataagagtgacctagagtcccgcagggatgtgaagagagaagaaggagaggcctttgctagggagcatggacttatattcatggaaacttcagccaaaacagcctgcaatgttgaagagctcccaaagtgctggattacaggtgtgagccaccgtgcctggcctaaataaataatttcgtaagcatatacaatccacttcccactaagaattagggtcaaagacattctatttgaacacttgcaattacctagatctagttggcctttggttgatagatcctctgcctcggaatttcattgagtttttttcttccttgcctttgggtgtctgcttgccacttcctaagaattcttgtagaaggcagtttcctctacttgcccaagagcactgagtacttctctactatcctattattagcttctatctcttagtgtaacttcaaaacttttaagagcagtgaagttggtcagggacatgtggccacttattattacctaaagaaaacatttgttccctgttcattttattttaggggccagatctaacattgtagtgtctttcaccagatagacttctactgtttcatcaaactcccttcttaactagacctagactttctactccaatcaggctaatctacttactgaatgtgacatatttattcctagttccatacctttgcacatgccctactctccactaattatacttaaaagtccaaaaattttttctttagtaacagacttaggtactgctaagcagttattaacacaatattccttagttttcatatgttggttattcatatgtctatttatatgtatatttatttttatgtatgttactatgtaaatatggtttgcagttgtttttgtgtggaatcttgtctttccgtataagttgtaagctccttgagagcaggatccatgtcattcctttatttttataaattattccccctatcattcctttacagtgcctagtgctactcattatgtgttcattgaatttgactgacatagttaaaaacttaaggtttattttagactttcaaggaaacaaaagactttagagtcctctctctgtaattctgccccactcatttgtttaccctgggttttatacagttctcttccttctcccctcccacctttccctggctttttgcctccattccatgaggcatacagtaaggctgcctgctagtaagcagtcacataagtgggtacctatccagccattctcttttcagagcatataatactatcttagccaaacttgcctttgcttcactcatcatgcagccttctgggttggttgctatatatatcttttttccttgatgtcccattctcttccacagccctgaggtcttacgaatttttctactttctttttgctgttgatgaattgtttcattattaaatatatgcatgtatcaaagctattcatactccatgtgtcatttctaattgtatcccaaacattagtagatactctcctctcagggaattaaatcaaagataatgaagaagcctctttgggattcatgctatactcgattctgaccccagtagtagtagtaatagttgacagtgcaccacaggaagttggaagacatttggggtattgctttggttatgcttttgttttgtttttaaaatcctatctgattccaaaaaggatttgaagctgttgaacttggagttagcctgcccccttacctctgggcgaaaactaaagtaataaaaactagtttctgtac

SEQ ID NO: 337434 - DNA, 2649 bp, Homo sapiens
agaagaagatcggtagattgagtggctagagaggtcggaggtaagtggctatagaagtcgggcggacccggaacccagaggacgcgacaccatgacttatgcttatctcttcaagtatatcatcatcggagacacaggtgtggggaagtcatgtctcctcctgcagtttacagataagcggttccagcctgtccacgacctcacaataggtgtggagtttggagctcgtatggtcaacattgatggaaaacaaatcaaactgcaaatctgggatacggctgggcaagaatccttccgttctatcacccgttcctactacaggggagcagctggagcactgctggtgtacgacattacaaggcgtgaaaccttcaaccacctgacctcatggttagaggatgcccggcagcactctagttccaacatggttatcatgctcattgggaataagagtgacctagagtcccgcagggatgtgaagagagaagaaggagaggcctttgctagggagcatggacttatattcatggaaacttcagccaaaacagcctgcaatgttgaagaggccttcattaacacagccaaagaaatatataggaagatccagcagggtttatttgatgtccacaatgaggcaaatggcatcaagattgggccccaacagtcaatttcaacatcagtgggacccagtgcctcccagcggaactctcgtgacatagggtccaactctggctgctgctgaacatctggcttgaactttttttgtccttcctggaatagcttcagatcaataggcttaatgaaagaggtctttcttgctttggctgagagcagcctctttttaaagtgtgatgttttgcctttccacctaaagaccaggagagaatttgggcccttactgacctgtcctccttcagggacatgagcattccctatagattagggttcttcttatcctcctatacaaatttcttaaattgttaggatcaaagttgattatcacagtagttaaaaaataatttcatggcggggcgccatggctcatgcctgtaatcctcccaaagtgctggattacaggtgtgagccaccgtgcctggcctaaataaataatttcgtaagcatatacaatccacttcccactaagaattagggtcaaagacattctatttgaacacttgcaattacctagatctagttggcctttggttgatagatcctctgcctcggaatttcattgagtttttttcttccttgcctttgggtgtctgcttgccacttcctaagaattcttgtagaaggcagtttcctctacttgcccaagagcactgagtacttctctactatcctattattagcttctatctcttagtgtaacttcaaaacttttaagagcagtgaagttggtcagggacatgtggccacttattattacctaaagaaaacatttgttccctgttcattttattttaggggccagatctaacattgtagtgtctttcaccagatagacttctactgtttcatcaaactcccttcttaactagacctagactttctactccaatcaggctaatctacttactgaatgtgacatatttattcctagttccatacctttgcacatgccctactctccactaattatacttaaaagtccatattccttagttttcatatgttggttattcatatgtctatttatatgtatatttatttttatgtatgttactatgtaaatatggtttgcagttgtttttgtgtggaatcttgtctttccgtataagttgtaagctccttgagagcaggatccatgtcattcctttatttttataaattattccccctatcattcctttacagtgcctagtgctactcattatgtgttcattgaatttgactgacatagttaaaaacttaaggtttattttagactttcaaggaaacaaaagactttagagtcctctctctgtaattctgccccactcatttgtttaccctgggttttatacagttctcttccttctcccctcccacctttccctggctttttgcctccattccatgaggcatacagtaaggctgcctgctagtaagcagtcacataagtgggtacctatccagccattctcttttcagagcatataatactatcttagccaaacttgcctttgcttcactcatcatgcagccttctgggttggttgctatatatatcttttttccttgatgtcccattctcttccacagccctgaggtcttacgaatttttctactttctttttgctgttgatgaattgtttcattattaaatatatgcatgtatcaaagctattcatactccatgtgtcatttctaattgtatcccaaacattagtagatactctcctctcagggaattaaatcaaagataatgaagaagcctctttgggattcatgctatactcgattctgaccccagtagtagtagtaatagttgacagtgcaccacaggaagttggaagacatttggggtattgctttggttatgcttttgttttgtttttaaaatcctatctgattccaaaaaggatttgaagctgttgaacttggagttagcctgcccccttacctctgggcgaaaactaaagtaataaaaactagtttctgtac

SEQ ID NO: 337435 - DNA, 1664 bp, Homo sapiens
agaagaagatcggtagattgagtggctagagaggtcggaggtaagtggctatagaagtcgggcggacccggaacccagaggacgcgacaccatgacttatgcttatctcttcaagtatatcatcatcggagacacaggtgtggggaagtcatgtctcctcctgcagtttacagataagcggttccagcctgtccacgacctcacaataggtgtggagtttggagctcgtatggtcaacattgatggaaaacaaatcaaactgcaaatctgggatacggctgggcaagaatccttccgttctatcacccgttcctactacaggggagcagctggagcactgctggtgtacgacattacaaggcgtgaaaccttcaaccacctgacctcatggttagaggatgcccggcagcactctagttccaacatggttatcatgctcattgggaataagagtgacctagagtcccgcagggatgtgaagagagaagaaggagaggcctttgctagggagcatggacttatattcatggaaacttcagccaaaacagcctgcaatgttgaagaggccttcattaacacagccaaagaaatatataggaagatccagcagggtttatttgatgtccacaatgaggcaaatggcatcaagattgggccccaacagtcaatttcaacatcagtgggacccagtgcctcccagcggaactctcgtgacatagggtccaactctggctgctgctgaacatctggcttgaactttttttgtccttcctggaatagcttcagatcaataggcttaatgaaagaggtctttcttgctttggctgagagcagcctctttttaaagtgtgatgttttgcctttccacctaaagaccaggagagaatttgggcccttactgacctgtcctccttcagggacatgagcattccctatagattagggttcttcttatcctcctatacaaatttcttaaattgttaggatcaaagttgattatcacagtagttaaaaaataatttcatggcggggcgccatggctcatgcctgtaatcctcccaaagtgctggattacaggtgtgagccaccgtgcctggcctaaataaataatttcgtaagcatatacaatccacttcccactaagaattagggtcaaagacattctatttgaacacttgcaattacctagatctagttggcctttggttgatagatcctctgcctcggaatttcattgagtttttttcttccttgcctttgggtgtctgcttgccacttcctaagaattcttgtagaaggcagtttcctctacttgcccaagagcactgagtacttctctactatcctattattagcttctatctcttagtgtaacttcaaaacttttaagagcagtgaagttggtcagggacatgtggccacttattattacctaaagaaaacatttgttccctgttcattttattttaggggccagatctaacattgtagtgtctttcaccagatagacttctactgtttcatcaaactcccttcttaactagacctagactttctactccaatcaggctaatctacttactgaatgtgacatatttattcctagttccatacctttgcacatgccctactctgaaagtgggtaccgagctgaattgtatcag

SEQ ID NO: 337436 - DNA, 269 bp, Homo sapiens
gtatacgcttggagttgttttggccttttgaaatgtgtctctgacccacattctaaatttttctgctgtaggcgtgaaaccttcaaccacctgacctcatggttagaggatgcccggcagcactctagttccaacatggttatcatgctcattgggaataagaggtaaaattgtatccatgtgaataatagttaacaggagtcatctaggtactctatgcacattgatccccaaactttctcagtttatagtggtcttagtgtttcagt

SEQ ID NO: 337437 - DNA, 2703 bp, Homo sapiens
agaagaagatcggtagattgagtggctagagaggtcggaggtaagtggctatagaagtcgggcggacccggaacccagaggacgcgacaccatgacttatgcttatctcttcaagtatatcatcatcggagacacaggtgtggggaagtcatgtctcctcctgcagtttacagataagcggttccagcctgtccacgacctcacaataggtgtggagtttggagctcgtatggtcaacattgatggaaaacaaatcaaactgcaaatctgggatacggctgggcaagaatccttccgttctatcacccgttcctactacaggggagcagctggagcactgctggtgtacgacattacaaggcgtgaaaccttcaaccacctgacctcatggttagaggatgcccggcagcactctagttccaacatggttatcatgctcattgggaataagagtgacctagagtcccgcagggatgtgaagagagaagaaggagaggcctttgctagggagcatggacttatattcatggaaacttcagccaaaacagcctgcaatgttgaagaggccttcattaacacagccaaagaaatatataggaagatccagcagggtttatttgatgtccacaatgaggcaaatggcatcaagattgggccccaacagtcaatttcaacatcagtgggacccagtgcctcccagcggaactctcgtgacatagggtccaactctggctgctgctgaacatctggcttgaactttttttgtccttcctggaatagcttcagatcaataggcttaatgaaagaggtctttcttgctttggctgagagcagcctctttttaaagtgtgatgttttgcctttccacctaaagaccaggagagaatttgggcccttactgacctgtcctccttcagggacatgagcattccctatagattagggttcttcttatcctcctatacaaatttcttaaattgttaggatcaaagttgattatcacagtagttaaaaaataatttcatggcggggcgccatggctcatgcctgtaatcctcccaaagtgctggattacaggtgtgagccaccgtgcctggcctaaataaataatttcgtaagcatatacaatccacttcccactaagaattagggtcaaagacattctatttgaacacttgcaattacctagatctagttggcctttggttgatagatcctctgcctcggaatttcattgagtttttttcttccttgcctttgggtgtctgcttgccacttcctaagaattcttgtagaaggcagtttcctctacttgcccaagagcactgagtacttctctactatcctattattagcttctatctcttagtgtaacttcaaaacttttaagagcagtgaagttggtcagggacatgtggccacttattattacctaaagaaaacatttgttccctgttcattttattttaggggccagatctaacattgtagtgtctttcaccagatagacttctactgtttcatcaaactcccttcttaactagacctagactttctactccaatcaggctaatctacttactgaatgtgacatatttattcctagttccatacctttgcacatgccctactctccactaattatacttaaaagtccaaaaattttttctttagtaacagacttaggtactgctaagcagttattaacacaatattccttagttttcatatgttggttattcatatgtctatttatatgtatatttatttttatgtatgttactatgtaaatatggtttgcagttgtttttgtgtggaatcttgtctttccgtataagttgtaagctccttgagagcaggatccatgtcattcctttatttttataaattattccccctatcattcctttacagtgcctagtgctactcattatgtgttcattgaatttgactgacatagttaaaaacttaaggtttattttagactttcaaggaaacaaaagactttagagtcctctctctgtaattctgccccactcatttgtttaccctgggttttatacagttctcttccttctcccctcccacctttccctggctttttgcctccattccatgaggcatacagtaaggctgcctgctagtaagcagtcacataagtgggtacctatccagccattctcttttcagagcatataatactatcttagccaaacttgcctttgcttcactcatcatgcagccttctgggttggttgctatatatatcttttttccttgatgtcccattctcttccacagccctgaggtcttacgaatttttctactttctttttgctgttgatgaattgtttcattattaaatatatgcatgtatcaaagctattcatactccatgtgtcatttctaattgtatcccaaacattagtagatactctcctctcagggaattaaatcaaagataatgaagaagcctctttgggattcatgctatactcgattctgaccccagtagtagtagtaatagttgacagtgcaccacaggaagttggaagacatttggggtattgctttggttatgcttttgttttgtttttaaaatcctatctgattccaaaaaggatttgaagctgttgaacttggagttagcctgcccccttacctctgggcgaaaactaaagtaataaaaactagtttctgtac

SEQ ID NO: 337438 - DNA, 2620 bp, Homo sapiens
agaagaagatcggtagattgagtggctagagaggtcggaggtaagtggctatagaagtcgggcggacccggaacccagaggacgcgacaccatgacttatgcttatctcttcaagtatatcatcatcggagacacaggtgtggggaagtcatgtctcctcctgcagtttacagataagcggttccagcctgtccacgacctcacaataggtgtggagtttggagctcgtatggtcaacattgatggaaaacaaatcaaactgcaaatctgggatacggcgtgaaaccttcaaccacctgacctcatggttagaggatgcccggcagcactctagttccaacatggttatcatgctcattgggaataagagtgacctagagtcccgcagggatgtgaagagagaagaaggagaggcctttgctagggagcatggacttatattcatggaaacttcagccaaaacagcctgcaatgttgaagaggccttcattaacacagccaaagaaatatataggaagatccagcagggtttatttgatgtccacaatgaggcaaatggcatcaagattgggccccaacagtcaatttcaacatcagtgggacccagtgcctcccagcggaactctcgtgacatagggtccaactctggctgctgctgaacatctggcttgaactttttttgtccttcctggaatagcttcagatcaataggcttaatgaaagaggtctttcttgctttggctgagagcagcctctttttaaagtgtgatgttttgcctttccacctaaagaccaggagagaatttgggcccttactgacctgtcctccttcagggacatgagcattccctatagattagggttcttcttatcctcctatacaaatttcttaaattgttaggatcaaagttgattatcacagtagttaaaaaataatttcatggcggggcgccatggctcatgcctgtaatcctcccaaagtgctggattacaggtgtgagccaccgtgcctggcctaaataaataatttcgtaagcatatacaatccacttcccactaagaattagggtcaaagacattctatttgaacacttgcaattacctagatctagttggcctttggttgatagatcctctgcctcggaatttcattgagtttttttcttccttgcctttgggtgtctgcttgccacttcctaagaattcttgtagaaggcagtttcctctacttgcccaagagcactgagtacttctctactatcctattattagcttctatctcttagtgtaacttcaaaacttttaagagcagtgaagttggtcagggacatgtggccacttattattacctaaagaaaacatttgttccctgttcattttattttaggggccagatctaacattgtagtgtctttcaccagatagacttctactgtttcatcaaactcccttcttaactagacctagactttctactccaatcaggctaatctacttactgaatgtgacatatttattcctagttccatacctttgcacatgccctactctccactaattatacttaaaagtccaaaaattttttctttagtaacagacttaggtactgctaagcagttattaacacaatattccttagttttcatatgttggttattcatatgtctatttatatgtatatttatttttatgtatgttactatgtaaatatggtttgcagttgtttttgtgtggaatcttgtctttccgtataagttgtaagctccttgagagcaggatccatgtcattcctttatttttataaattattccccctatcattcctttacagtgcctagtgctactcattatgtgttcattgaatttgactgacatagttaaaaacttaaggtttattttagactttcaaggaaacaaaagactttagagtcctctctctgtaattctgccccactcatttgtttaccctgggttttatacagttctcttccttctcccctcccacctttccctggctttttgcctccattccatgaggcatacagtaaggctgcctgctagtaagcagtcacataagtgggtacctatccagccattctcttttcagagcatataatactatcttagccaaacttgcctttgcttcactcatcatgcagccttctgggttggttgctatatatatcttttttccttgatgtcccattctcttccacagccctgaggtcttacgaatttttctactttctttttgctgttgatgaattgtttcattattaaatatatgcatgtatcaaagctattcatactccatgtgtcatttctaattgtatcccaaacattagtagatactctcctctcagggaattaaatcaaagataatgaagaagcctctttgggattcatgctatactcgattctgaccccagtagtagtagtaatagttgacagtgcaccacaggaagttggaagacatttggggtattgctttggttatgcttttgttttgtttttaaaatcctatctgattccaaaaaggatttgaagctgttgaacttggagttagcctgcccccttacctctgggcgaaaactaaagtaataaaaactagtttctgtac

SEQ ID NO: 337439 - DNA, 1916 bp, Homo sapiens
ctctggtccgggaagtccatactctggaaggtgttccagggctagcgtgattccgggagtgtgctttctctttcaggtgtggggaagtcatgtctcctcctgcagtttacagataagcggttccagcctgtccacgacctcacaataggtgtggagtttggagctcgtatggtcaacattgatggaaaacaaatcaaactgcaaatctgggatacggctgggcaagaatccttccgttctatcacccgttcctactacaggggagcagctcccaaagtgctggattacaggtgtgagccaccgtgcctggcctaaataaataatttcgtaagcatatacaatccacttcccactaagaattagggtcaaagacattctatttgaacacttgcaattacctagatctagttggcctttggttgatagatcctctgcctcggaatttcattgagtttttttcttccttgcctttgggtgtctgcttgccacttcctaagaattcttgtagaaggcagtttcctctacttgcccaagagcactgagtacttctctactatcctattattagcttctatctcttagtgtaacttcaaaacttttaagagcagtgaagttggtcagggacatgtggccacttattattacctaaagaaaacatttgttccctgttcattttattttaggggccagatctaacattgtagtgtctttcaccagatagacttctactgtttcatcaaactcccttcttaactagacctagactttctactccaatcaggctaatctacttactgaatgtgacatatttattcctagttccatacctttgcacatgccctactctccactaattatacttaaaagtccaaaaattttttctttagtaacagacttaggtactgctaagcagttattaacacaatattccttagttttcatatgttggttattcatatgtctatttatatgtatatttatttttatgtatgttactatgtaaatatggtttgcagttgtttttgtgtggaatcttgtctttccgtataagttgtaagctccttgagagcaggatccatgtcattcctttatttttataaattattccccctatcattcctttacagtgcctagtgctactcattatgtgttcattgaatttgactgacatagttaaaaacttaaggtttattttagactttcaaggaaacaaaagactttagagtcctctctctgtaattctgccccactcatttgtttaccctgggttttatacagttctcttccttctcccctcccacctttccctggctttttgcctccattccatgaggcatacagtaaggctgcctgctagtaagcagtcacataagtgggtacctatccagccattctcttttcagagcatataatactatcttagccaaacttgcctttgcttcactcatcatgcagccttctgggttggttgctatatatatcttttttccttgatgtcccattctcttccacagccctgaggtcttacgaatttttctactttctttttgctgttgatgaattgtttcattattaaatatatgcatgtatcaaagctattcatactccatgtgtcatttctaattgtatcccaaacattagtagatactctcctctcagggaattaaatcaaagataatgaagaagcctctttgggattcatgctatactcgattctgaccccagtagtagtagtaatagttgacagtgcaccacaggaagttggaagacatttggggtattgctttggttatgcttttgttttgtttttaaaatcctatctgattccaaaaaggatttgaagctgttgaacttggagttagcctgcccccttacctctgggcgaaaactaaagtaataaaaactagtttctgtac

SEQ ID NO: 337440 - DNA, 2379 bp, Homo sapiens
agaagaagatcggtagattgagtggctagagaggtcggaggtaagtggctatagaagtcgggcggacccggaacccagaggacgcgacaccatgacttatgcttatctcttcaagtatatcatcatcggagacacaggtgtggggaagtcatgtctcctcctgcagtttacagataagcggttccagcctgtccacgacctcacaataggtgtggagtttggagctcgtatggtcaacattgatggaaaacaaatcaaactgcaaatctgggatacggctgggcaagaatccttccgttctatcacccgttcctactacaggggagcagctggagcactgctggtgtacgacattacaaggcgtgaaaccttcaaccacctgacctcatggttagaggatgcccggcagcactctagttccaacatggttatcatgctcattgggaataagagtgacctagagtcccgcagggatgtgaagagagaagaaggagaggcctttgctagggagcatggacttatattcatggaaacttcagccaaaacagcctgcaatgttgaagaggccttcattaacacagccaaagaaatatataggaagatccagcagggtttatttgatgtccacaatgaggcaaatggcatcaagattgggccccaacagtcaatttcaacatcagtgggacccagtgcctcccagcggaactctcgtgacatagggtccaactctggctgctgctgaacatctggcttgaactttttttgtccttcctggaatagcttcagatcaataggcttaatgaaagaggtctttcttgctttggctgagagcagcctctttttaaagtgtgatgttttgcctttccacctaaagaccaggagagaatttgggcccttactgacctgtcctccttcagggacatgagcattccctatagattagggttcttcttatcctcctatacaaatttcttaaattgttaggatcaaagttgattatcacagtagttaaaaaataatttcatggcggggcgccatggctcatgcctgtaatcctcccaaagtgctggattacaggtgtgagccaccgtgcctggcctaaataaataatttcgtaagcatatacaatccacttcccactaagaattagggtcaaagacattctatttgaacacttgcaattacctagatctagttggcctttggttgatagatcctctgcctcggaatttcattgagtttttttcttccttgcctttgggtgtctgcttgccacttcctaagaattcttgtagaaggcagtttcctctacttgcccaagagcactgagtacttctctactatcctattattagcttctatctcttagtgtaacttcaaaacttttaagagcagtgaagttggtcagggacatgtggccacttattattacctaaagaaaacatttgttccctgttcattttattttaggggccagatctaacattgtagtgtctttcaccagatagacttctactgtttcatcaaactcccttcttaactagacctagactttctactccaatcaggctaatctacttactgaatgtgacatatttattcctagttccatacctttgcacatgccctactctccactaattatacttaaaagtccaaaaattttttctttagtaacagacttaggtactgctaagcagttattaacacaatattccttagttttcatatgttggttattcatatgtctatttatatgtatatttatttttatgtatgttactatgtaaatatggtttgcagttgtttttgtgtggaatcttgtctttccgtataagttgtaagctccttgagagcaggatccatgtcattcctttatttttataaattattccccctatcattcctttacagtgcctagtgctactcattatgtgttcattgaatttgactgacatagttaaaaacttaaggtttattttagactttcaaggaaacaaaagactttagagtcctctctctgtaattctgccccactcatttgtttaccctgggttttatacagttctcttccttctcccctcccacctttccctggctttttgcctccattccatgaggcatacagtaaggctgcctgctagtaagcagtcacataagtgggtacctatccagccattctcttttcagagcatataatactatcttagccaaacttgcctttgcttcactcatcatgcagccttctgggttggttgctatatatatcttttttccttgatgtcccattctcttccacagccctgaggtcttacgaatttttctactatacacaacctcttgacgaatatgtacacttcttcaatacatgcatgtcac

SEQ ID NO: 337441 - DNA, 1164 bp, Homo sapiens
agaagaagatcggtagattgagtggctagagaggtcggaggtaagtggctatagaagtcgggcggacccggaacccagaggacgcgacaccatgacttatgcttatctcttcaagtatatcatcatcggagacacaggtgtggggaagtcatgtctcctcctgcagtttacagataagcggttccagcctgtccacgacctcacaataggtgtggagtttggagctcgtatggtcaacattgatggaaaacaaatcaaactgcaaatctgggatacggctgggcaagaatccttccgttctatcacccgttcctactacaggggagcagctggagcactgctggtgtacgacattacaaggcgtgaaaccttcaaccacctgacctcatggttagaggatgcccggcagcactctagttccaacatggttatcatgctcattgggaataagagtgacctagagtcccgcagggatgtgaagagagaagaaggagaggcctttgctagggagcatggacttatattcatggaaacttcagccaaaacagcctgcaatgttgaagaggccttcattaacacagccaaagaaatatataggaagatccagcagggtttatttgatgtccacaatgaggcaaatggcatcaagattgggccccaacagtcaatttcaacatcagtgggacccagtgcctcccagcggaactctcgtgacatagggtccaactctggctgctgctgaacatctggcttgaactttttttgtccttcctggaatagcttcagatcaataggcttaatgaaagaggtctttcttgctttggctgagagcagcctctttttaaagtgtgatgttttgcctttccacctaaagaccaggagagaatttgggcccttactgacctgtcctccttcagggacatgagcattccctatagattagggttcttcttatcctcctatacaaatttcttaaattgttaggatcaaagttgattatcacagtagttaaaaaataatttcatggcggggcgccatggctcatgcctgtaatcctagcactttgggaggccaaggtgggcagatcacctgaggtcaagagttcgagaccagcctgaccaacttggagaaatgccatctcaactgaaaatacaaaattagctg

SEQ ID NO: 337442 - DNA, 524 bp, Homo sapiens
gtggctcatcccctaatcccagcaccttgggaggctgaggcagatggatcacctgacatcaggagtttgagaccagcttggccaacaaagaaagacccccatctctacaaaaaatttaaaaattagccaggcatggtggtatacatgcctgtaataaccagctacttgggaggctgaggtgggaggattacgtgagccagggaggttgaggctgcagtgagctgtgattgcaccacttcattccagtctaggcaacggagtttgaccctgtctcaatataaatttttaagcaaaagtaaaaagtgccagttactgagtcaagaccatgaggcagaaacaaacttctgcctatcggtgaattcttgccttaatctgtagttagaaggtgttagtgatgattcccagttttgaattatttcttgggatggacatgttgcatatactagatcaaataaaacagtatatgtgtatatgtactacagctatatctatctacatagatatatacacacatatatactttt

SEQ ID NO: 337443 - DNA, 447 bp, Homo sapiens
tgatgttagatgtcatcgtatctattgttgtaattggtcctgatagcttccactggcttaaccaaagctcttttgtcttccaagctaacctgtgtgaaagcgacagtggtgcaggtcttcctgtggactagacattctagtcttgccttccccttgataatgcagtgagggatcctcattttatgacgcagggcaggcaggaagacgattagttcaatgggatccatgtcatgtgcagttaccatcagttgagccttcttattctccaccaaggtggtgatagtgttaatcctgctcaaagaacaggtagtctcttagtggacacatcccctttgccacagctttcttctcagcctgggccaacagcctcttctcttgctttgtctctggtctgtacttgtgggccagcttatgcagctgagtagctgtttggtggtccaaggcctg

SEQ ID NO: 337444 - DNA, 186 bp, Homo sapiens
ctttcagctaagctgtagacctctagcagatgaacgacatattttcctgaagggtgtgaagaggatactgacccaccagaaagagaccccactgctagaacgaataagatgtgctgaaagccggagcataacttggccattcccaagatttaacaacaaactaactacccatcattaacagtaaag

SEQ ID NO: 337445 - DNA, 885 bp, Homo sapiens
cctctctgtacagtacaaatgtatatacatgcaggtgtgtgtgacctcagagcacaggtgcacacacatttggttattactgactgggtcatagagcaactaaaatctttagccatcggtatttttcttcacaattaaaaaaacaaccaagataatgttaaagtctcttacaatcacaccttcaatcttctttttgtcaataatcgttctttcaacacatatacttcaagcactctgtatgtgtcaggcactcacacagcaagggcccactcatcaatcatcagttagctacaaacaccacaaattcagcctcaaatgctcatgcagcaggggtgaaggtggctcataaaaagcaaaggtgtagggaaagaagcagtacaggacaggggaatggttgagagtcaactcttagcaaggttgcttgaattctaatccccatctcctcacttactagctcactgaccttgggccagattcagaacttccctgtgcctcgttttcttcatctgtgaaatggaaaaaataacagtgccaaccttgcagggttgttctatgggttcaatgagataatataatgtcaagtgcttaaaacatgtctagaacacaacaaatgctatgccaagtgttaactacttcttagcattcagtgacccagctcactgcttggcacatcacaggagttcaaagaacattcattgaatgaatgttaaataagaaaaaacaaactgatctcattcctatgtactaggcacactaggaaattataaaaagtaaatgagctcatctccaatgagtcagtccaatgaaaagatgagaacaatggtccctgaaattattctgcttaattacttccttgtgattcaacatggaagtataaagcgttga

SEQ ID NO: 337446 - DNA, 845 bp, Homo sapiens
gttgtaagaggtgaaattgccaggtggcaaacccctccaaggtgtttcctcacactttctctgttaaaaacaccataagataccctgacaaggagactttcctggtgctcatgatggagaaagagcactgaagagagaagaaaagctacatcagtgatgaccacatgtgctgtgcggtgtacgtggtgtgtattttcattgaatcctcaagacagtcacagacccagaggagcagagcctggggaaagtttcccttagtctaaggttctacaaccatcatgggaacatgggttctgaagctgggtcttgctgcccaggcttagctctgctcttccctctcactaataccctgcctgatgccaggcctgggcatggggtgctatgcaccatcagtccacaggtgagccctgcaggtgtggagggagcacgggaaggtgtgggactgagctgtggacaacacaagggagaaagccttggaagctattatctgggaggttggcaattatggggtgataactggacaactgcaatataaagtggaataagaacccaggagaataagaacccaggaataagaacccaggagaagaagacaactaaggagagggtgctcgatgaaaacacagaagcccaggcccctctctcacaggcccatgcctggttagctctgacaccagctgaataggaagcacggcaagtttgagactctcttgcataaaccataagcctcagtgtcagggacatgtgctgtgaggacacatgagatgtcagtctgtacagggcagatagggaacaaggcatgttcatcaaacaagagctgcacctcccagccttctgcatggggt

SEQ ID NO: 337447 - DNA, 641 bp, Homo sapiens
gttctgtaggagatgaaaggttgtaagaggtgaaattgccaggtggcaaacccctccaaggtgtttcctcacactttctctgttaaaaacaccataagataccctgacaaggagactttcctggtgctcatgatggagaaagagcactgaagagagaagaaaagctacatcagtgatgaccacatgtgctgtgcggtgtacgtggtgtgtattttcattgaatcctcaagacagtcacagacccagaggagcagagcctggggaaagtttcccttagtctaaggttctacaaccatcatgggaacatgggttctgaagctgggtcttgctgcccaggcttagctctgctcttccctctcactaataccctgcctgatgccaggcctgggcatggggtgctatgcaccatcagtccacaggtgagccctgcaggtgtggagggagcacgggaaggtgtgggactgagctgtggacaacacaagggagaaagccttggaagctattatctgggaggttggcaattatggggtgataactggacaactgcaatataaagtggaataagaacccaggagaataagaacccaggaataagaacccaggagaagaagacaactaaggagagggtgctcgatgaaaac

SEQ ID NO: 337448 - DNA, 217 bp, Homo sapiens
tgcgtttccttgtttctttacctcattttattcttctagatcttttcttccctttcttcaatttttcattagatttttgtttcaatttgttcttgtttggtcctcttataatttcatttctgataagattttatctgtttcttctatttcttccctgagttaaatcagctcttcttttctgcatgcttttgtctagtgcgtgcgtgtgtgtttgtgt

SEQ ID NO: 337449 - DNA, 647 bp, Homo sapiens
ctgtcatgatcacttctagatccccagtgtctagaacagcacttgacatgcagtaggtatttaatagatataatgtcattcccctgtgaaaaacacctcaacagttccccatcgcctcttaggtaaattccaacctatttaacatgaattataaaacccattgtgatatggttcctgcctcaactggaaccactgttttcacactctcaatgctaagcctggaacattcttccatatcctttcctcctcatacttagctaacccttacttatgctttcaactctcgtcttaaatagtacttcagaaaggcttttttttaaatcattcaactaggtttactatgattaatctccttgccatattttcttatagtagtttgtcttttctctatcataaagtattaattttgtaattactcagtatgttggccctgacaaaatacatattccttgaaggcagtgactatgtctgatttgtataccattatatctctactatctaacacagtatttgacacatatggcatactcaaatacttatggaattcccaagtgaatcatgaaaattcacactcacacaaaaaggtgaattagacacttagatcacctttaaaatactaaagcatagtaattaagtactttgaatat

SEQ ID NO: 337450 - DNA, 343 bp, Homo sapiens
caccaacatctgcctctggggagacctcaggatgcttttacttatggaggaagatgaagcaggtgcaggcacttacacatggcaaaagcaggagcaagagagagaacgtgtgtcgggggaggtgccacacacttttaaatgagcagatctcacgtgaactcaagacgagagttcacttattaccaaggggatggcctaagccattcatggggggatctgcccccatgatccaaacacctcccaccaggccccatgtgaaacgttgggggttaccattcaacatgagatttaggtggggacaaatatgcaaactatatcaattagtaaatatgagatcatagca

SEQ ID NO: 337451 - DNA, 156 bp, Homo sapiens
atatcttttgagattctcagcttcctgtggagacaccatgtctcaaaagcatggagcagtgtacgcaaggaccttgtggaaatatgctctttagaaggagccacagatagatgctaccagcacatttctggaaagtgggtacagcacagattgcag

SEQ ID NO: 337452 - DNA, 214 bp, Homo sapiens
ttatacagatacgttatttgaacccaagtctttcaggctctagcctatgctagccacgagaaaactcaagtactgtgatagctgaggaacaggaaaacattgcataaaggaagtaagtgacttacagttttcttatgacacagaaggaacatgagaatatttagataagaaaaagccatagcatttatagcttgttcaggtctttgggaaaaag

SEQ ID NO: 337453 - DNA, 866 bp, Homo sapiens
aaaagaaaagaaaaaggaaatacacataagaatgtgtgaaactaaagaactatgattagtctaaattaacacaaaatgctaagggaacacaaaaattatgtctggagaagttgtaaatataagaggtggcagaaatacattccaaaaagagaagaaataagaaggcatggagtttggaaacggcaagatatgtgcatgaggtgatagagacaccacaatggataaagtaggacagaagcatggttttgattaggtagacttatggagccaggcagaaaaagaaaaatcttcaagcaaacaagtacaggttagatttgaatagacaaaaaaactgagtcactgccaggtaattctttgttgtggaggatgtcctgtacactgtaggatgtttagcagtatccttggcctctactgaatagatgccattagcaccacttcccaccaagtagtgacaagcaaaaatatctccagacattgtcacatgctcccttggaagacaaatccatcctcctcacccccatggagaaccacttacctagtccaactccctttatgagataaataaactgatttcctggtaagtcacataacttgctacagtcgcacagcctagtttgggttttgttacagctagaatataaactaagcccaaaagcactggtcacagtaggctctgtgatattcctacattataattagaatggctaacaacaattctttagaagttagatcaaaattatttttatatgcctaagatgaacactttactgcaatgtatcagctattgtttctgtgcctttaaagaatcaatctttaattaacaaaaacaacaacagaaattgagctactgagggagctcaaacagg

SEQ ID NO: 337454 - DNA, 356 bp, Homo sapiens
cgtgagccaccgtgcctggccccaccagactatcttaatcacagttacattctagcatattctgagaggtggtggagcacattttctcccattgttcttttacatagttttcttagattattctaatgggtactctcttctgtgtgagctcaataaatacattataaaggtctgttgaattagaaaagaaaaccccataggaatctggtgagaataacattgtgtttaaggattactccatgtagtaggttgaacagtgtcccccacccccagaagatatgaatgcccagaacatgtaacatgacttatttggaaaaaaagtctttgtagatataactaaattaaggatttttgag

SEQ ID NO: 337455 - DNA, 303 bp, Homo sapiens
tctgggtttttccaggcaagggtgacaaggaaaagggaataagagagttgaggattggcaagaaaaagactgaaatgatggaccatgcaatccaggctccaaaggcagacatgtcagttacgttgctaggacagaaactatgacttttcccttctttttcactaaatagaacccctgtataattatagaaccgctgtataataatcagtgtgtacctagttaaaagactacgtttttagttttccagacagctaggtacagccatgtctctgagctctggccggtgaaacaaaaggaaatgtg

SEQ ID NO: 337456 - DNA, 423 bp, Homo sapiens
ccactgcgcccagccggcatccttaagatttttaaaagttgtttgggaaaaacacgcctattctcattattgagactagagagaatgtttacccatggcttctcactgagggcagttagagatactgaaatcgaccttaatatccttaaagtaaatactatgagtttttcccaaggctgttttttcaaacattccttactgttagccaattgcacaatcccaaagcttcggtaaactacagaaacttacaaaagaggcccccagtaggacacagcataggtatccatctatttgctatagatgtgtaagaatggagaaaaactctccatcaatactgtgctttcagctgagctctgggacagggctggaacagttctgagtctgaggtaacagcagataacctttggccacttttatgcgtag

SEQ ID NO: 337457 - DNA, 837 bp, Homo sapiens
gctttattgattttaataaaaacaatactgtatcaaatactgaatacattttatgcatattataaaataaactccttgtcatctttctttcacaatatattccacaatgatccataaggattagccactatttttccaggaacatattaaaaccgtttatcagtgatattacatcttgcattgggaaaaagatcccagtgtaagtctgagacccatttgtcaagaaaaaaataagtgaaaaattggtaagtaaaataaattatagacaaacacatatatacactgatatattaatacacaatgaacaggataattcaagaagcatgtaagatacgtgtcttaatactttgttgaagccatgatttttatatacatacacagagtgttgaaatgattctggaggaaatgtgcatctatacaatattggcagaaatttactcatggagtcagaaaagaaatgatgagcaccagggaattcagatagtaaaaaatatcagattatctcacactaatactctcatattctagcaaagtggtgaattaacattggtgttctagcaagagtaaatatatatggatgactctgctagccatcagtttcctgaaaaataccataaatataaattagggctgcaaactatgttagaaaggaaaaatggaaatggattaataaaatgactgtcaggaattaaaactcctattctttgtgtctctgaggctagttctatgtagtgtaaaaataatccacttagactgatttctctatcttattccaaactgattgaagatatagttcatcttccacatgtcttcaagtagtaaactcactacgatgtg

SEQ ID NO: 337458 - DNA, 129 bp, Homo sapiens
ataatggactgttttctctcatggatgtaaatgcaaaaaactaattatattaacaaaccaaaactacacttgatcttagccaaaaggccaaaaagtaatgacaaacccaaactaaatccagtaattggt

SEQ ID NO: 337459 - DNA, 272 bp, Homo sapiens
attggagtctgcgtcgacaataaattggatattcagttattgaaaagagatagatgtataagtatttacagggaaaatggctaagatgtgttacaaattttaaaaaagcaagttgtgaagaatgagtgctaatttttatttgtttttaaagcgagatggtatcagatagtgttctttagtaagcataaaaaagtttctgataaaatatataagacagttttaatagttaacattgtttacctgtggattttgtaactaggaaaccaggaggc

SEQ ID NO: 337460 - DNA, 715 bp, Homo sapiens
attatgtaatgattttctttattaaaaaattctttgcctcctcgactcaccaggaactatcagaatgaattttccacatcagccacaagaatgaccttccggcatacaagacacttcttaccatgtaatgcaagggaaaaaaaagttcaggtacttcaataggatgttggaaaagaagacttccactctaataggatgaaaaaatgatcatttatttacatcattctgatttcttttaattgcttcacaatccactataaagaagattcgctctgaccctaaattttctactttttttcccacttttctctcacataaattaggtgtttcattctttttcctccttattattttatttacaccattctgtgttgagcacagaaaggtggaagtatatagccctgttctctgtttttaatgctctgtatatttttgtttccttttctgtggaatcagtttttcattatccttataaggagatgccatttttctcaatctttccttaaaatctaactaacttctttactaagtcatttctgttccttatagaatagtgaatgtgactgttcttagtgtattgactggtccctttacatcagcattgtaacttttaggtattagtttactttcatatgattgttatttcatatatcattgtgaacatatttttttccaaaaataaaatacatattgacctaaaagaaattgcatctaa

SEQ ID NO: 337461 - DNA, 756 bp, Homo sapiens
attatgtaatgattttctttattaaaaaattctttgcctcctcgactcaccaggaactatcagaatgaattttccacatcagccacaagaatgaccttccggcatacaagacacttcttaccatgtaatgcaagggaaaaaaaagttcaggtacttcaataggatgttggaaaagaagacttccactctaataggatgaaaaaatgatcatttatttacatcattctgatttcttttaattgcttcacaatccactataaagaagattcgctctgaccctaaattttctactttttttcccacttttctctcacataaattaggtgtttcattctttttcctccttattattttatttacaccattctgtgttgagcacagaaaggtggaagtatatagccctgttctctgtttttaatgctctgtatatttttgtttccttttctgtggaatcagtttttcattatccttataaggagatgccatttttctcaatctttccttaaaatctaactaacttctttactaagtcatttctgttccttatagaatagtgaatgtgactgttcttagtgtattgactggtccctttacatcagcattgtaacttttaggtattagtttactttcatatgattgttatttcatatatcattgtgaacatatttttttccaaaaataaaatacatattgacctaaaagaaattgcatctaaaccaacaacaaatggcctcccccggcccacccggcggacct

SEQ ID NO: 337462 - DNA, 826 bp, Homo sapiens
  misc_feature (56)..(56): n is a, c, g, or t
taaaaatacgcacacatccccctggccacgcaagacgattctcaccctctatactngcagtaactatcagaatgaattttccacatcagccacaagaatgaccttccggcatacaagacacttcttaccatgtaatgcaagggaaaaaaaagttcaggtacttcaataggatgttggaaaagaagacttccactctaataggatgaaaaaatgatcatttatttacatcattctgatttcttttaattgcttcacaatccactataaagaagattcgctctgaccctaaattttctactttttttcccacttttctctcacataaattaggtgtttcattctttttcctccttattattttatttacaccattctgtgttgagcacagaaaggtggaagtatatagccctgttctctgtttttaatgctctgtatatttttgtttccttttctgtggaatcagtttttcattatccttataaggagatgccatttttctcaatctttccttaaaatctaactaacttctttactaagtcatttctgttccttatagaatacccaatgctaactgttccttatcgtcacaacaataggctccttttacctctatccttcgtaactcttccacctctcatactacctctcatcctgatctcgtcatttcacatgtcactgcgcgaaacctctctccctcttcaaaaatcaataaatcatattcgacctcactagaactttctctctccactcaattcacaaccaatactcgtccatcatagtctttatatgtcgcgtacccttgcgactttcttctttccaccaatgt

SEQ ID NO: 337463 - DNA, 831 bp, Homo sapiens
tttctattttcttaatgctgaaacaattgatcttgatggaacaatcttgtttttatataaaatttcaagctggtgatgacatgtgtaaaaggaaaagtgctgcaagcagtaaatgctgttcagtttgcagtccattacatcaacatatctaaatgatcctctttagcccaaactatcagaatgaattttccacatcagccacaagaatgaccttccggcatacaagacacttcttaccatgtaatgcaagggaaaaaaaagttcaggtacttcaataggatgttggaaaagaagacttccactctaataggatgaaaaaatgatcatttatttacatcattctgatttcttttaattgcttcacaatccactataaagaagattcgctctgaccctaaattttctactttttttcccacttttctctcacataaattaggtgtttcattctttttcctccttattattttatttacaccattctgtgttgagcacagaaaggtggaagtatatagccctgttctctgtttttaatgctctgtatatttttgtttccttttctgtggaatcagtttttcattatccttataaggagatgccatttttctcaatctttccttaaaatctaactaacttctttactaagtcatttctgttccttatagaatagtgaatgtgactgttcttagtgtattgactggtccctttacatcagcattgtaacttttaggtattagtttactttcatatgattgttatttcatatatcattgtgaacatatttttttccaaaaataaaatacatattgacctaaaagaaattgcatctaa

SEQ ID NO: 337464 - DNA, 739 bp, Homo sapiens
acaccccctctccctacatccccacacatcccacccacgcgcgcgcccactttgataattacagcacgactttcttccaactatcagaatgaattttccacatcagccacaagaatgaccttccggcatacaagacacttcttaccatgtaatgcaagggaaaaaaaagttcaggtacttcaataggatgttggaaaagaagacttccactctaataggatgaaaaaatgatcatttatttacatcattctgatttcttttaattgcttcacaatccactataaagaagattcgctctgaccctaaattttctactttttttcccacttttctctcacataaattaggtgtttcattctttttcctccttattattttatttacaccattctgtgttgagcacagaaaggtggaagtatatagccctgttctctgtttttaatgctctgtatatttttgtttccttttctgtggaatcagtttttcattatccttataaggagatgccatttttctcaatctttccttaaaatctaactaacttctttactaagtcatttctgttccttatagaatagtgaatgtgactgttcttagtgtattgactggtccctttacatcagcattgtaacttttaggtattagtttactttcatatgattgttatttcatatatcattgtgaacatatttttttccaaaaataaaatacatattgacctaaaagaaattgcatctaa

SEQ ID NO: 337465 - DNA, 717 bp, Homo sapiens
gttctctgtgcgtaaatctccccttacttctatttcccccaaccactgagggtttaaactatcagaatgaattttccacatcagccacaagaatgaccttccggcatacaagacacttcttaccatgtaatgcaagggaaaaaaaagttcaggtacttcaataggatgttggaaaagaagacttccactctaataggatgaaaaaatgatcatttatttacatcattctgatttcttttaattgcttcacaatccactataaagaagattcgctctgaccctaaattttctactttttttcccacttttctctcacataaattaggtgtttcattctttttcctccttattattttatttacaccattctgtgttgagcacagaaaggtggaagtatatagccctgttctctgtttttaatgctctgtatatttttgtttccttttctgtggaatcagtttttcattatccttataaggagatgccatttttctcaatctttccttaaaatctaactaacttctttactaagtcatttctgttccttatagaatagtgaatgtgactgttcttagtgtattgactggtccctttacatcagcattgtaacttttaggtattagtttactttcatatgattgttatttcatatatcattgtgaacatatttttttccaaaaataaaatacatattgacctaaaagaaattgcatctaa

SEQ ID NO: 337466 - DNA, 722 bp, Homo sapiens
  misc_feature (56)..(56): n is a, c, g, or t
taaaaatacgcacacatccccctggccacgcaagacgattctcaccctctatactngcagtaactatcagaatgaattttccacatcagccacaagaatgaccttccggcatacaagacacttcttaccatgtaatgcaagggaaaaaaaagttcaggtacttcaataggatgttggaaaagaagacttccactctaataggatgaaaaaatgatcatttatttacatcattctgatttcttttaattgcttcacaatccactataaagaagattcgctctgaccctaaattttctactttttttcccacttttctctcacataaattaggtgtttcattctttttcctccttattattttatttacaccattctgtgttgagcacagaaaggtggaagtatatagccctgttctctgtttttaatgctctgtatatttttgtttccttttctgtggaatcagtttttcattatccttataaggagatgccatttttctcaatctttccttaaaatctaactaacttctttactaagtcatttctgttccttatagaatagtgaatgtgactgttcttagtgtattgactggtccctttacatcagcattgtaacttttaggtattagtttactttcatatgattgttatttcatatatcattgtgaacatatttttttccaaaaataaaatacatattgacctaaaagaaattgcatctaa

SEQ ID NO: 337467 - DNA, 728 bp, Homo sapiens
  misc_feature (46)..(46): n is a, c, g, or t
  misc_feature (52)..(52): n is a, c, g, or t
  misc_feature (67)..(67): n is a, c, g, or t
acctccaatatttactcacgcaacactgataattaccccccagcgngagagnccttgtacgatccgnaactatcagaatgaattttccacatcagccacaagaatgaccttccggcatacaagacacttcttaccatgtaatgcaagggaaaaaaaagttcaggtacttcaataggatgttggaaaagaagacttccactctaataggatgaaaaaatgatcatttatttacatcattctgatttcttttaattgcttcacaatccactataaagaagattcgctctgaccctaaattttctactttttttcccacttttctctcacataaattaggtgtttcattctttttcctccttattattttatttacaccattctgtgttgagcacagaaaggtggaagtatatagccctgttctctgtttttaatgctctgtatatttttgtttccttttctgtggaatcagtttttcattatccttataaggagatgccatttttctcaatctttccttaaaatctaactaacttctttactaagtcatttctgttccttatagaatagtgaatgtgactgttcttagtgtattgactggtccctttacatcagcattgtaacttttaggtattagtttactttcatatgattgttatttcatatatcattgtgaacatatttttttccaaaaataaaatacatattgacctaaaagaaattgcatctaa

SEQ ID NO: 337468 - DNA, 720 bp, Homo sapiens
gcctccctctactacagccacacaattatcatttttcaccaaaaaaaaaaaagcttgacaactatcagaatgaattttccacatcagccacaagaatgaccttccggcatacaagacacttcttaccatgtaatgcaagggaaaaaaaagttcaggtacttcaataggatgttggaaaagaagacttccactctaataggatgaaaaaatgatcatttatttacatcattctgatttcttttaattgcttcacaatccactataaagaagattcgctctgaccctaaattttctactttttttcccacttttctctcacataaattaggtgtttcattctttttcctccttattattttatttacaccattctgtgttgagcacagaaaggtggaagtatatagccctgttctctgtttttaatgctctgtatatttttgtttccttttctgtggaatcagtttttcattatccttataaggagatgccatttttctcaatctttccttaaaatctaactaacttctttactaagtcatttctgttccttatagaatagtgaatgtgactgttcttagtgtattgactggtccctttacatcagcattgtaacttttaggtattagtttactttcatatgattgttatttcatatatcattgtgaacatatttttttccaaaaataaaatacatattgacctaaaagaaattgcatctaa

SEQ ID NO: 337469 - DNA, 713 bp, Homo sapiens
attatccgcccgccatttacagaaaaccaaccggggctccatgactaccaggaactatcagaatgaattttccacatcagccacaagaatgaccttccggcatacaagacacttcttaccatgtaatgcaagggaaaaaaaagttcaggtacttcaataggatgttggaaaagaagacttccactctaataggatgaaaaaatgatcatttatttacatcattctgatttcttttaattgcttcacaatccactataaagaagattcgctctgaccctaaattttctactttttttcccacttttctctcacataaattaggtgtttcattctttttcctccttattattttatttacaccattctgtgttgagcacagaaaggtggaagtatatagccctgttctctgtttttaatgctctgtatatttttgtttccttttctgtggaatcagtttttcattatccttataaggagatgccatttttctcaatctttccttaaaatctaactaacttctttactaagtcatttctgttccttatagaatagtgaatgtgactgttcttagtgtattgactggtccctttacatcagcattgtaacttttaggtattagtttactttcatatgattgttatttcatatatcattgtgaacatatttttttccaaaaataaaatacatattgacctaaaagaaattgcatctaa

SEQ ID NO: 337470 - DNA, 715 bp, Homo sapiens
  misc_feature (41)..(41): n is a, c, g, or t
  misc_feature (43)..(43): n is a, c, g, or t
  misc_feature (54)..(54): n is a, c, g, or t
tggatacgccccacagatcaaaaaaggagggcgggccctcngngactacccacnaactatcagaatgaattttccacatcagccacaagaatgaccttccggcatacaagacacttcttaccatgtaatgcaagggaaaaaaaagttcaggtacttcaataggatgttggaaaagaagacttccactctaataggatgaaaaaatgatcatttatttacatcattctgatttcttttaattgcttcacaatccactataaagaagattcgctctgaccctaaattttctactttttttcccacttttctctcacataaattaggtgtttcattctttttcctccttattattttatttacaccattctgtgttgagcacagaaaggtggaagtatatagccctgttctctgtttttaatgctctgtatatttttgtttccttttctgtggaatcagtttttcattatccttataaggagatgccatttttctcaatctttccttaaaatctaactaacttctttactaagtcatttctgttccttatagaatagtgaatgtgactgttcttagtgtattgactggtccctttacatcagcattgtaacttttaggtattagtttactttcatatgattgttatttcatatatcattgtgaacatatttttttccaaaaataaaatacatattgacctaaaagaaattgcatctaa

SEQ ID NO: 337471 - DNA, 716 bp, Homo sapiens
attacgtatcttatccaccaaagagagagggagccctcctccaggactacacagcaactatcagaatgaattttccacatcagccacaagaatgaccttccggcatacaagacacttcttaccatgtaatgcaagggaaaaaaaagttcaggtacttcaataggatgttggaaaagaagacttccactctaataggatgaaaaaatgatcatttatttacatcattctgatttcttttaattgcttcacaatccactataaagaagattcgctctgaccctaaattttctactttttttcccacttttctctcacataaattaggtgtttcattctttttcctccttattattttatttacaccattctgtgttgagcacagaaaggtggaagtatatagccctgttctctgtttttaatgctctgtatatttttgtttccttttctgtggaatcagtttttcattatccttataaggagatgccatttttctcaatctttccttaaaatctaactaacttctttactaagtcatttctgttccttatagaatagtgaatgtgactgttcttagtgtattgactggtccctttacatcagcattgtaacttttaggtattagtttactttcatatgattgttatttcatatatcattgtgaacatatttttttccaaaaataaaatacatattgacctaaaagaaattgcatctaa

SEQ ID NO: 337472 - DNA, 735 bp, Homo sapiens
tttctattttcttaatgctgaaacaattgatcttgatggaacaatcttgtttttatataaaatttcaagctggtgatgacatgtgtaaaaggaaaagtgctgcaagcagtaaatgctgttcagtttgcagtccattacatcaacatatctaaatgatcctctttagcccagtacttcaataggatgttggaaaagaagacttccactctaataggatgaaaaaatgatcatttatttacatcattctgatttcttttaattgcttcacaatccactataaagaagattcgctctgaccctaaattttctactttttttcccacttttctctcacataaattaggtgtttcattctttttcctccttattattttatttacaccattctgtgttgagcacagaaaggtggaagtatatagccctgttctctgtttttaatgctctgtatatttttgtttccttttctgtggaatcagtttttcattatccttataaggagatgccatttttctcaatctttccttaaaatctaactaacttctttactaagtcatttctgttccttatagaatagtgaatgtgactgttcttagtgtattgactggtccctttacatcagcattgtaacttttaggtattagtttactttcatatgattgttatttcatatatcattgtgaacatatttttttccaaaaataaaatacatattgacctaaaagaaattgcatctaa

SEQ ID NO: 337473 - DNA, 926 bp, Homo sapiens
  misc_feature (742)..(742): n is a, c, g, or t
  misc_feature (745)..(745): n is a, c, g, or t
  misc_feature (747)..(747): n is a, c, g, or t
  misc_feature (752)..(752): n is a, c, g, or t
  misc_feature (868)..(868): n is a, c, g, or t
attatgtaatgattttctttattaaaaaattctttgcctcctcgactcaccaggaactatcagaatgaattttccacatcagccacaagaatgaccttccggcatacaagacacttcttaccatgtaatgcaagggaaaaaaaagttcaggtacttcaataggatgttggaaaagaagacttccactctaataggatgaaaaaatgatcatttatttacatcattctgatttcttttaattgcttcacaatccactataaagaagattcgctctgaccctaaattttctactttttttcccacttttctctcacataaattaggtgtttcattctttttcctccttattattttatttacaccattctgtgttgagcacagaaaggtggaagtatatagccctgttctctgtttttaatgctctgtatatttttgtttccttttctgtggaatcagtttttcattatccttataaggagatgccatttttctcaatctttccttaaaatctaactaacttctttactaagtcatttctgttccttatagaatagtgaatgtgactgttcttagtgtattgactggtccctttacatcagcattgtaacttttaggtattagtttactttcatatgattgttatttcatatatcattgtgaacatatttttttccaaaaataaaatacatattgacctaaaagaaattgcatctaaaaaaaacgggcctcgtttgcctaccgnggnantctgnggcgcttccctagtggggggaagttagatcctcctcactgacccctgccctggtccttccatgccccgagcggattccccctccacggcggctacgtcccccagactaacgtctcncgccgcatatctgcgcccacgcccccacccctaacctcaaaggccaccgcgcatttcc

SEQ ID NO: 337474 - DNA, 834 bp, Homo sapiens
  misc_feature (748)..(748): n is a, c, g, or t
  misc_feature (752)..(752): n is a, c, g, or t
  misc_feature (762)..(762): n is a, c, g, or t
  misc_feature (777)..(777): n is a, c, g, or t
  misc_feature (791)..(791): n is a, c, g, or t
  misc_feature (834)..(834): n is a, c, g, or t
attatgtaatgattttctttattaaaaaattctttgcctcctcgactcaccaggaactatcagaatgaattttccacatcagccacaagaatgaccttccggcatacaagacacttcttaccatgtaatgcaagggaaaaaaaagttcaggtacttcaataggatgttggaaaagaagacttccactctaataggatgaaaaaatgatcatttatttacatcattctgatttcttttaattgcttcacaatccactataaagaagattcgctctgaccctaaattttctactttttttcccacttttctctcacataaattaggtgtttcattctttttcctccttattattttatttacaccattctgtgttgagcacagaaaggtggaagtatatagccctgttctctgtttttaatgctctgtatatttttgtttccttttctgtggaatcagtttttcattatccttataaggagatgccatttttctcaatctttccttaaaatctaactaacttctttactaagtcatttctgttccttatagaatagtgaatgtgactgttcttagtgtattgactggtccctttacatcagcattgtaacttttaggtattagtttactttcatatgattgttatttcatatatcattgtgaacatatttttttccaaaaataaaatacatattgacctaaaagaaattgcatctaaaaaaaaaaaaaaagggcctccgtggcctcagcngggngagttctggnggccccttccctttngggaggggtaattnatgacccctggttactgacctcgttgcgctccgagcgtccgan

SEQ ID NO: 337475 - DNA, 639 bp, Homo sapiens
  misc_feature (71)..(71): n is a, c, g, or t
tcacccaacccccccgcgctcaccacaacagaatcccgccacccatatcaacccttgaggtccttaccctnagggtacttcaataggatgttggaaaagaagacttccactctaataggatgaaaaaatgatcatttatttacatcattctgatttcttttaattgcttcacaatccactataaagaagattcgctctgaccctaaattttctactttttttcccacttttctctcacataaattaggtgtttcattctttttcctccttattattttatttacaccattctgtgttgagcacagaaaggtggaagtatatagccctgttctctgtttttaatgctctgtatatttttgtttccttttctgtggaatcagtttttcattatccttataaggagatgccatttttctcaatctttccttaaaatctaactaacttctttactaagtcatttctgttccttatagaatagtgaatgtgactgttcttagtgtattgactggtccctttacatcagcattgtaacttttaggtattagtttactttcatatgattgttatttcatatatcattgtgaacatatttttttccaaaaataaaatacatattgacctaaaagaaattgcatctaa

SEQ ID NO: 337476 - DNA, 510 bp, Homo sapiens
actccacaacaccaccttaaaacaaattttgagtgattccacctggaaaccttactacctcaaaagtattacattttgggaacactaatgctaggctcaggctgcccttcttctagacagtgtgtgtgaaatgatcagcatagctcaacacaggttttccagtacagtcaatgggtaaataaaaggagtcccagttgcagcagcaaaatcattcagatgggaaggcatccagtgatctaaaaggactggaagattcttttaaggactggaaattattattataagctgctcaagtaaagcagcttctaacaacctacacggaaggtaggcagtgtttctaagtggatgaattcattgccataagcatttcacctcaacgtgtgacctaaggagggatcaccttggtgtctagacccttgtttgttctcagatatttccattcatgcattcattgatagagatttgtagtaagaaagccattaactctctcccaaccacttaaaaatagca

SEQ ID NO: 337477 - DNA, 219 bp, Homo sapiens
tgctgcgggttgggtcatttgaggaaacatccagagaatcacagattctcaagcatttggtcaacacatatttactgagtatctgcattatgtcaggcactcttctaagcactgagggtatggcagtgtagccaactgacaaagttccatgccctcatgaagctttcattctagtccaagcacagacactaagcagcatagtaaaaacatgtgtcaggt

SEQ ID NO: 337478 - DNA, 588 bp, Homo sapiens
ggggagcagtttgtatccacagctatgaccccatctgtgaattactgagcacctattctgggccatgcaccagaacacaaagatgaataagacttggtccctgtgttcacagagctcacagccaggtggagagagagccttgtcaatacagtgtatgttatgctatgatgcagagaacacagggcttcttgcaggggaggctgtggtgaaggggagagctactgggagagccctgggggcgggcatgcctgatctgagtcttaaaggggatggacagacgttcaccagttagaagagtagcccaaaaagaagcaaaataggcaacggcacagaggcatgtgaacctagtgctgccatcttggatgcatgcgggagaagagaaaggggaggctgaggaacaagcagaaccaggcctagaagggcaggctttgagcgtaacatcccaggcttagcctcatgcctggagctgcgaggaaggtcaaagagcaagtgagagccaggactcagatttaactcttaagtggcttcaagtctatatgctcagaacggtgcccggcaggtagtgagcactcagcgctgggtattccg

SEQ ID NO: 337479 - DNA, 490 bp, Homo sapiens
cccattacttatatataaaaaatggcaattacaaaagtctatttcactcactcttgaaatacagatacaatccttcattgcttaataaaataataaaagaagttttaagaaagtgaagctatctgagaaactttcatgagaaaattaataattaaattctgaaattgaaatataaatcctaaatcgtaggaatattaagattataaatcttcacactagaatctctacattgaactacagccaaggtcacaatcatgagtttttcccccttctttttaaaataaaacaagaactatgtcattttctataaaaatttaaaccatatttcttcttgccatttgaaactgaaattcatttccttatgaatatttcaataccattctcctacaagcaagaacaatctatcagagaacaattttctaattgttttacaagcttacaaagcacataatgtcacaaagtaaaggtcctgggtgaaagaagagaaggt

SEQ ID NO: 337480 - DNA, 692 bp, Homo sapiens
cccctctttcatgtatttattttattttatgtactggtccttgttctgtctataaatatgcttaagctaaatgaacatttcctgaccctgctactcttccaacactattgaccacgcttctctaatatttgctcccttgggttctgtgacaccacttctctgtgtactcctatttcttccctggtttgtctttttcccttcccatataacctaggcagcattccttggtactctgtccctcgctagtctctctctctccctccctctctctctctctcctgacaacctcatactctctcaaaacttcagttacattcaacatgataattagcatcttttatgcttatatgctgctttaaaatttacaaagcattttttcatatattgtctcacttaattgtcataacaaccctgcaagtgagtagagcaggcattcactaatatgacccttgtcttacagatgaggaatcaagatcagagagttcagaagttcaaggtctcataactagaaagtgtcagaaccagaataagggccgggcatggtggctcatcctagcactttaggaggccgaggcgggcagactgcctgatctcaggagttggagacctagcccgggcaacataggaagaccttgtctctacagaatattaaaaaattagccgagactgtgtgactgcatgcttgtaattcc

SEQ ID NO: 337481 - DNA, 4766 bp, Homo sapiens
  misc_feature (2888)..(2888): n is a, c, g, or t
gcctggttaaccggagaaagctcctggtaaagaagaatccataacagaggcaaaacatactggccagttttcgcccactgctgaggtcctgagggcagccacagcctctgagccaaggggagttcagtgtccataagccttggaggcttgcttgcacaagaaccgctttgcactgcaattttggggtaggcaggagcttgtcggttgggtcaagaatgaacctacgcatgacggcgtgctgatcctgggtttctagtcatcctttttaagctgcaaagaagcatttgcagacgttgtctcatgggtaccgcttgccaactttggaggatgtgaagccggtagagaaataaagcatcgcccctctgcgcgcccctccccgtctgctagaatgtttctcatgaacgcttctccagtggttgctctccagtccaaatgggaggcctttggcccgccagggagctgtaggttccccaggtgcttctcggaggctgacgagggcgtggagagcgcgtcggtgagcgcccgggtgcagatgcttatcagcactctgcagcgcgacggggctgctcggggcaccagcgatgagcgcgccgcacagaggggccacagggcagagggatgccacgacgccaggccggctgccaagcccaccgtgcacaaggagccacccgcgttggctgtctgtggtctcgttgctgactttgaccccatgggggaggaggaaactacagactttggcccgttggtgctagattcagacagtgatgattccgtggacagggacattgaggaggccatccaggagtacctgaaggcaaagagtggagccgcacagcccggggccggcggggcccagccaggtgcagcccagccttccagggccgcaggcggaggcagtagatgtaagccggaaccggctcacggcagtgccccgactgccctgtgtcccccaaaacttgtacctggatcaggtggtggccccggcagccaggtgggatccagcaaggaccagggctccgcctccccggtcagtgtgagcagcgatgactccttcgagcagagcatcagggcggaaatagaacagtttctgaatgagaagagacagcatgagacccaaaaatgtgatgggtcagtggagaagaaaccagacacaaatgaaaattccgccaagtcactcttgaaatcccaccaagagccgcctacaaaggtggtgcatcggcagggcctgctgggcgtccagaaggagtttgccttccgcaaacctccccggttagcgaagatgaacgtccagcccagaagcctcaggtccaaggtcacaaccacgcaggagaacgagggcagcacgaagccggcaaccccctgccgcccttcagaagcagcacagaataaaggtgggatcaaaaggagcgccagcgctgcaaggaggggaaagcgagtcatgagtgcggcacaggcgtccgaggcgtccgactccagcagcgacgatggcattgaggaggccatccagctgtaccagctgcagaaaacacgcaaggaggccgacggggacctgccccagagggtccaactccgagaggagagagcgcctgaccctcccgcacacagcacaagcagtgccacaaaaagtgccttgcccgagacccacaggaaaacacccagcaagaagaagctagtggccaccaagaccatggaccctggtccagggggcctggacactgaccatgcccccaagctcctgaaggaaaccaaagctccacctccagcgagccctgcttccaggagtgagtttgtggaacggtcctcgtgccgggcggacacatctgctgagctgatgtgtgcagaagcaatcctggacatctccaagacgatcctgccggcccctgtagagggcagtgacgggtccctgtccgcaagcccactcttctactccccgaacgtgccttcccgctctgacggcgacagtagctccgtggacagcgatgacagcatcgagcaggaaatccggacatttttggccctaaaggcgcagtcagggagtttgctggccagaggtgagagctgcccgcaggctgcccagggtccacttttgccgcctggcctcaacagccagaccggcggccacaagacccctctctctaaaacaccagacccactgctgggctgcaaaaggaagcgtagaggtggtggccatgtgaggccatccacgcccaagaaaatgcaggaggtggtgaaagacggtagccaggatgccgaccacagccaggggagagctgagcccggccatgagaggcgagacctgcccatccagggcaaagccagtgaggccctgggaggggagggcaccgccaggggccctggcgacactcgcatgtcacagggccagggtaagacagacgaggcaaggcgcctagacgagaaagagagctctgaagacaaaagcagctccctggacagtgacgaggacctggacacagccatcaaggacttgttaaggtccaagcgaaagctcaagaagaggtgcagggagcccagggctgcgtgcaggaagaaggtcaggttcagcacagcccagacgcacttcttggagcagctgggcgggctccggagagactggaaagacaggggcccgccagtgctgaagagctgcctctccaagtccaagagagacagtggcgagggtcctgggaagaaaccccccagtgtctttggcagcacggcagagaggatgaggcaggagggtgccgcgagccaggacgcggccctggccttccgggtgaggagacccgcctccgcctctgcctccgaagggaatccattccccagggagtcccagggcccagctcccagccccggctccctgtctgatgacagcagttcagtggacagcnacgacagcatcgaactggagattaggaagtttttggcggaaaaggccaaggagtcagtgagcagttcagaagttcaggcagagggccccaccgctcttgggacagggggcccagccaggccagaggtgctgtgcaggaaggagccggccccaccgcctggcgtgtgcacacgcagccagagggccaggggggtcccacatctggccgaagggcttcgaggcacagagagcgcaggagcacagggcacagctggtctgttcagccagggcgggaaggggctccctgctgctcctgcccgaggggatccggtgccgcccaggagcaccagcggcggtgtctccgccaaggggctctcagtgagcaggagaaatgtttacgttcacaaagaccagagcccacgaggggctgagcctgctgccaaaagtgcttttggtcagctgcccagctgtgccacagcgggcaccgaggcaggaggcgccagaggaacctttcacatgggctgcgggagcccgagcttcctgacccccagcccgggagcggagagggacgctggagcccaggccgaccgcacaccgccctggagcgacttcgcccaccagagtcggctgcccagcccgtgggtgctgcgctccgaaggcagagatgcagtgtggagggggggcgtcgggagcgagagagacaaggggtccgagggccccgcccggggcctgcccagcctgccccttgcgggcttctcgccgctgctgtccacccagctcttccactttggaaagggtgtctcctgggggggcaggcaggctggcctcttcagcccccacctggggctgcctctgcagggcccctccttctcggccttcagggaggcccaggccggacccagccctgtctttggaagcccacacttgctggcaaagaaggacggcggcccctggccaaccaggaaggcacaggcagggctgagtttgcatgacaggaggagctcgggctcggaggaaagcattttagacctgaggtatcgacgaagggtcaacagggatgaccaggagcaggacgccttgggcagtgacgccagtgacttcagcgacacctccacggaggacagtggcggcagctcagtagtgaaggtctaagccctcgagctgtgggttcgcgtcctgggttgcgtgcattcgtggaaagcggcgtagccgtgcgtgtgtgtgatggttccgtggctgcaaggaagggaaacagtctattatacatagccctgtatatatgtacaccaacatgaaacttttatttaacagacgtgtcctggtaaatatgatttttgtagctttttgtaaattatttaaagtgatgtaaaagatatttttggaaaatactgttgttcaattttgtagggtgttcctaactgcagttttctgtgttctgcatacaagtcttagcttaggaaacatttggttcttaccatcacagccaggttcacagaggctctgatgctttttggttgattgctggtgagaatggccggcggtggctgcagtggtagcctgaggaaggccaagctgccctccctgggaatcactcagatgccccaagatgtccgttgggaagctcccaggacagcactttttatacagaggacaccgcctcggccccacgtccttagaggccagagcacatctgaaaactgcaatcacagccgtccgctggaaaaacgtttcgaagcacagtggccagcgagcgagcacgtggctactccctgttgcatgtcaaatccacacagatgtcagcggcagctgctcggcagcccagccctgggcctgggtgggttcatgtccaatcttgttcgatcactagatgattctaacatcgaaataaacctctttttat

SEQ ID NO: 337482 - DNA, 4927 bp, Homo sapiens
  misc_feature (3049)..(3049): n is a, c, g, or t
gcgcggcccgggcgcggggcggcggcagcggcggcgcgcggggaggcggggaggcggggggcccggccggacgcccctgcgccccctccccgcgccccggccgagggcggagcgcgctggccctgcagcctccggcccgcccccggcccgccgcctcccccgggacgtgggacgcgggcgcaggcggggtccgcgcggcgggcggcgggggacgggcggagtcaaaagtctattgaaaaagcagagagagaatgcctcggtgtgtaagtggagtgatgaggacctgatctctgggccgtgtgggaacactggctgccatttcatcacagtcaacctggactcacagaatttcaagagcttgtcggttgggtcaagaatgaacctacgcatgacggcgtgctgatcctgggtttctagtcatcctttttaagctgcaaagaagcatttgcagacgttgtctcatgggtaccgcttgccaactttggaggatgtgaagccggtagagaaataaagcatcgcccctctgcgcgcccctccccgtctgctagaatgtttctcatgaacgcttctccagtggttgctctccagtccaaatgggaggcctttggcccgccagggagctgtaggttccccaggtgcttctcggaggctgacgagggcgtggagagcgcgtcggtgagcgcccgggtgcagatgcttatcagcactctgcagcgcgacggggctgctcggggcaccagcgatgagcgcgccgcacagaggggccacagggcagagggatgccacgacgccaggccggctgccaagcccaccgtgcacaaggagccacccgcgttggctgtctgtggtctcgttgctgactttgaccccatgggggaggaggaaactacagactttggcccgttggtgctagattcagacagtgatgattccgtggacagggacattgaggaggccatccaggagtacctgaaggcaaagagtggagccgcacagcccggggccggcggggcccagccaggtgcagcccagccttccagggccgcaggcggaggcagtagatgtaagccggaaccggctcacggcagtgccccgactgccctgtgtcccccaaaacttgtacctggatcaggtggtggccccggcagccaggtgggatccagcaaggaccagggctccgcctccccggtcagtgtgagcagcgatgactccttcgagcagagcatcagggcggaaatagaacagtttctgaatgagaagagacagcatgagacccaaaaatgtgatgggtcagtggagaagaaaccagacacaaatgaaaattccgccaagtcactcttgaaatcccaccaagagccgcctacaaaggtggtgcatcggcagggcctgctgggcgtccagaaggagtttgccttccgcaaacctccccggttagcgaagatgaacgtccagcccagaagcctcaggtccaaggtcacaaccacgcaggagaacgagggcagcacgaagccggcaaccccctgccgcccttcagaagcagcacagaataaaggtgggatcaaaaggagcgccagcgctgcaaggaggggaaagcgagtcatgagtgcggcacaggcgtccgaggcgtccgactccagcagcgacgatggcattgaggaggccatccagctgtaccagctgcagaaaacacgcaaggaggccgacggggacctgccccagagggtccaactccgagaggagagagcgcctgaccctcccgcacacagcacaagcagtgccacaaaaagtgccttgcccgagacccacaggaaaacacccagcaagaagaagctagtggccaccaagaccatggaccctggtccagggggcctggacactgaccatgcccccaagctcctgaaggaaaccaaagctccacctccagcgagccctgcttccaggagtgagtttgtggaacggtcctcgtgccgggcggacacatctgctgagctgatgtgtgcagaagcaatcctggacatctccaagacgatcctgccggcccctgtagagggcagtgacgggtccctgtccgcaagcccactcttctactccccgaacgtgccttcccgctctgacggcgacagtagctccgtggacagcgatgacagcatcgagcaggaaatccggacatttttggccctaaaggcgcagtcagggagtttgctggccagaggtgagagctgcccgcaggctgcccagggtccacttttgccgcctggcctcaacagccagaccggcggccacaagacccctctctctaaaacaccagacccactgctgggctgcaaaaggaagcgtagaggtggtggccatgtgaggccatccacgcccaagaaaatgcaggaggtggtgaaagacggtagccaggatgccgaccacagccaggggagagctgagcccggccatgagaggcgagacctgcccatccagggcaaagccagtgaggccctgggaggggagggcaccgccaggggccctggcgacactcgcatgtcacagggccagggtaagacagacgaggcaaggcgcctagacgagaaagagagctctgaagacaaaagcagctccctggacagtgacgaggacctggacacagccatcaaggacttgttaaggtccaagcgaaagctcaagaagaggtgcagggagcccagggctgcgtgcaggaagaaggtcaggttcagcacagcccagacgcacttcttggagcagctgggcgggctccggagagactggaaagacaggggcccgccagtgctgaagagctgcctctccaagtccaagagagacagtggcgagggtcctgggaagaaaccccccagtgtctttggcagcacggcagagaggatgaggcaggagggtgccgcgagccaggacgcggccctggccttccgggtgaggagacccgcctccgcctctgcctccgaagggaatccattccccagggagtcccagggcccagctcccagccccggctccctgtctgatgacagcagttcagtggacagcnacgacagcatcgaactggagattaggaagtttttggcggaaaaggccaaggagtcagtgagcagttcagaagttcaggcagagggccccaccgctcttgggacagggggcccagccaggccagaggtgctgtgcaggaaggagccggccccaccgcctggcgtgtgcacacgcagccagagggccaggggggtcccacatctggccgaagggcttcgaggcacagagagcgcaggagcacagggcacagctggtctgttcagccagggcgggaaggggctccctgctgctcctgcccgaggggatccggtgccgcccaggagcaccagcggcggtgtctccgccaaggggctctcagtgagcaggagaaatgtttacgttcacaaagaccagagcccacgaggggctgagcctgctgccaaaagtgcttttggtcagctgcccagctgtgccacagcgggcaccgaggcaggaggcgccagaggaacctttcacatgggctgcgggagcccgagcttcctgacccccagcccgggagcggagagggacgctggagcccaggccgaccgcacaccgccctggagcgacttcgcccaccagagtcggctgcccagcccgtgggtgctgcgctccgaaggcagagatgcagtgtggagggggggcgtcgggagcgagagagacaaggggtccgagggccccgcccggggcctgcccagcctgccccttgcgggcttctcgccgctgctgtccacccagctcttccactttggaaagggtgtctcctgggggggcaggcaggctggcctcttcagcccccacctggggctgcctctgcagggcccctccttctcggccttcagggaggcccaggccggacccagccctgtctttggaagcccacacttgctggcaaagaaggacggcggcccctggccaaccaggaaggcacaggcagggctgagtttgcatgacaggaggagctcgggctcggaggaaagcattttagacctgaggtatcgacgaagggtcaacagggatgaccaggagcaggacgccttgggcagtgacgccagtgacttcagcgacacctccacggaggacagtggcggcagctcagtagtgaaggtctaagccctcgagctgtgggttcgcgtcctgggttgcgtgcattcgtggaaagcggcgtagccgtgcgtgtgtgtgatggttccgtggctgcaaggaagggaaacagtctattatacatagccctgtatatatgtacaccaacatgaaacttttatttaacagacgtgtcctggtaaatatgatttttgtagctttttgtaaattatttaaagtgatgtaaaagatatttttggaaaatactgttgttcaattttgtagggtgttcctaactgcagttttctgtgttctgcatacaagtcttagcttaggaaacatttggttcttaccatcacagccaggttcacagaggctctgatgctttttggttgattgctggtgagaatggccggcggtggctgcagtggtagcctgaggaaggccaagctgccctccctgggaatcactcagatgccccaagatgtccgttgggaagctcccaggacagcactttttatacagaggacaccgcctcggccccacgtccttagaggccagagcacatctgaaaactgcaatcacagccgtccgctggaaaaacgtttcgaagcacagtggccagcgagcgagcacgtggctactccctgttgcatgtcaaatccacacagatgtcagcggcagctgctcggcagcccagccctgggcctgggtgggttcatgtccaatcttgttcgatcactagatgattctaacatcgaaataaacctctttttat

SEQ ID NO: 337483 - DNA, 423 bp, Homo sapiens
acacacacacacacacacacacacacacacacacacatatatacagcctctgcctctaaccagatcctctgggtctctgctctgtgggccatatggaatccacaccggtcatttctctgtgtattctctcacctccaaggatatgggtggagggcctttaaatctccttatgaaggaaggatcccttcctattggagtcagggctgtacatgaaggcccccagttcctccatgctagacacatccccagaagcagcacctaatgggcaacactgcggaatcattttccacccagatcaggggcatcccacggacacttattccagaaaactgaagctgggccacaaagaaggctctcatccttgctgctatttgccctggaccacttcaaaatgtgacacatcgggctgcagtgagctgagat

SEQ ID NO: 337484 - DNA, 345 bp, Homo sapiens
gatagtgtgatgcaagacagaactcagcctctttcttctttcctcttgaaatcagcttctcctcctgtttcttttaaaaggtcccttgccctctggctcccctaggtttgcatacctagtgttgtttctggcctcttcctggaatcatggatgccaaatcctgttaattctgttctcagtgcacctcacttgttctcatctctcctctaacctctgcttcaccttgactcctgtatctcaggctttccgtacttcactcattcgtcacaacattgagtcctactctgtgccaggcaacttgaaataaaggcaagacagggaaaggaggctaaatctgaactcatc

SEQ ID NO: 337485 - DNA, 638 bp, Homo sapiens
gtggcttgtcctaggatacctagcacagagaactctgtcccccaatttcttagttgcccccacccattccttcctcacatcagcatgggcaaggccagctgtggtttgggtcactgttcaggctgtacttttaggatcctcccaaatagcaaacaactatgtgactatcaggtctttatttcatgggttataggagatagggtcagtaagcctaatgtgtaacagtttcagtggttattacagagttccattgaattgcaacaactccctttaaaagcacaaactcccaccaagaaaatctcagtttcttcattaatcctaagagctttcctatctaggtatcactcaaaattcctactattctgggggcaatgggatcagagggtgttgcagagaaaaatccagagaaagtgaaaagtctacttccttggcagtgctggtgaagcatacccttacacagacgcttccccatgggaacaagtgccaggaactgcttcaggcttacgggggaaaacagtggctaagaagagagaggaggccgggcacggtgactcatgcctgtaatcccagcactttgggagactgaggcaggcagatcacctgaggtcaggagttcaagaccagcctggccaacatgg

SEQ ID NO: 337486 - DNA, 247 bp, Homo sapiens
atttctggtgaggagagaaaaccttaatcccagagataaagcacagagtggggggtggttgaagtcagccctgctagcaaggaaggctgtgccgaggtacaaagtcgattcaaagaagtcacttgcatttgctcccagttaaccaaaacctctctaatgttagaagtcactggcctgagcctgtggggttcatcctctgtccctagctcccctactcctgccacctcagctgtccccgcctcccatc

SEQ ID NO: 337487 - DNA, 206 bp, Homo sapiens
aacattgcaaaaggtccctgggctccttcagaccagtatttcacatacattttaaacccatgatttcaagaactcattttcccccttttagaggttttgataccacgtagacctactcacagtgagtacagggagaggcaagttccaaggtacagcttttatcatttttcccttattttccaaacatgaaattatgttacataatt

SEQ ID NO: 337488 - DNA, 373 bp, Homo sapiens
ccatgttgtgcccacagcacaggggcaggtatgaaatgccattctcattagagcttggatttgtggtcactatgtcaatccctggttctggtccggaccctgctgctaataagcacatgaatcccttccccactctgggcttcattgttcccattctatgaaacaatcacataatatatggccccttccagctctgattatctgggccaggtaggaggtagactcagaggtaggcaccagccactgggatggggcaatggggagccatgggagattcttgagcacaggggtgtctgatgaaagggtgctgcagggatatgaacagtggggtggaatgaagagccaagaggtggggacagactttagagcatca

SEQ ID NO: 337489 - DNA, 637 bp, Homo sapiens
cgcccacctcaaaagaagaaaccaagaccacctcctgttctgagactggaagagacatcatcagcctctctagacttgccgaagagagaaaaagaacagcaggaagcaactgaacatattgatgaagtacaaaatgaaatagacaggcttaatgaactaagggaggagattctgaaagcagaacagaaaataaactctgtcagccactttttcagaagaggtgagaattgatcgccaaagttccaagttttggggttacaacgtttgtcaaccatcctcaagtgtctgcactgcttagggaggaggacaaagacgcactgcattatctgaccaaagttgaagtgacagaatttgaagatactaagtcaggttacagaatagacttttattttgatgaaaatccttcctttaaaaataaagttatcttcaacgaatttcatttgaatgagagtggtattccatcttcaaagtccactgaaatcaaatggaaagctggaaaggatgcgatgaaacattcaagtcaaacacagaataaagccagcaggaagaggcagcatgaggcaccagagagcttctttatctggtttactgaccattctgatgcaggtgcttccgggatcctctagaacaccgccaa

SEQ ID NO: 337490 - DNA, 273 bp, Homo sapiens
ccccactgatggcatgcaactcaaaatctggctgcaccatttcaaaagaataccttacttctccatttggcccaaagtctttatctacagcacttactttgcccacaaacgacccagccctctgctcttcttcgaagtaaaatgtgtaattggtactgttaaaaagaggtctgttatcatttacatcttctaaaattacagtaacattcacagtagcactaaggggttccactgctctgtcagaagcaacaaccattaaaacatatctgtctt

SEQ ID NO: 337491 - DNA, 537 bp, Homo sapiens
tgcatccacttcccagaggaagagccactacagacgttaagcagcttaaagacttacgtgacagacttttagacagcctatgagcttaaatactgcttccatagcaaactctctgtcttccttgtatattttcttttttaaaggtttgttgtgacttttattcccaatatccaaggaagctgtaataattatgttaagattcaaggtatactttcttatgatataatcaattgtctgtccttggagattcattgtttcattctatatgactgtagcatttaaagaagttaatatgaataaaagactaatctgcatacacatctatacatttatagcctgcatacagggcctagcacagagcaggacttcactaagtgttcatttggcttctctatcaaatgtagaacacaggagggctcaagagatactattattggcttaagttattctctgggtagaaagtactaggccaccttttcttcacttttccagtcagtgcttgatctttcagtggcaagaggaagtcttgagttaata

SEQ ID NO: 337492 - DNA, 145 bp, Homo sapiens
aaaatattgaaatataaaatttattcaaaagcaaaataacagcttctatgaagtatgagctacatataataagtaaacagcacagtaccaaaaattccattttttcaacacatcagtatcttctttgaattacacattttctccc

SEQ ID NO: 337493 - DNA, 208 bp, Homo sapiens
ttatacataatcacaaccttttgaaaaactatatatataacttttcaaaaaattgttatacttgtttcatttttaccttcacaactattttcccaattaggtaaaggattattgttttcattatacgactctacagaaaggacattgaactcattaacatagcagactccaaattatgtggttaaaataaagctaatataaccaggga

SEQ ID NO: 337494 - DNA, 456 bp, Homo sapiens
cctggagtgggttgtacttatatacttcaaaatggaattaccagattgtaaaatatgcacatattcagcctcactagatactgtgaagtgctcttctaagcctttgtgtcagtttgtacttctgccagcaatgtggaaatgagatttggttttaatatgtattccctggtcacgagtgagcctcagcatcttttcatatgtccaccaagtgtttgggtttaatctgtgaattgcctttttgtgttctttgctttttttttttttttttttatttctttgattgttttggtggttgttatggtaaaatgcacaagcacgaggttgtatttaccatcttaactctttctgtgtgtatagtgcagtggcattaagcactttcagaatgtgctaccgtgctaccatcccaccatccatctcccgaactctcttcatcttgccaaactgaaacatcccacc

SEQ ID NO: 337495 - DNA, 134 bp, Homo sapiens
ggaaagccccattgcagccgcaaccctgtccttgtcagaggaattggcaggtattgccgatctgccatgtattccagaaaggccatgtacaagaggaagtactcagccgctaaatctaaggttgaaaagaaaaa

SEQ ID NO: 337496 - DNA, 228 bp, Homo sapiens
agctgctgagtggtgcttcctgacaaggtctacatagctgagacccaggcgcgagcgacaatcaccctgccctgcaaatccatagaaccctgaactggtgggaggacaccagcttgtgaactaggaaaaggttgggtgcccatgggtcatggctggactgcccactctgcagcaagaaaccaggatgcaagcaacaggtggagataggcaccagcagaacaggcatcc

SEQ ID NO: 337497 - DNA, 134 bp, Homo sapiens
ctgggcaaagcaaaatgaaaagcaatttaaaagacaagaaaaattaacattctgatcatctctttaagaactgtatctgaaaatattttgccttaagaactctgtttaataccagtgctgaactctccctaact

SEQ ID NO: 337498 - DNA, 233 bp, Homo sapiens
ccagaaatatcacatgcagccccacaacctatagattgtccattcctgctgtctgtgctttttttcaggatgaggagagttttggaggtagaagaagatgaagtggtcagaggatgggactcaggaggggacagggtaataaatatggtatgaaagttgctgcatttaaagagcttagggccgggcgccatggctcacgcctgtaatcctagcacttttggaggccaaggtgt

SEQ ID NO: 337499 - DNA, 748 bp, Homo sapiens
ttttttttttcacttaatgttgtttttgtttaacttttgacattcatatgatcatatatacagtgttattccttagtcttaaaattatagacaacttgtaaagaattcaagaggatgatttatgtctggggactcttcgtgtcacgtatcttggtggcttaatatagaagagtcaaagtaacatgggcttttatgattggtttgataggataccatgacaatcatattgtaattcggtggttctgggctgcagtggaaagattcaacaatgaacaacgactaaggttgttacaggtgagatgccattatttaatcttttaaatgtatcaatatgattattgttggaagtgtatgtttttaataactgctaactattctccataaacacataccatgtgtatctggaaatatgagatacaccatttccagactcctgattgcatggttatgtgactccatggctattcagaacttccctaagccaaattaaagcatttcatgagagtttagggaagtgtcaagtccagtccaagaatcccagtaacaacatctgccttcaggacagcttggacccttcagcaagaaggacccagggtacccaaagtgcaggccggcatccctagcagcagaaagaaatgattttaagttctttaaaaagggatgcagttagttgacagtcctttcttctctttcatctaactttccacaaatttgagaaaacagtgacatttcaagaacagtgggaaaa

SEQ ID NO: 337500 - DNA, 759 bp, Homo sapiens
ctagttaattgtggcaaatggaaatgttctagaaagataagtaaattatctttaatagtatagtaataatttgtattttctaaattgtctctttatggacaggttaattatccgaagagatcacttactagaagatgcttttaatcagattatgggctactccagaaaagacctgcagagaaataagctatatgtcaccttcgttggggaggaagggtgagtagaacagagaagtggcctgtggaacataggctgtggccacaaggcggatgtttctccacgtcgctgtggttgcctgaaacagttttaaaggtctcctctggcttttaaatcacttgacatagaaatcctttagtaaaaacttgtagctttagatcatttttgagaacagaagcctagtttagtttcttctctccggacctctctttctcttaaagggaaaaagtaaggctttacaaggaaaaaaaacaaggaattgcatttatgcaattcctttgtgatctgtgatcttattttctaccctgcagggctaggtagaacgtgcttcctctattaaataagttcagtttcagaaacatgaattagaatcttgctgttctacccagaagcctccacagaagtaactcttgggccttggctcttatttctctgcctccagtttttctcttcccttgggaaggcagcacacctaccaacattactacctaacataaacaaacatgtcccgccttccatgactcttccatgagtgtgctcgtc

SEQ ID NO: 337501 - DNA, 4134 bp, Homo sapiens
  misc_feature (827)..(827): n is a, c, g, or t
taagtttcaaggtggtaagaactttataataaccacatatgacagtaagagctcaaagaccatcagttaagagaagcctaaatgtccattcttctggcttccttcttggatcatgtctttggtgactatctcgtggagtatttcctaaaaccaggcataatgttccttcctgctctcttcgttctggatctcatctaagcttggctttctctaatctgatctgtcctgtgtgggtaaggagaaatttccccaaagattgaaaattatgagaaaatagagctaagattgtgactcagaagtgagtcttttcctgaccgtctgatgttataagtcagctaagacatgtgagcggcatgtatttgactcagtgtattgtatcctaggcattctttgtggaccacaactcccgcaccaccactttcattgatccccggctcccacttcagagcagtagacccacaagtgcgctggttcatcggcaacacctgacaaggcaacgcagccacagtgcgggtgaggtaggagaagattctcgacatgcaggaccaccagttcttcccaggccatccagtacattcaatacagtcagtaggccacagtaccaggacatggttccagtggcttacaatgacaagattgttgcatttctacgtcaacccaatatctttgaaattctacaggagcgtcaacctgatcttaccaggaatcactcactcagggagaagatccaatttatccgaactgaagggactccaggattggtgcgcctttcaagcgatgcagaccttgttatgttgctgagcttatttgaagaagagataatgtcntatgtgcctccacatgccttactccaccccagctactgtcagtccccacgtggctctcccgtgtcatctcctcagaactcgccaggtacccagcgtgccaatgcccgggctccagccccttacaagcgggatttcgaagccaaactgaggaacttttacaggaagttagagactaaaggatatggacaaggcccagggaagttaaagttaattatccgaagagatcacttactagaagatgcttttaatcagattatgggctactccagaaaagacctgcagagaaataagctatatgtcaccttcgttggggaggaagggctggattacagtgggccttctagagagtttttcttcctggtatccagagaactctttaacccatattatggcttatttgaatattcagccaatgacacatacacagtacaaataagtcctatgtctgcttttgtagacaatcaccatgaatggttccgattcagtggtaggatccttggtcttgcactaatacaccagtatttgttggatgccttcttcacacggcccttttataaggctcttctcagaattctatgtgacctgagtgacctagaataccttgatgaagagttccatcagagcctgcagtggatgaaagacaatgatatccatgacatcctagacctcacgttcactgtgaacgaagaagtatttgggcagataactgaacgagaattaaagccagggggtgccaatatcccagttacagagaagaacaagaaggagtacatcgagaggatggtgaagtggaggattgagaggggtgttgtacagcaaacagagagcttagtgcgtggcttctatgaggtggtggatgccaggctggtatctgtttttgatgcaagagaactggaattggtcatcgcaggcacagctgaaatagacctaagtgattggagaaacaacacagaatatagaggaggataccatgacaatcatattgtaattcggtggttctgggctgcagtggaaagattcaacaatgaacaacgactaaggttgttacagtttgttacaggcacatccagcattccctatgaaggatttgcttcactccgagggagtaacggcccaagaagattctgtgtggagaaatgggggaaaatcactgctcttcccagagcgcatacatgttttaaccgtctggatctgcctccctacccatccttttccatgctttatgaaaaactgttgacagcagttgaagaaaccagtacttttggacttgagtgacctggaagctgaatgcccatctctgtggacaggcagtttcagaagctgccttctagaagaatgattgaacattggaagtttcaagaggatgcttcctttaggataaagctacgtgctgttgttttccaggaacaagtgctctgtcacatttggggactggagatgagtcctcttggaaggatttgggtgagcttgatgcccagggaacaacccaaccgtctttcaatcaacagttcttgactgccaaactttttccatttgttatgttccaagacaaagatgaacccatacatgatcagctccacggtaatttttagggactcaggagaatcttgaaacttacccttgaacgtggttcaagccaaactggcagcatttggcccaatctccaaattagagcaagttaaataatataataaaagtaaatatatttcctgaaagtacattcatttaagccctaagttataacagaatattcatttcttgcttatgagtgcctgcatggtgtgcaccataggtttccgctttcatgggacatgagtgaaaatgaaaccaagtcaatatgaggtacctttacagatttgcaataagatggtctgtgacaatgtatatgcaagtggtatgtgtgtaattatggctaaagacaaaccattattcagtgaattactaatgacagattttatgctttataatgcatgaaaacaattttaaaataactagcaattaatcacagcatatcaggaaaaagtacacagtgagttctgtttattttttgtaggctcattatgtttatgttctttaagatgtatataagaacctacctatcatgctgtatgtatcactcattccattttcatgttccatgcatactcgggcatcatgctaatatgtatccttttaagcactctcaaggaaacaaaagggccttttatttttataaaggtaaaaaaaattccccaaatattttgcactgaatgtaccaaaggtgaagggacattacaatatgactaacagcaactccatcacttgagaagtataatagaaaatagcttctaaatcaaacttccttcacagtgccgtgtctaccactacaaggactgtgcatctaagtaataattttttaagattcactatatgtgatagtatgatatgcatttatttaaaatgcattagactctcttccatccatcaaatactttacaggatggcatttaatacagatatttcgtatttcccccactgctttttatttgtacagcatcattaaacactaagctcagttaaggagccatcagcaacactgaagagatcagtagtaagaattccattttccctcatcagtgaagacaccacaaattgaaactcagaactatatttctaagcctgcattttcactgatgcataattttcttattaatattaagagacagtttttctatggcatctccaaaactgcatgacatcactagtcttacttctgcttaattttatgagaaggtattcttcattttaattgcttttgggattactccacatctttgtttatttcttgactaatcagattttcaatagagtgaagttaaattgggggtcataaaagcattggattgacatatggtttgccagcctatgggtttacaggcattgcccaaacatttctttgagatctatatttataagcagccatggaattcctattatgggatgttggcaatcttacattttatagaggtcatatgcatagttttcataggtgttttgtaagaactgattgctctcctgtgagttaagctatgtttactactgggaccctcaagaggaataccacttatgttacactcctgcactaaaggcacgtactgcagtgtgaagaaatgttctgaaaaagggttatagaaatctggaaataagaaaggaagagctctctgtattctataattggaagagaaaaaaagaaaaacttttaactggaaatgttagtttgtacttattgatcatgaatacaagtatatatttaattttgaaaaaaaat

SEQ ID NO: 337502 - DNA, 1690 bp, Homo sapiens
  misc_feature (827)..(827): n is a, c, g, or t
taagtttcaaggtggtaagaactttataataaccacatatgacagtaagagctcaaagaccatcagttaagagaagcctaaatgtccattcttctggcttccttcttggatcatgtctttggtgactatctcgtggagtatttcctaaaaccaggcataatgttccttcctgctctcttcgttctggatctcatctaagcttggctttctctaatctgatctgtcctgtgtgggtaaggagaaatttccccaaagattgaaaattatgagaaaatagagctaagattgtgactcagaagtgagtcttttcctgaccgtctgatgttataagtcagctaagacatgtgagcggcatgtatttgactcagtgtattgtatcctaggcattctttgtggaccacaactcccgcaccaccactttcattgatccccggctcccacttcagagcagtagacccacaagtgcgctggttcatcggcaacacctgacaaggcaacgcagccacagtgcgggtgaggtaggagaagattctcgacatgcaggaccaccagttcttcccaggccatccagtacattcaatacagtcagtaggccacagtaccaggacatggttccagtggcttacaatgacaagattgttgcatttctacgtcaacccaatatctttgaaattctacaggagcgtcaacctgatcttaccaggaatcactcactcagggagaagatccaatttatccgaactgaagggactccaggattggtgcgcctttcaagcgatgcagaccttgttatgttgctgagcttatttgaagaagagataatgtcntatgtgcctccacatgccttactccaccccagctactgtcagtccccacgtggctctcccgtgtcatctcctcagaactcgccaggtacccagcgtgccaatgcccgggctccagccccttacaagcgggatttcgaagccaaactgaggaacttttacaggaagttagagactaaaggatatggacaaggcccagggaagttaaagttaattatccgaagagatcacttactagaagatgcttttaatcagattatgggctactccagaaaagacctgcagagaaataagctatatgtcaccttcgttggggaggaagggtgagtagaacagagaagtggcctgtggaacataggctgtggccacaaggcggatgtttctccacgtcgctgtggttgcctgaaacagttttaaaggtctcctctggcttttaaatcacttgacatagaaatcctttagtaaaaacttgtagctttagatcatttttgagaacagaagcctagtttagtttcttctctccggacctctctttctcttaaagggaaaaagtaaggctttacaaggaaaaaaaacaaggaattgcatttatgcaattcctttgtgatctgtgatcttattttctaccctgcagggctaggtagaacgtgcttcctctattaaataagttcagtttcagaaacatgaattagaatcttgctgttctacccagaagcctccacagaagtaactcttgggccttggctcttatttctctgcctccagtttttctcttcccttgggaaggcagcacacctaccaacattactacctaacataaacaaacatgtcccgccttccatgactcttccatgagtgtgctcgtc

SEQ ID NO: 337503 - DNA, 493 bp, Homo sapiens
tagaatataaatttctttaatttcttgatctgtgggatactggaaaaagaatcagatcatttaaaatacgtaagaatgcattaaaatgttcatagtaactagaaatattacttaactgaattttagtgtaattaagaacagccatgttttatgtatgaatttacagcaaagaaaaaagcattgggggattaaaatgatgacacatgatgtaggtatcctatgattcttttgaaatgcagactgaagtgagtagatagttttcacatcatagaaagatttccctgaccgcctctgtggtctgccccatctagatttccgacgggagaacatcctgcctcactctacctccagatccaggatcacgttgctgttacagtctccccccgtgaagttcctcatcagcccagagttcttcaccgtgctgcattctaaccctgtgagtagcgaatctgaaagagtgtgaaggaaaacagcaggccaaagcaaatgatcg

SEQ ID NO: 337504 - DNA, 6934 bp, Homo sapiens
  misc_feature (95)..(95): n is a, c, g, or t
  misc_feature (1476)..(1476): n is a, c, g, or t
  misc_feature (3627)..(3627): n is a, c, g, or t
atttgagcatcagttgagggagaggacgcttcatttcctttttggttgggaatgtgccgtgaacatcctctgctggagcttggggcctggagcanactggggctgcagatttagacgtagacgtttccgaggacgcgagactgcagagctttgtaggcagccaatcccagagaagcagacgggatggctagttcagcccgggagcacctgctttttgtgaggcgtcgaaatccccagatgcggtacacattgagcccagagaacctccagagccttgccgcccagagctccatgccagagaacatgaccctgcagcgggccaacagcgacaccgacctggtgacttctgagagccgctccagcttaactgccagcatgtacgagtacacgctggggcaagcccagaacctcattatcttctgggacattaaagaggaggtggaccccagtgattggattggactttatcatatagatgagaattctccagccaacttctgggattctaagaacaggggtgtgactggaacacaaaaagggcaaattgtatggagaattgagcctgggccctatttcatggaaccggagataaaaatctgttttaaatattaccacggcattagtggagccctgcgagccacgaccccctgcatcaccgtgaagaacccagctgtgatgatgggggcagaaggcatggagggaggtgcttcaggaaacctgcattctcgaaaacttgttagctttacattgtcagatcttagggcagttgggctaaagaaagggatgttcttcaatcctgacccttatcttaagatgtcaattcagccaggaaagaagagcagtttccccacctgtgcccaccacgggcaggagagacggtctactatcatcagtaacaccaccaatccaatttggcaccgagagaaatattccttttttgcacttcttactgatgtcttagaaattgaaattaaagacaaatttgccaagagccgtcccatcatcaagcgttttctggggaaactaaccattccagtccagaggctgctggagcgacaagccatcggtgatcaaatgctcagctacaaccttggcagaaggctcccagctgaccacgtgagtgggtacctccagtttaaagtggaggttacgtcttctgttcatgaagatgcctctccagaagctgttggcacaatacttggagtcaattctgtgaatggagacttaggtagcccttccgatgacgaggacatgccagggagccatcacgacagccaggtgtgctctaatgggccagtttctgaggacagtgctgccgatggaacccccaagcattcattcaggactagctccactctggaaatagacacagaggaattaacctctacgtcttcaaggacctcacctcccagaggacgtcaggattcactcaatgattacttagatgctatcgaacacaatggccactccaggccngggacagcgacctgctctgagaggtccatgggtgcctctccgaaactgaggagtagttttcccactgacacaagactcaatgccatgcttcatattgattcagatgaagaagatcacgagttccagcaagacctgggttacccatcttccttggaggaggagggaggcctgatcatgtttagcagggcatccagagctgatgatggaagcctgacatctcagacaaagctggaggacaaccctgttgagaatgaggaagcctccacacacgaagctgcttcctttgaggataagccagaaaatcttccagagcttgcagagagctccttacctgcaggcccagccccagaggaaggtgaaggcggcccagagcctcaacccagtgctgaccagggcagtgctgaactgtgtggctctcaagaggtagatcagcccacaagtggcgcagacacagggacttccgatgcatcaggaggaagccgaagagccgtcagtgagaccgagtctctcgatcagggctctgagccttcccaggtgtcctctgaaacagaacccagtgatcctgccaggacagagagtgtgagcgaagccagcaccaggcctgagggagagagtgacctggaatgcgctgacagctcctgcaatgagagtgtgaccacgcagctgtcctctgtggacacacggtgctcctctcttgagagcgcacggtttcctgaaaccccagccttttcttctcaggaggaggaagacggagcctgtgcagcagagcccaccagcagtggccctgccgaagggtcgcaggaatccgtgtgcactgctggttctttacctgtggtacaggtgcccagtggggaggatgaagggccaggggcagaatcggccactgtacctgaccaggaggagctgggggaggtctggcagcggagggggagcctggagggagctgcagctgctgccgagagcccaccgcaagaagaaggcagtgctggggaggcccaaggcacctgtgaaggggcaactgcccaggaggagggcgctactggaggttctcaagccaacggccaccagccactgcgatcactaccttcagtgcgccaggatgttagccggtaccagagggtggacgaggctctcccaccaaactgggaggcacgcattgacagccacggcaggatcttctacgtggatcacgtaaacagaaccacgacgtggcagcgaccgacagctcccccagccccgcaggtgctgcagagatctaactccatacagcaaatggagcagctgaaccggcgatatcagagtatccgcagaaccatgaccaatgagaggcctgaggaaaataccaatgctattgatggggcaggggaggaagctgactttcaccaagccagtgcagatttccgacgggagaacatcctgcctcactctacctccagatccaggatcacgttgctgttacagtctccccccgtgaagttcctcatcagcccagagttcttcaccgtgctgcattctaaccctagtgcctaccgcatgtttacaaacaacacgtgtttgaagcacatgatcaccaaagtccggagggacacccaccactttgaacgctaccagcataaccgcgaccttgtgggattcctcaacatgttcgcgaacaaacagctagagctgccgcggggatgggaaatgaaacatgatcaccagggcaaggcattctttgtggaccacaactcccgcaccaccactttcattgatccccggctcccacttcagagcagtagacccacaagtgcgctggttcatcggcaacacctgacaaggcaacgcagccacagtgcgggtgaggtaggagaagattctcgacatgcaggaccaccagttcttcccaggccatccagtacattcaatacagtcagtaggccacagtaccaggacatggttccagtggcttacaatgacaagattgttgcatttctacgtcaacccaatatctttgaaattctacaggagcgtcaacctgatcttaccaggaatcactcactcagggagaagatccaatttatccgaactgaagggactccaggattggtgcgcctttcaagcgatgcagaccttgttatgttgctgagcttatttgaagaagagataatgtcntatgtgcctccacatgccttactccaccccagctactgtcagtccccacgtggctctcccgtgtcatctcctcagaactcgccaggtacccagcgtgccaatgcccgggctccagccccttacaagcgggatttcgaagccaaactgaggaacttttacaggaagttagagactaaaggatatggacaaggcccagggaagttaaagttaattatccgaagagatcacttactagaagatgcttttaatcagattatgggctactccagaaaagacctgcagagaaataagctatatgtcaccttcgttggggaggaagggctggattacagtgggccttctagagagtttttcttcctggtatccagagaactctttaacccatattatggcttatttgaatattcagccaatgacacatacacagtacaaataagtcctatgtctgcttttgtagacaatcaccatgaatggttccgattcagtggtaggatccttggtcttgcactaatacaccagtatttgttggatgccttcttcacacggcccttttataaggctcttctcagaattctatgtgacctgagtgacctagaataccttgatgaagagttccatcagagcctgcagtggatgaaagacaatgatatccatgacatcctagacctcacgttcactgtgaacgaagaagtatttgggcagataactgaacgagaattaaagccagggggtgccaatatcccagttacagagaagaacaagaaggagtacatcgagaggatggtgaagtggaggattgagaggggtgttgtacagcaaacagagagcttagtgcgtggcttctatgaggtggtggatgccaggctggtatctgtttttgatgcaagagaactggaattggtcatcgcaggcacagctgaaatagacctaagtgattggagaaacaacacagaatatagaggaggataccatgacaatcatattgtaattcggtggttctgggctgcagtggaaagattcaacaatgaacaacgactaaggttgttacagtttgttacaggcacatccagcattccctatgaaggatttgcttcactccgagggagtaacggcccaagaagattctgtgtggagaaatgggggaaaatcactgctcttcccagagcgcatacatgttttaaccgtctggatctgcctccctacccatccttttccatgctttatgaaaaactgttgacagcagttgaagaaaccagtacttttggacttgagtgacctggaagctgaatgcccatctctgtggacaggcagtttcagaagctgccttctagaagaatgattgaacattggaagtttcaagaggatgcttcctttaggataaagctacgtgctgttgttttccaggaacaagtgctctgtcacatttggggactggagatgagtcctcttggaaggatttgggtgagcttgatgcccagggaacaacccaaccgtctttcaatcaacagttcttgactgccaaactttttccatttgttatgttccaagacaaagatgaacccatacatgatcagctccacggtaatttttagggactcaggagaatcttgaaacttacccttgaacgtggttcaagccaaactggcagcatttggcccaatctccaaattagagcaagttaaataatataataaaagtaaatatatttcctgaaagtacattcatttaagccctaagttataacagaatattcatttcttgcttatgagtgcctgcatggtgtgcaccataggtttccgctttcatgggacatgagtgaaaatgaaaccaagtcaatatgaggtacctttacagatttgcaataagatggtctgtgacaatgtatatgcaagtggtatgtgtgtaattatggctaaagacaaaccattattcagtgaattactaatgacagattttatgctttataatgcatgaaaacaattttaaaataactagcaattaatcacagcatatcaggaaaaagtacacagtgagttctgtttattttttgtaggctcattatgtttatgttctttaagatgtatataagaacctacctatcatgctgtatgtatcactcattccattttcatgttccatgcatactcgggcatcatgctaatatgtatccttttaagcactctcaaggaaacaaaagggccttttatttttataaaggtaaaaaaaattccccaaatattttgcactgaatgtaccaaaggtgaagggacattacaatatgactaacagcaactccatcacttgagaagtataatagaaaatagcttctaaatcaaacttccttcacagtgccgtgtctaccactacaaggactgtgcatctaagtaataattttttaagattcactatatgtgatagtatgatatgcatttatttaaaatgcattagactctcttccatccatcaaatactttacaggatggcatttaatacagatatttcgtatttcccccactgctttttatttgtacagcatcattaaacactaagctcagttaaggagccatcagcaacactgaagagatcagtagtaagaattccattttccctcatcagtgaagacaccacaaattgaaactcagaactatatttctaagcctgcattttcactgatgcataattttcttattaatattaagagacagtttttctatggcatctccaaaactgcatgacatcactagtcttacttctgcttaattttatgagaaggtattcttcattttaattgcttttgggattactccacatctttgtttatttcttgactaatcagattttcaatagagtgaagttaaattgggggtcataaaagcattggattgacatatggtttgccagcctatgggtttacaggcattgcccaaacatttctttgagatctatatttataagcagccatggaattcctattatgggatgttggcaatcttacattttatagaggtcatatgcatagttttcataggtgttttgtaagaactgattgctctcctgtgagttaagctatgtttactactgggaccctcaagaggaataccacttatgttacactcctgcactaaaggcacgtactgcagtgtgaagaaatgttctgaaaaagggttatagaaatctggaaataagaaaggaagagctctctgtattctataattggaagagaaaaaaagaaaaacttttaactggaaatgttagtttgtacttattgatcatgaatacaagtatatatttaattttgaaaaaaaat

SEQ ID NO: 337505 - DNA, 2551 bp, Homo sapiens
ttttttttttcacttaatgttgtttttgtttaacttttgacattcatatgatcatatatacagtgttattccttagtcttaaaattatagacaacttgtaaagaattcaagaggatgatttatgtctggggactcttcgtgtcacgtatcttggtggcttaatatagaagagtcaaagtaacatgggcttttatgattggtttgataggataccatgacaatcatattgtaattcggtggttctgggctgcagtggaaagattcaacaatgaacaacgactaaggttgttacagtttgttacaggcacatccagcattccctatgaaggatttgcttcactccgagggagtaacggcccaagaagattctgtgtggagaaatgggggaaaatcactgctcttcccagagcgcatacatgttttaaccgtctggatctgcctccctacccatccttttccatgctttatgaaaaactgttgacagcagttgaagaaaccagtacttttggacttgagtgacctggaagctgaatgcccatctctgtggacaggcagtttcagaagctgccttctagaagaatgattgaacattggaagtttcaagaggatgcttcctttaggataaagctacgtgctgttgttttccaggaacaagtgctctgtcacatttggggactggagatgagtcctcttggaaggatttgggtgagcttgatgcccagggaacaacccaaccgtctttcaatcaacagttcttgactgccaaactttttccatttgttatgttccaagacaaagatgaacccatacatgatcagctccacggtaatttttagggactcaggagaatcttgaaacttacccttgaacgtggttcaagccaaactggcagcatttggcccaatctccaaattagagcaagttaaataatataataaaagtaaatatatttcctgaaagtacattcatttaagccctaagttataacagaatattcatttcttgcttatgagtgcctgcatggtgtgcaccataggtttccgctttcatgggacatgagtgaaaatgaaaccaagtcaatatgaggtacctttacagatttgcaataagatggtctgtgacaatgtatatgcaagtggtatgtgtgtaattatggctaaagacaaaccattattcagtgaattactaatgacagattttatgctttataatgcatgaaaacaattttaaaataactagcaattaatcacagcatatcaggaaaaagtacacagtgagttctgtttattttttgtaggctcattatgtttatgttctttaagatgtatataagaacctacctatcatgctgtatgtatcactcattccattttcatgttccatgcatactcgggcatcatgctaatatgtatccttttaagcactctcaaggaaacaaaagggccttttatttttataaaggtaaaaaaaattccccaaatattttgcactgaatgtaccaaaggtgaagggacattacaatatgactaacagcaactccatcacttgagaagtataatagaaaatagcttctaaatcaaacttccttcacagtgccgtgtctaccactacaaggactgtgcatctaagtaataattttttaagattcactatatgtgatagtatgatatgcatttatttaaaatgcattagactctcttccatccatcaaatactttacaggatggcatttaatacagatatttcgtatttcccccactgctttttatttgtacagcatcattaaacactaagctcagttaaggagccatcagcaacactgaagagatcagtagtaagaattccattttccctcatcagtgaagacaccacaaattgaaactcagaactatatttctaagcctgcattttcactgatgcataattttcttattaatattaagagacagtttttctatggcatctccaaaactgcatgacatcactagtcttacttctgcttaattttatgagaaggtattcttcattttaattgcttttgggattactccacatctttgtttatttcttgactaatcagattttcaatagagtgaagttaaattgggggtcataaaagcattggattgacatatggtttgccagcctatgggtttacaggcattgcccaaacatttctttgagatctatatttataagcagccatggaattcctattatgggatgttggcaatcttacattttatagaggtcatatgcatagttttcataggtgttttgtaagaactgattgctctcctgtgagttaagctatgtttactactgggaccctcaagaggaataccacttatgttacactcctgcactaaaggcacgtactgcagtgtgaagaaatgttctgaaaaagggttatagaaatctggaaataagaaaggaagagctctctgtattctataattggaagagaaaaaaagaaaaacttttaactggaaatgttagtttgtacttattgatcatgaatacaagtatatatttaattttgaaaaaaaat

SEQ ID NO: 337506 - DNA, 276 bp, Homo sapiens
agttcgacggagactctcccttgactcagaaaaaaaaaagtacactacgagaagttagaaactttatggttaagcagcagattagacttctccctaaagggagaatgaactgggaaatagatctgaagttacacagagagagcactgacatacagagaagtggaaactaaggaaaagaggttaaaaaacatggaagaggctgggtgtagttgctgacacctgtaatcccaacttttggggaggcatagagagtctccgtcgaacggggtaccgagc

SEQ ID NO: 337507 - DNA, 338 bp, Homo sapiens
gggcaacataaggagaccttgtctctaaaaaaaaattaaaaaatcagacatgtggcacatgcctatagtcccagcttctctggaggctcaggctggaggattgcttgaccccaggaacttgaggttgcagtgagctatgatggcatcactgcactccagcctgggtgacagagcaagatcctgtctataaaacaacaaaatgaagataaatgtgagacttgacaatcaaaatttcaggaaagaatatttcaaagaggctgggcattttctagaattttttttgagatggggtctccctctgcactccagcctggagtgcagtggcacgatcttggctc

SEQ ID NO: 337508 - DNA, 507 bp, Homo sapiens
tgggcaacaagagtgatactccacctcagaaaaaaaaaagtacactacgagaagttagaaactttatggttaagcagcagattagacttctccctaaagggagaatgaactgggaaatagatctgaagttacacagagagagcactgacatacagagaagtggaaactaaggaaaagaggttaaaaaacatggaagaggctgggtgtagttgctgacacctgtaatcccaacttttggggaggcatagagaggactgcttgaggtcctcagttggggaccagcctgggcaacataaggagaccttgtctctaaaaaaaaattaaaaaatcagacatgtggcacatgcctatagtcccagcttctctggaggctcaggctggaggattgcttgaccccaggaacttgaggttgcagtgagctatgatggcatcactgcactccagcctgggtgacagagcaagatcctgtctataaaacaacaaaatgaagataaatgtgagacttga

SEQ ID NO: 337509 - DNA, 400 bp, Homo sapiens
atgaagtgctgggattacaggcacgagccactgcacccagcctctagaacataggctttcattactattctccagattacatattttgactgacctaaatcatatatgtagagtaaaaacaaattttatctaaataaacttattggacttcattcaaagagaaattgtttccttgggcagttttgctcccaacattagatcccgcattctcaggacagctgtcatctttttaatttagttttctgattttatttttatttattttgttactccaacctttgctttggcctttaacaactcagtgttttggtctaatcttcaagaggaatttgaggttcacttgaataagttagactagtttgaggtgggtgtagctagaggattgaagtcgtaccaaaaa

SEQ ID NO: 337510 - DNA, 759 bp, Homo sapiens
atcacttgtgtgttccctggagtagcacttttaatttccttcaagaactttccctttgcactcacaacttggctaactgctcaggacaagaggtctagctttcggtctgtcttggcttttgctgttctcactaagcataatcagagagatgtatgactcttcctttcagttgaagactcacaatctactctagggttattaattggcctagtttcaatattgctgtttctcagggaatagggaggcccaagaagaagggagacgggaataaccaattggttgagttgttagaacacccatgacatttatcgatgaagttcactgtctaatatggtttggctgtgtccccacccaaatctcatcttgaattgtagctcccatcattcccacgtgttgtaggagggaactggtgggagataattgaatcatgggggcagttgccctcatactgttctcatggtagtgaataagtctcatgagatctgatggttttataaggggtttccactttcacttggttctcattctctcttgcctgccgccatgtaagatgtgccttttgcattctgccatgattatgaggcctccccagccaccaggaactgtgagtccattaaacttctttttctttataaattatccagtcttgggtatctttatcaacagtatgaaaatgaactaataggctgggcgcagtggctcacgcctgtaatcccagcactttgggaggctgaggcaggcagatcatgaggtcaggag

SEQ ID NO: 337511 - DNA, 334 bp, Homo sapiens
gtgtggtgactcacgcctgtaataccatctctttgggaggccaaggtgggcagatcacctgaggtctggagtttgagaccagcctagccaacatggtgaaaccccgtctctactaaaaaatacaaaaataaaattagccaggcccagtggcttgtgcctgtagtcccatctccttgggaggctgaggcaggagaattgcttgaacccagaaggcagtgagatgagattgtgccactgcactccggtgatagagtgagactccgtttcaaaaatcaacaacaacaaagaaaaacaaaaaaccatgagttcatacaagtatctctagttctaatct

SEQ ID NO: 337512 - DNA, 467 bp, Homo sapiens
gcagctggaagcgctgaatgggcaccgggggaagagagccccgcggtcaggcagaggacgcaacagagtcctaacaatgtgatccaggctacccgagagctggttagaataatccttcctacgcagaaagacccaggaaaccttccaggaaagactaggcagccgcattgagaaaaaacgaaaagtaaatcttttgcaaataatatcacaaaacttccagctgtgcacaaatactgaagggcaattttgatgacaatgcaggaagctttcaaagaaaggatttttaaacatattttttccttggcggaactctttttagtaaggatttccacctttgccccaggatcctgccaatgttcttagtcaaagccagacccgagtttcctaggattcttcggtgaaactgcattgccccctggcgtttgtgtgctgtcattacgccgcacagataaagcccatggaacacc

SEQ ID NO: 337513 - DNA, 255 bp, Homo sapiens
tgggaaagagagtgggagagggcagaacaaacactttaatcagtacagcatatttagatctggcacctacatcagaataacactgatgcaacaatatttataccaattgaaaatgctggggcagtgaacacttctgttccgattcttttttaacacggtccacctaccttcaatacaatttaaagtaattacaaacaatttgaaaaatcaacatgggcagggaacagttttctcattgtgttactgaggtgtggg

SEQ ID NO: 337514 - DNA, 616 bp, Homo sapiens
aataaactgtggtctgcataaatgacgaaatactgttcagccttaaaaaagaagaaaattctacaggatgaaacaatatggataaacctggaggaaattaaatgaggtcactcccaagggtgaacactctggagagaaagatttgctctcagtgctgatttatgaactgcagcgtcagaaaccagcattaatttggagttaatttttccccaaagcttttcgtttacttacagtcatctcttatccctgaaaaaacaaaacacgtatattattgtgctttatactttcctaaagaagaaaaaaattctaagaaaattatatttagtaacttattgtcttaagaaaataactgcaaaatatctgtctagtgtgataaattatacgtgtaagtttattttttttcagaagcagaaaacatcatttctctagtaagttcacaaagataattaagatacccagatgaaattctacaaatggctttaaaagttgatggggaactgaatgtttagtattaatgtatcataattgaaataaaataaagataatagagaaataaaataaagatgctataaccctggcctcgttggcctcagcggtggagctctgccggccggaa

SEQ ID NO: 337515 - DNA, 733 bp, Homo sapiens
aataaactgtggtctgcataaatgacgaaatactgttcagccttaaaaaagaagaaaattctacaggatgaaacaatatggataaacctggaggaaattaaatgagaagacaagctaagatgcaagaaaatgtgacccttgataaagatggaaaacaggaaatgaaagtgtaccaggagagccacaaaagttccaggagttccagatgttctttttctttcccccggccagggatctgaaactaactcggacttacttgaaaaggtcactcccaagggtgaacactctggagagaaagatttgctctcagtgctgatttatgaactgcagcgtcagaaaccagcattaatttggagttaatttttccccaaagcttttcgtttacttacagtcatctcttatccctgaaaaaacaaaacacgtatattattgtgctttatactttcctaaagaagaaaaaaattctaagaaaattatatttagtaacttattgtcttaagaaaataactgcaaaatatctgtctagtgtgataaattatacgtgtaagtttattttttttcagaagcagaaaacatcatttctctagtaagttcacaaagataattaagatacccagatgaaattctacaaatggctttaaaagttgatggggaactgaatgtttagtattaatgtatcataattgaaataaaataaagataatagagaaataaaataaagatgctataaccc

SEQ ID NO: 337516 - DNA, 529 bp, Homo sapiens
aatgtaaattgaaacggaagccattagttagaaggaagaagggagggcttttagtggatagtcactcccaagggtgaacactctggagagaaagatttgctctcagtgctgatttatgaactgcagcgtcagaaaccagcattaatttggagttaatttttccccaaagcttttcgtttacttacagtcatctcttatccctgaaaaaacaaaacacgtatattattgtgctttatactttcctaaagaagaaaaaaattctaagaaaattatatttagtaacttattgtcttaagaaaataactgcaaaatatctgtctagtgtgataaattatacgtgtaagtttattttttttcagaagcagaaaacatcatttctctagtaagttcacaaagataattaagatacccagatgaaattctacaaatggctttaaaagttgatggggaactgaatgtttagtattaatgtatcataattgaaataaaataaagataatagagaaataaaataaagatgctataaccc

SEQ ID NO: 337517 - DNA, 762 bp, Homo sapiens
cctgactttcttatggtgaagacgtaggcttcccctgtggaagatgcagcaacaaggcaacaacttggaagctcagactggaccctcaccaaacactaatcctgccagcaatttatcttgggttttcagtctccagaactgtgagaactaaatttctgttatttgtcactcccaagggtgaacactctggagagaaagatttgctctcagtgctgatttatgaactgcagcgtcagaaaccagcattaatttggagttaatttttccccaaagcttttcgtttacttacagtcatctcttatccctgaaaaaacaaaacacgtatattattgtgctttatactttcctaaagaagaaaaaaattctaagaaaattatatttagtaacttattgtcttaagaaaataactgcaaaatatctgtctagtgtgataaattatacgtgtaagtttattttttttcagaagcagaaaacatcatttctctagtaagttcacaaagataattaagatacccagatgaaattctacaaatggctttaaaagttgatggggaactgaatgtttagtattaatgtatcataattgaaataaaataaagataatagagaaataaaataaagatgctataacccataaccctcaaactttcaccataaatctttttctttttagcaacaatatctgaaacacttctgtacacttgatttttaagtgtacaatgacatacacattggaataaaatgaatgagaaatccccatac

SEQ ID NO: 337518 - DNA, 1000 bp, Homo sapiens
  misc_feature (163)..(163): n is a, c, g, or t
tctgcgcgcctcgaacggcactcccaccctggacacccacttctctcggaggatgcgcaccccgcggcgtaccgcggtccctcccccccgcctccactccccacgccgtccgcccgcgcttcaccacccgcgggccccgccccgccacggtcccactcccctnttttatccaccgccacggacgggcttatcgcctcctaagggcaattgggccgggcccccccccaggtgggggatttataagctcctatggccataacgcccatcccgtttaattgttacccagcagtggctctgccacaccattttggactttagctccagtgcctctcttaataacccccgccccagattcaagtacaaaatcaacaaaccaaagtataggtggaaaatataccacgtgagtttctcagacaccgtttgaatggagactggcatctctttaagaactacttccctttctccacagcttaacatcagaaacttgaaggtcactcccaagggtgaacactctggagagaaagatttgctctcagtgctgatttatgaactgcagcgtcagaaaccagcattaatttggagttaatttttccccaaagcttttcgtttacttacagtcatctcttatccctgaaaaaacaaaacacgtatattattgtgctttatactttcctaaagaagaaaaaaattctaagaaaattatatttagtaacttattgtcttaagaaaataactgcaaaatatctgtctagtgtgataaattatacgtgtaagtttattttttttcagaagcagaaaacatcatttctctagtaagttcacaaagataattaagatacccagatgaaattctacaaatggctttaaaagttgatggggaactgaatgtttagtattaatgtatcataattgaaataaaataaagataatagagaaataaaataaagatgctataaccctggcctcgttggcctcagcggtggagctctgccggccggaa

SEQ ID NO: 337519 - DNA, 774 bp, Homo sapiens
aataaactgtggtctgcataaatgacgaaatactgttcagccttaaaaaagaagaaaattctacaggatgaaacaatatggataaacctggaggaaattaaatgagaagacaagctaagatgcaagaaaatgtgacccttgataaagatggaaaacaggaaatgaaagtgtaccaggagagccacaaaagttccaggagttccagatgttctttttctttcccccggccagggatctgaaactaactcggacttacttgaaaaggtcactcccaagggtgaacactctggagagaaagatttgctctcagtgctgatttatgaactgcagcgtcagaaaccagcattaatttggagttaatttttccccaaagcttttcgtttacttacagtcatctcttatccctgaaaaaacaaaacacgtatattattgtgctttatactttcctaaagaagaaaaaaattctaagaaaattatatttagtaacttattgtcttaagaaaataactgcaaaatatctgtctagtgtgataaattatacgtgtaagtttattttttttcagaagcagaaaacatcatttctctagtaagttcacaaagataattaagatacccagatgaaattctacaaatggctttaaaagttgatggggaactgaatgtttagtattaatgtatcataattgaaataaaataaagataatagagaaataaaataaagatgctataaccctggcctcgttggcctcagcggtggagctctgccggccggaa

SEQ ID NO: 337520 - DNA, 959 bp, Homo sapiens
  misc_feature (163)..(163): n is a, c, g, or t
tctgcgcgcctcgaacggcactcccaccctggacacccacttctctcggaggatgcgcaccccgcggcgtaccgcggtccctcccccccgcctccactccccacgccgtccgcccgcgcttcaccacccgcgggccccgccccgccacggtcccactcccctnttttatccaccgccacggacgggcttatcgcctcctaagggcaattgggccgggcccccccccaggtgggggatttataagctcctatggccataacgcccatcccgtttaattgttacccagcagtggctctgccacaccattttggactttagctccagtgcctctcttaataacccccgccccagattcaagtacaaaatcaacaaaccaaagtataggtggaaaatataccacgtgagtttctcagacaccgtttgaatggagactggcatctctttaagaactacttccctttctccacagcttaacatcagaaacttgaaggtcactcccaagggtgaacactctggagagaaagatttgctctcagtgctgatttatgaactgcagcgtcagaaaccagcattaatttggagttaatttttccccaaagcttttcgtttacttacagtcatctcttatccctgaaaaaacaaaacacgtatattattgtgctttatactttcctaaagaagaaaaaaattctaagaaaattatatttagtaacttattgtcttaagaaaataactgcaaaatatctgtctagtgtgataaattatacgtgtaagtttattttttttcagaagcagaaaacatcatttctctagtaagttcacaaagataattaagatacccagatgaaattctacaaatggctttaaaagttgatggggaactgaatgtttagtattaatgtatcataattgaaataaaataaagataatagagaaataaaataaagatgctataaccc

SEQ ID NO: 337521 - DNA, 1088 bp, Homo sapiens
  misc_feature (163)..(163): n is a, c, g, or t
tctgcgcgcctcgaacggcactcccaccctggacacccacttctctcggaggatgcgcaccccgcggcgtaccgcggtccctcccccccgcctccactccccacgccgtccgcccgcgcttcaccacccgcgggccccgccccgccacggtcccactcccctnttttatccaccgccacggacgggcttatcgcctcctaagggcaattgggccgggcccccccccaggtgggggatttataagctcctatggccataacgcccatcccgtttaattgttacccagcagtggctctgccacaccattttggactttagctccagtgcctctcttaataacccccgccccagattcaagtacaaaatcaacaaaccaaagtataggtggaaaatataccacgtgagtttctcagacaccgtttgaatggagactggcatctctttaagaactacttccctttctccacagcttaacatcagaaacttgaaggtcactcccaagggtgaacactctggagagaaagatttgctctcagtgctgatttatgaactgcagcgtcagaaaccagcattaatttggagttaatttttccccaaagcttttcgtttacttacagtcatctcttatccctgaaaaaacaaaacacgtatattattgtgctttatactttcctaaagaagaaaaaaattctaagaaaattatatttagtaacttattgtcttaagaaaataactgcaaaatatctgtctagtgtgataaattatacgtgtaagtttattttttttcagaagcagaaaacatcatttctctagtaagttcacaaagataattaagatacccagatgaaattctacaaatggctttaaaagttgatggggaactgaatgtttagtattaatgtatcataattgaaataaaataaagataatagagaaataaaataaagatgctataacccataaccctcaaactttcaccataaatctttttctttttagcaacaatatctgaaacacttctgtacacttgatttttaagtgtacaatgacatacacattggaataaaatgaatgagaaatccccatac

SEQ ID NO: 337522 - DNA, 231 bp, Homo sapiens
taggggtggtggtgtgacctgcctggagcagcgctaagtatggacttgtgagtcaagggctatcaaaacctaagtaaactgattgctgttcagagaaggtagagttccattccacagtttgcaagaaggactgttttatggaggaggtcatgttggactagaccttaaaaagttggtagaatttaaaagcaaggatatggaagcaggaagagtgaaagtgagcagaggtac

SEQ ID NO: 337523 - DNA, 116 bp, Homo sapiens
caaattattctggcttgatgtccatctgatggtttactcttgctacctcctactccctactataaccacaaatgacctcctccccacttgctctcattcttaccagaagttttcag

SEQ ID NO: 337524 - DNA, 694 bp, Homo sapiens
tggagaatgggaatggcaggatctgcctggtagcttagagggatcatgctggctgccatgagaaaaacagacaaggctggggcaaagaggaaaataaactgcaggcatgtcttgcaggcatgtgtctcggatagatgcttggttcaaccaacctggtggtggtagaggaggttagcagtggtcagatgggattttcagagggctcaaactggtggcatcacagaagctgaagtgtgaggagtgaggcatgatcagaatgcaagcatagagttgtcccacgctggtggataccttgcctctcagacgctctgtgatgtgcatggcagaatccagccactgagtgatggactctgaattattaagcgaacatgagagcctctttgatccagagcgtatcttcacatcttacaattaggaaatagtggccaaaagatgccaaaaagtgtaatgtgtccagcaggtcaattatatttgggtttccaacaaacaagaagcaggtatattgctctcatttctccaggctggcagatatgtacagcagttctcccttatctgtggtttctctttccactgtttcagttacccatggtcaaccaaggtccaaagatactaaatagtgacagaaataaacatttcataagtttcagattgtgtggcgtacttaagtgtgatgcatctagcgtcctgcttggcc

SEQ ID NO: 337525 - DNA, 402 bp, Homo sapiens
tcagtgaatgtagaagaaatatgtaaaacaattacattttagaagtagaaaaggaaaggaacctaaatggaagtaaggtttctacacttcaaagtatcatatatgtacattgtgatacccatataaccactaagaaaactatccaaaatgagatacagaaaaacgttagaaataaatcacaacggacttctaaaaaatactcaacctataggaagataagaaaagagagaataataagaatataggaaaataataaaatggcacgtttaacatgcatatcaataattatgttaaatgtaacagatctaaatataccaattaaaatacctagatttatagaatgaatgaaaaaaatgacctaataatatactgtctacaagaagctcacttaaagtgcaatga

SEQ ID NO: 337526 - DNA, 554 bp, Homo sapiens
atatgcatgatgagaatcaaggaaggaaagagaaggacagaaaaaataattggagaaataacagcccaaaatttcccatgtgatagaaaacattacacatccaagaggctcaacgaattacaagataaactaaaagagattcacatcaagatacatcaaatcaaatgattaaaagccaataaaaataagaaaatcttgaaaacatcaaagagaagcaattcatcacatactaaggatcctcccaaagcagctgacttttcatcagaaaacatggcagcagtgggatatattcaaagtgctgaaagaaaagagattgtctatatccaacaaaactatcctttaaaaatgaaggagaaattaaattattcccatattaaaacagaaaagaacttcttgctaacagacttaccctaaagaaatactaaagggagtctttcaggctaaaatataaacacaccagagagtaattcaaatccacctaaaaaataaagagagagaggtggtggtgtcgcaaataaggtggtgggcagataaggtggtgggcagataaggtg

SEQ ID NO: 337527 - DNA, 178 bp, Homo sapiens
ctcatcagttgccacttaagcatatctgattcttaaaaatttgaatattcaagaacaaattgtaaaaatattccttgtataatttttggttttgtagtaattcctttgtttgcttcacagtacttctgcagagtgatccatttgtaattaatagacacacacacatcatccaccattg

SEQ ID NO: 337528 - DNA, 1691 bp, Homo sapiens
  misc_feature (1550)..(1550): n is a, c, g, or t
  misc_feature (1599)..(1599): n is a, c, g, or t
  misc_feature (1690)..(1690): n is a, c, g, or t
agcgggtccctgcggccgccagagggagggttaaggcgcctgggcgcacagcgagccggctgagggggctgtggcggccgcggcgggcgacatggacaacgcggggaaggagcgtgaggcagtacagctgatggcggaggccgagaagcgagtcaaggcctcccactccttcctccgagggctgtttggaggaaacacaagaatagaagaggcttgtgaaatgtataccagagctgcaaatatgttcaagatggctaaaaattggagtgggaaggtttacaattgcagccaagcaccacattactattgcagagatctatgagactgaacttgtagacattgagaaggctattgcacattatgaacaatctgctgattattacaaaggagaagaatccaacagctcagcaaacaagtgtctgctgaaggtggcagcatatgctgcccagcttgagcagtaccagaaagccattgagatctatgagcaggttggggcaaacacaatggataatcctttgttgaaatacagtgcaaaggattacttcttcaaagctgccctctgccacttcatagtagacgagttgaatgccaagcttgctcttgagaaatatgaggaaatgtttccagcatttactgattcaagagaatgtaaattattgaaagtaagtaatattagaactttgaagaaaaatgcttttgttctgttaggtgacaacacctaagtgggattgggtatgaagtgaagttttaatctataaagtctgctaactgaggggccctggtactttcctgctttcgtattataggtgttcaaatgcaattaaggtcagaaacatgtagttgtgttctgaaataggcacctgagaaatgttactacagaagctagatccctaacttggctcttgacttgtatatgagtatttcctcagttttgtgcaatatttggcaacattggtattatacttaaagtatatatttagaaatgggacttcatcttacagaactgttttttaaaatatttttatgctaccagaaactcctagaagctcatgaagaacagaacagtgaagcttacactgaagcagtaagttatgcttttgggacatggtacattatttgaagatttaagttaaagaaacttcttttccttttcattatgtgaattctaaacatttatttgaacatgactccagcataccttaagttgtattttccaaacgtcaccttttatatatcacacaaattaaacagttccattagccatgctgagattcgacttacactcaaaactaatttagctgtgagactagttcaggagcaaatattccatttatattcttataatttgctgttttaattttttcttttgaaaataatctgacccataaataagtataaagtaaaattagttaaggccgggcacggcgtctcacacctgtaatcctggcactttcggaggccgaggcaggcagatcatgagtcaggaaattgagaccatcctcgccaacatggtgaaaccccgtctctactaaaaatataaaaattagccnggcatgctggcacacgcctgtagtcccagctactcgggaggctgaggcnggagaatcgcttgaacccgggaggcagaggttgcagtgagctgagattgcaccactgcactccagcctggtgacagagcgagactctgtcnc

SEQ ID NO: 337529 - DNA, 720 bp, Homo sapiens
agcgggtccctgcggccgccagagggagggttaaggcgcctgggcgcacagcgagccggctgagggggctgtggcggccgcggcgggcgacatggacaacgcggggaaggagcgtgaggcagtacagctgatggcggaggccgagaagcgagtcaaggcctcccactccttcctccgagggctgtttggaggaaacacaagaatagaagaggcttgtgaaatgtataccagagctgcaaatatgttcaagatggctaaaaattggagtgctgcaggaaacgcattttgtcaggcagccaagctccacatgcagcttcagagcaaacatgactctgctaccagctttgtggatgctggaaatgcttacaaaaaggcagatccccaaggtaagacagccaggcatgtagcatgctatctctgtgtgtaactaaccagtcagtacttccctcaacgttaaggtcagtgttggtgtgctttcaagtcctggtaaaaaggaatttttgtattttggaataatagagaattttgataaccttagggatttttcttttttaatcatttgggggcttttatgaggagaaattatgttaaatttatactggctgtttactttatagcatcatttaattaaactcttatttatattgcattttagagaattttttggaaattacctttaattttatctaagacttcttatatcttaattttgtgaaaatg

SEQ ID NO: 337530 - DNA, 777 bp, Homo sapiens
agcgggtccctgcggccgccagagggagggttaaggcgcctgggcgcacagcgagccggctgagggggctgtggcggccgcggcgggcgacatggacaacgcggggaaggagcgtgaggcagtacagctgatggcggaggccgagaagcgagtcaaggcctcccactccttcctccgagggctgtttggaggaaaacacaagaatagaaagaaggcttgttgaaaattgttattacccaagaaggctggcaaaattattgttccaagaatgggcttacaaaaatttgggaaggtggctggcaagggaacaacggccaattttttggttccaagggccaaggccaaaggcttccaacaattgccaaggctttcaaggaaggcaaaaacaatttggaagttcttggcttaccaaggctttttggttgggattggcttgggaaaattggctttacgaaaaaagggcaggaattccccaaagaaaggggctttattccaaattggctttaaattgggcaaggccaattcggaacaattttttacaacaatgaacattgggcggaaggggtttacaatttgggcacggcccccaagtgtacagcccacctttatacctcttattggcccggaagatttcccatagtgagcactgtggaaccctgggttaggaccttgggcagaaagcggccatatggcccccttttattggaccccaactctgccttggcttaatttcccaaggggaggagagaattcccagacaggttcaggcaaaccatt

SEQ ID NO: 337531 - DNA, 4369 bp, Homo sapiens
agcgggtccctgcggccgccagagggagggttaaggcgcctgggcgcacagcgagccggctgagggggctgtggcggccgcggcgggcgacatggacaacgcggggaaggagcgtgaggcagtacagctgatggcggaggccgagaagcgagtcaaggcctcccactccttcctccgagggctgtttggaggaaacacaagaatagaagaggcttgtgaaatgtataccagagctgcaaatatgttcaagatggctaaaaattggagtgctgcaggaaacgcattttgtcaggcagccaagctccacatgcagcttcagagcaaacatgactctgctaccagctttgtggatgctggaaatgcttacaaaaaggcagatccccaagaggctatcaactgcttaaatgcagccatcgacatttacacagacatgggaaggtttacaattgcagccaagcaccacattactattgcagagatctatgagactgaacttgtagacattgagaaggctattgcacattatgaacaatctgctgattattacaaaggagaagaatccaacagctcagcaaacaagtgtctgctgaaggtggcagcatatgctgcccagcttgagcagtaccagaaagccattgagatctatgagcaggttggggcaaacacaatggataatcctttgttgaaatacagtgcaaaggattacttcttcaaagctgccctctgccacttcatagtagacgagttgaatgccaagcttgctcttgagaaatatgaggaaatgtttccagcatttactgattcaagagaatgtaaattattgaaaaaactcctagaagctcatgaagaacagaacagtgaagcttacactgaagcagtgaaggaatttgactcaatatctcgcttggatcagtggctgaccaccatgttgcttcgcatcaaaaagtccatccaaggggatggagaaggagatggagacctaaaatgaaatgtttttgtctttgtggcatgcagctaactcctctttagttttgtcttagggtcaagtgatctttatgggatgcctatttaatggcttaatttgttgcatatgagccagacggcctgtgtattgtttaagctcgccaagtctgtgttgctgtgaaatgaatgaaggagaggctcctgttcatcttgtggtaatgatgggttgtttcatgcttatcagaacccccagcgttttctgagaagtacttcagaatctcattcctcatatttcattggtatttgtggagcctatgtttaatgttgccacgtgtttttatgtcctttttgttggacttgagtactcagcccagttgttctcatagatgctttgcattttctctgtgctttggcatctgaatatgttctttaaatgtgtgtttagtttaggacagttactaggaatgagtttataacttcattagaaatcatttctatttttgttatcctgtgattattttgatggtgctagtgactagtttcttgctttttgtgttgttccgtatgctaacatgtgcatgctttctggaagtacttgcttcatgtatggatgagtgtcaaagtgaatttgatttgtacttagacacacgcgtttacacacacacacatatcacaagatctgttagaaatggaatttttctctttttctggagatagttttcacttttagttggagtggaaatccctttatatttacattgaagtattttaattggcatagcctgctcattattttcatgtttatacactttcccacgttgaggtggtgtgttctgtgctgtgactatagaaatcttggtcagggctggatagattatctaagtcaagcttgagaatgaatgtatgtaattttcctgtttattgtacatgatgggttaggtggggtgaatgtggtacaggaatgtcctgtatgcccaagtgggcaagaaccccaacttgtttctcaggggacttgattgttctcttagctggtggaatatgttggcttatgtgtttgaactctgtcgtgtttaattggtttatataatatatgtatgctatcttgattcatgaacttgattctattaatttatatgctgatattgtactttagacatacgcttgtctcctgaatgtcctctgaatatttatagttaaatgatttatatttgaaatgtgttgccagacttaacccagcagacactctgacatcacggagcttcactgatgacaggtaacgaaacttcctatgttatgtcaggtagtagtaagtagtattggaatgatgttttcatttttggtggctctcaactggaattggtagtgtttccaggccaagggtcgactgcaggttgtttgagaaatgatgagtaggtcagtctaggaagaaagagaaagtagcaggaaaggaagtgggaagggccagccaaggacagactgtagaggatccacatcaggtggccacgaggacttgcaggctatagttatggtggtgacatgcatgaggtgggctggtagagcaggaagctctgtgatgtcagagcatctactgggactacaggtgcactgtagtccccactactgggggtggcaatgaagacactctgtctgttgggccctagaatttaatgtggatttcctccttccttccaagttctgagattcttaaatgagagctggctgtcttctagaggtaagacctggaatggagtccagttggtactttttcactccctcttagaatctcttatgaaaaaatgatcagagagaaaagtggggttttgtttccccacctaataatatatcctacaaccagccaaatgcacttttgtgaaaatggggtgtgaggagtggttctgcagcttgagtcctctggttttaagtagtttgtttctacttgtttaaagaatcttctggtctgaccacttaaagtaaaaactacatgatttattttcgggcaattatgtttagctttcatcattatactccaacagacccgtctgaaggggtatttttttttaacaataatgtttgtaacattttgttgtgtcaattagagggtcacttgtttgtattgcaataaacactgggaccagttccggggttaagaattaatttttgtttttaatatttcacatgaaaagaatcaaagtaattgtaatggctagaagagacctgccagaagattaaaaaaaagaatgagagaaaagcccagttagtggtgtgcaaacttacttcctttaaatgtcccatggatgtaggacagtgccatgtttcaagatgcctgtgagctaggtcttcaagatttatagaatgttacttatgaacaaaatataattatttatggtacaattcttgtactttagcaaatctggagttagttcatagtcaaagtcagttaatatttcttagaggaaagttttgctttttgtggcaacatttttatagcttgtgtgagttcttttttatttaatgatttgaaagcagtatttttgcacagtcgtgaccgtgtgtggtggcgtcactgtaaccaaagtatatgcaccagcccttgtgcatttattgtttctcctgattttgtggatttaaatgtccaaatgcaaacctttgtgacttcctttggaggacttggcagcacagcatgcccccgtgacctgcctgctgtggtatgagctatgaccaagagcaggcttcctgctccatggagtcctgagttgctctggggcaggggattacgttatgaaaactaaccatgtgtaacaataaatctaccttagcagaaaaagtatgcttgttttattttaacctataaagtggaaattatcagtaatattttgatgagtcttgttgctaaattggcataggtcaaaagtagcttccattgtttcaagttgttcccgttaagattaaggcaacagacgttaatactctctaggctccggtcatttgttgggaattccagggcaccgtaatggttttgcagactgagggtttagaaggaaaccctggtaacttctgttgatgcagtccactaaagtacatgataaccctgcagaccccacattctcatcccttccttgaatcctttagggtctacagttacttgcaaagttgaggaaggcatggttgctggaagactggtggggaggtgaggcacccctaagcctgacactctcctaccccaagaaagtaccactcaactatctggtcagtgtgggcatttattttaattttgcaaaatatctgcacagggagaggagatgcccctggggaagggtcagtcccactgaccactggggcctgaagttctgatgaggaagaggacccatggcgggtagtgcagaccggctcatcctaccatcctatc

SEQ ID NO: 337532 - DNA, 4629 bp, Homo sapiens
agcgggtccctgcggccgccagagggagggttaaggcgcctgggcgcacagcgagccggctgagggggctgtggcggccgcggcgggcgacatggacaacgcggggaaggagcgtgaggcagtacagctgatggcggaggccgagaagcgagtcaaggcctcccactccttcctccgagggctgtttggaggaaacacaagaatagaagaggcttgtgaaatgtataccagagctgcaaatatgttcaagatggctaaaaattggagtgggaaggtttacaattgcagccaagcaccacattactattgcagagatctatgagactgaacttgtagacattgagaaggctattgcacattatgaacaatctgctgattattacaaaggagaagaatccaacagctcagcaaacaagtgtctgctgaaggtggcagcatatgctgcccagcttgagcagtaccagaaagccattgagatctatgagcaggttggggcaaacacaatggataatcctttgttgaaatacagtgcaaaggattacttcttcaaagctgccctctgccacttcatagtagacgagttgaatgccaagcttgctcttgagaaatatgaggaaatgtttccagcatttactgattcaagagaatgtaaattattgaaagtaagtaatattagaactttgaagaaaaatgcttttgttctgttaggtgacaacacctaagtgggattgggtatgaagtgaagttttaatctataaagtctgctaactgaggggccctggtactttcctgctttcgtattataggtgttcaaatgcaattaaggtcagaaacatgtagttgtgttctgaaataggcacctgagaaatgttactacagaagctagatccctaacttggctcttgacttgtatatgagtatttcctcagttttgtgcaatatttggcaacattggtattatacttaaagtatatatttagaaatgggacttcatcttacagaactgttttttaaaatatttttatgctaccagaaactcctagaagctcatgaagaacagaacagtgaagcttacactgaagcagtgaaggaatttgactcaatatctcgcttggatcagtggctgaccaccatgttgcttcgcatcaaaaagtccatccaaggggatggagaaggagatggagacctaaaatgaaatgtttttgtctttgtggcatgcagctaactcctctttagttttgtcttagggtcaagtgatctttatgggatgcctatttaatggcttaatttgttgcatatgagccagacggcctgtgtattgtttaagctcgccaagtctgtgttgctgtgaaatgaatgaaggagaggctcctgttcatcttgtggtaatgatgggttgtttcatgcttatcagaacccccagcgttttctgagaagtacttcagaatctcattcctcatatttcattggtatttgtggagcctatgtttaatgttgccacgtgtttttatgtcctttttgttggacttgagtactcagcccagttgttctcatagatgctttgcattttctctgtgctttggcatctgaatatgttctttaaatgtgtgtttagtttaggacagttactaggaatgagtttataacttcattagaaatcatttctatttttgttatcctgtgattattttgatggtgctagtgactagtttcttgctttttgtgttgttccgtatgctaacatgtgcatggcaaaaatttagaatagccagggtctgtaggcatcacattgtgaggaagggagctttctggaagtacttgcttcatgtatggatgagtgtcaaagtgaatttgatttgtacttagacacacgcgtttacacacacacacatatcacaagatctgttagaaatggaatttttctctttttctggagatagttttcacttttagttggagtggaaatccctttatatttacattgaagtattttaattggcatagcctgctcattattttcatgtttatacactttcccacgttgaggtggtgtgttctgtgctgtgactatagaaatcttggtcagggctggatagattatctaagtcaagcttgagaatgaatgtatgtaattttcctgtttattgtacatgatgggttaggtggggtgaatgtggtacaggaatgtcctgtatgcccaagtgggcaagaaccccaacttgtttctcaggggacttgattgttctcttagctggtggaatatgttggcttatgtgtttgaactctgtcgtgtttaattggtttatataatatatgtatgctatcttgattcatgaacttgattctattaatttatatgctgatattgtactttagacatacgcttgtctcctgaatgtcctctgaatatttatagttaaatgatttatatttgaaatgtgttgccagacttaacccagcagacactctgacatcacggagcttcactgatgacaggtaacgaaacttcctatgttatgtcaggtagtagtaagtagtattggaatgatgttttcatttttggtggctctcaactggaattggtagtgtttccaggccaagggtcgactgcaggttgtttgagaaatgatgagtaggtcagtctaggaagaaagagaaagtagcaggaaaggaagtgggaagggccagccaaggacagactgtagaggatccacatcaggtggccacgaggacttgcaggctatagttatggtggtgacatgcatgaggtgggctggtagagcaggaagctctgtgatgtcagagcatctactgggactacaggtgcactgtagtccccactactgggggtggcaatgaagacactctgtctgttgggccctagaatttaatgtggatttcctccttccttccaagttctgagattcttaaatgagagctggctgtcttctagaggtaagacctggaatggagtccagttggtactttttcactccctcttagaatctcttatgaaaaaatgatcagagagaaaagtggggttttgtttccccacctaataatatatcctacaaccagccaaatgcacttttgtgaaaatggggtgtgaggagtggttctgcagcttgagtcctctggttttaagtagtttgtttctacttgtttaaagaatcttctggtctgaccacttaaagtaaaaactacatgatttattttcgggcaattatgtttagctttcatcattatactccaacagacccgtctgaaggggtatttttttttaacaataatgtttgtaacattttgttgtgtcaattagagggtcacttgtttgtattgcaataaacactgggaccagttccggggttaagaattaatttttgtttttaatatttcacatgaaaagaatcaaagtaattgtaatggctagaagagacctgccagaagattaaaaaaaagaatgagagaaaagcccagttagtggtgtgcaaacttacttcctttaaatgtcccatggatgtaggacagtgccatgtttcaagatgcctgtgagctaggtcttcaagatttatagaatgttacttatgaacaaaatataattatttatggtacaattcttgtactttagcaaatctggagttagttcatagtcaaagtcagttaatatttcttagaggaaagttttgctttttgtggcaacatttttatagcttgtgtgagttcttttttatttaatgatttgaaagcagtatttttgcacagtcgtgaccgtgtgtggtggcgtcactgtaaccaaagtatatgcaccagcccttgtgcatttattgtttctcctgattttgtggatttaaatgtccaaatgcaaacctttgtgacttcctttggaggacttggcagcacagcatgcccccgtgacctgcctgctgtggtatgagctatgaccaagagcaggcttcctgctccatggagtcctgagttgctctggggcaggggattacgttatgaaaactaaccatgtgtaacaataaatctaccttagcagaaaaagtatgcttgttttattttaacctataaagtggaaattatcagtaatattttgatgagtcttgttgctaaattggcataggtcaaaagtagcttccattgtttcaagttgttcccgttaagattaaggcaacagacgttaatactctctaggctccggtcatttgttgggaattccagggcaccgtaatggttttgcagactgagggtttagaaggaaaccctggtaacttctgttgatgcagtccactaaagtacatgataaccctgcagaccccacattctcatcccttccttgaatcctttagggtctacagttacttgcaaagttgaggaaggcatggttgctggaagactggtggggaggtgaggcacccctaagcctgacactctcctaccccaagaaagtaccactcaactatctggtcagtgtgggcatttattttaattttgcaaaatatctgcacagggagaggagatgcccctggggaagggtcagtcccactgaccactggggcctgaagttctgatgaggaagaggacccatggcgggtagtgcagaccggctcatcctaccatcctatc

SEQ ID NO: 337533 - DNA, 3651 bp, Homo sapiens
agaatatcatacaaagaagttagacagaaagtagaaatacatacaatatgacttcatttatataaagtccaaaacaggagaaaccactgacaatacaaatcagagtgtgaaggaatttgactcaatatctcgcttggatcagtggctgaccaccatgttgcttcgcatcaaaaagtccatccaaggggatggagaaggagatggagacctaaaatgaaatgtttttgtctttgtggcatgcagctaactcctctttagttttgtcttagggtcaagtgatctttatgggatgcctatttaatggcttaatttgttgcatatgagccagacggcctgtgtattgtttaagctcgccaagtctgtgttgctgtgaaatgaatgaaggagaggctcctgttcatcttgtggtaatgatgggttgtttcatgcttatcagaacccccagcgttttctgagaagtacttcagaatctcattcctcatatttcattggtatttgtggagcctatgtttaatgttgccacgtgtttttatgtcctttttgttggacttgagtactcagcccagttgttctcatagatgctttgcattttctctgtgctttggcatctgaatatgttctttaaatgtgtgtttagtttaggacagttactaggaatgagtttataacttcattagaaatcatttctatttttgttatcctgtgattattttgatggtgctagtgactagtttcttgctttttgtgttgttccgtatgctaacatgtgcatggcaaaaatttagaatagccagggtctgtaggcatcacattgtgaggaagggagctttctggaagtacttgcttcatgtatggatgagtgtcaaagtgaatttgatttgtacttagacacacgcgtttacacacacacacatatcacaagatctgttagaaatggaatttttctctttttctggagatagttttcacttttagttggagtggaaatccctttatatttacattgaagtattttaattggcatagcctgctcattattttcatgtttatacactttcccacgttgaggtggtgtgttctgtgctgtgactatagaaatcttggtcagggctggatagattatctaagtcaagcttgagaatgaatgtatgtaattttcctgtttattgtacatgatgggttaggtggggtgaatgtggtacaggaatgtcctgtatgcccaagtgggcaagaaccccaacttgtttctcaggggacttgattgttctcttagctggtggaatatgttggcttatgtgtttgaactctgtcgtgtttaattggtttatataatatatgtatgctatcttgattcatgaacttgattctattaatttatatgctgatattgtactttagacatacgcttgtctcctgaatgtcctctgaatatttatagttaaatgatttatatttgaaatgtgttgccagacttaacccagcagacactctgacatcacggagcttcactgatgacaggtaacgaaacttcctatgttatgtcaggtagtagtaagtagtattggaatgatgttttcatttttggtggctctcaactggaattggtagtgtttccaggccaagggtcgactgcaggttgtttgagaaatgatgagtaggtcagtctaggaagaaagagaaagtagcaggaaaggaagtgggaagggccagccaaggacagactgtagaggatccacatcaggtggccacgaggacttgcaggctatagttatggtggtgacatgcatgaggtgggctggtagagcaggaagctctgtgatgtcagagcatctactgggactacaggtgcactgtagtccccactactgggggtggcaatgaagacactctgtctgttgggccctagaatttaatgtggatttcctccttccttccaagttctgagattcttaaatgagagctggctgtcttctagaggtaagacctggaatggagtccagttggtactttttcactccctcttagaatctcttatgaaaaaatgatcagagagaaaagtggggttttgtttccccacctaataatatatcctacaaccagccaaatgcacttttgtgaaaatggggtgtgaggagtggttctgcagcttgagtcctctggttttaagtagtttgtttctacttgtttaaagaatcttctggtctgaccacttaaagtaaaaactacatgatttattttcgggcaattatgtttagctttcatcattatactccaacagacccgtctgaaggggtatttttttttaacaataatgtttgtaacattttgttgtgtcaattagagggtcacttgtttgtattgcaataaacactgggaccagttccggggttaagaattaatttttgtttttaatatttcacatgaaaagaatcaaagtaattgtaatggctagaagagacctgccagaagattaaaaaaaagaatgagagaaaagcccagttagtggtgtgcaaacttacttcctttaaatgtcccatggatgtaggacagtgccatgtttcaagatgcctgtgagctaggtcttcaagatttatagaatgttacttatgaacaaaatataattatttatggtacaattcttgtactttagcaaatctggagttagttcatagtcaaagtcagttaatatttcttagaggaaagttttgctttttgtggcaacatttttatagcttgtgtgagttcttttttatttaatgatttgaaagcagtatttttgcacagtcgtgaccgtgtgtggtggcgtcactgtaaccaaagtatatgcaccagcccttgtgcatttattgtttctcctgattttgtggatttaaatgtccaaatgcaaacctttgtgacttcctttggaggacttggcagcacagcatgcccccgtgacctgcctgctgtggtatgagctatgaccaagagcaggcttcctgctccatggagtcctgagttgctctggggcaggggattacgttatgaaaactaaccatgtgtaacaataaatctaccttagcagaaaaagtatgcttgttttattttaacctataaagtggaaattatcagtaatattttgatgagtcttgttgctaaattggcataggtcaaaagtagcttccattgtttcaagttgttcccgttaagattaaggcaacagacgttaatactctctaggctccggtcatttgttgggaattccagggcaccgtaatggttttgcagactgagggtttagaaggaaaccctggtaacttctgttgatgcagtccactaaagtacatgataaccctgcagaccccacattctcatcccttccttgaatcctttagggtctacagttacttgcaaagttgaggaaggcatggttgctggaagactggtggggaggtgaggcacccctaagcctgacactctcctaccccaagaaagtaccactcaactatctggtcagtgtgggcatttattttaattttgcaaaatatctgcacagggagaggagatgcccctggggaagggtcagtcccactgaccactggggcctgaagttctgatgaggaagaggacccatggcgggtagtgcagaccggctcatcctaccatcctatc

SEQ ID NO: 337534 - DNA, 3291 bp, Homo sapiens
cggttagcacactgcaacattaaacagaggctcctgttcatcttgtggtaatgatgggttgtttcatgcttatcagaacccccagcgttttctgagaagtacttcagaatctcattcctcatatttcattggtatttgtggagcctatgtttaatgttgccacgtgtttttatgtcctttttgttggacttgagtactcagcccagttgttctcatagatgctttgcattttctctgtgctttggcatctgaatatgttctttaaatgtgtgtttagtttaggacagttactaggaatgagtttataacttcattagaaatcatttctatttttgttatcctgtgattattttgatggtgctagtgactagtttcttgctttttgtgttgttccgtatgctaacatgtgcatggcaaaaatttagaatagccagggtctgtaggcatcacattgtgaggaagggagctttctggaagtacttgcttcatgtatggatgagtgtcaaagtgaatttgatttgtacttagacacacgcgtttacacacacacacatatcacaagatctgttagaaatggaatttttctctttttctggagatagttttcacttttagttggagtggaaatccctttatatttacattgaagtattttaattggcatagcctgctcattattttcatgtttatacactttcccacgttgaggtggtgtgttctgtgctgtgactatagaaatcttggtcagggctggatagattatctaagtcaagcttgagaatgaatgtatgtaattttcctgtttattgtacatgatgggttaggtggggtgaatgtggtacaggaatgtcctgtatgcccaagtgggcaagaaccccaacttgtttctcaggggacttgattgttctcttagctggtggaatatgttggcttatgtgtttgaactctgtcgtgtttaattggtttatataatatatgtatgctatcttgattcatgaacttgattctattaatttatatgctgatattgtactttagacatacgcttgtctcctgaatgtcctctgaatatttatagttaaatgatttatatttgaaatgtgttgccagacttaacccagcagacactctgacatcacggagcttcactgatgacaggtaacgaaacttcctatgttatgtcaggtagtagtaagtagtattggaatgatgttttcatttttggtggctctcaactggaattggtagtgtttccaggccaagggtcgactgcaggttgtttgagaaatgatgagtaggtcagtctaggaagaaagagaaagtagcaggaaaggaagtgggaagggccagccaaggacagactgtagaggatccacatcaggtggccacgaggacttgcaggctatagttatggtggtgacatgcatgaggtgggctggtagagcaggaagctctgtgatgtcagagcatctactgggactacaggtgcactgtagtccccactactgggggtggcaatgaagacactctgtctgttgggccctagaatttaatgtggatttcctccttccttccaagttctgagattcttaaatgagagctggctgtcttctagaggtaagacctggaatggagtccagttggtactttttcactccctcttagaatctcttatgaaaaaatgatcagagagaaaagtggggttttgtttccccacctaataatatatcctacaaccagccaaatgcacttttgtgaaaatggggtgtgaggagtggttctgcagcttgagtcctctggttttaagtagtttgtttctacttgtttaaagaatcttctggtctgaccacttaaagtaaaaactacatgatttattttcgggcaattatgtttagctttcatcattatactccaacagacccgtctgaaggggtatttttttttaacaataatgtttgtaacattttgttgtgtcaattagagggtcacttgtttgtattgcaataaacactgggaccagttccggggttaagaattaatttttgtttttaatatttcacatgaaaagaatcaaagtaattgtaatggctagaagagacctgccagaagattaaaaaaaagaatgagagaaaagcccagttagtggtgtgcaaacttacttcctttaaatgtcccatggatgtaggacagtgccatgtttcaagatgcctgtgagctaggtcttcaagatttatagaatgttacttatgaacaaaatataattatttatggtacaattcttgtactttagcaaatctggagttagttcatagtcaaagtcagttaatatttcttagaggaaagttttgctttttgtggcaacatttttatagcttgtgtgagttcttttttatttaatgatttgaaagcagtatttttgcacagtcgtgaccgtgtgtggtggcgtcactgtaaccaaagtatatgcaccagcccttgtgcatttattgtttctcctgattttgtggatttaaatgtccaaatgcaaacctttgtgacttcctttggaggacttggcagcacagcatgcccccgtgacctgcctgctgtggtatgagctatgaccaagagcaggcttcctgctccatggagtcctgagttgctctggggcaggggattacgttatgaaaactaaccatgtgtaacaataaatctaccttagcagaaaaagtatgcttgttttattttaacctataaagtggaaattatcagtaatattttgatgagtcttgttgctaaattggcataggtcaaaagtagcttccattgtttcaagttgttcccgttaagattaaggcaacagacgttaatactctctaggctccggtcatttgttgggaattccagggcaccgtaatggttttgcagactgagggtttagaaggaaaccctggtaacttctgttgatgcagtccactaaagtacatgataaccctgcagaccccacattctcatcccttccttgaatcctttagggtctacagttacttgcaaagttgaggaaggcatggttgctggaagactggtggggaggtgaggcacccctaagcctgacactctcctaccccaagaaagtaccactcaactatctggtcagtgtgggcatttattttaattttgcaaaatatctgcacagggagaggagatgcccctggggaagggtcagtcccactgaccactggggcctgaagttctgatgaggaagaggacccatggcgggtagtgcagaccggctcatcctaccatcctatc

SEQ ID NO: 337535 - DNA, 3896 bp, Homo sapiens
agcgggtccctgcggccgccagagggagggttaaggcgcctgggcgcacagcgagccggctgagggggctgtggcggccgcggcgggcgacatggacaacgcggggaaggagcgtgaggcagtacagctgatggcggaggccgagaagcgagtcaaggcctcccactccttcctccgagggctgtttggaggaaacacaagaatagaagaggcttgtgaaatgtataccagagctgcaaatatgttcaagatggctaaaaattggagtgctgcaggaaacgcattttgtcaggcagccaagctccacatgcagcttcagagcaaacatgactctgctaccagctttgtggatgctggaaatgcttacaaaaaggcagatccccaagaggctatcaactgcttaaatgcagccatcgacatttacacagacatgggaaggtttacaattgcagccaagcaccacattactattgcagagatctatgagactgaacttgtagacattgagaaggctattgcacattatgaacaatctgctgattattacaaaggagaagaatccaacagctcagcaaacaagtgtctgctgaaggtggcagcatatgctgcccagcttgagcagtaccagaaagccattgagatctatgagcaggttggggcaaacacaatggataatcctttgttgaaatacagtgcaaaggattacttcttcaaagctgccctctgccacttcatagtagacgagttgaatgccaagcttgctcttgagaaatatgaggaaatgtttccagcatttactgattcaagagaatgtaaattattgaaaaaactcctagaagctcatgaagaacagaacagtgaagcttacactgaagcagtgaaggaatttgactcaatatctcgcttggatcagtggctgaccaccatgttgcttcgcatcaaaaagtccatccaaggggatggagaaggagatggagacctaaaatgaaatgtttttgtctttgtggcatgcagctaactcctctttagttttgtcttagggtcaagtgatctttatgggatgcctatttaatggcttaatttgttgcatatgagccagacggcctgtgtattgtttaagctcgccaagtctgtgttgctgtgaaatgaatgaaggagaggctcctgttcatcttgtggtaatgatgggttgtttcatgcttatcagaacccccagcgttttctgagaagtacttcagaatctcattcctcatatttcattggtatttgtggagcctatgtttaatgttgccacgtgtttttatgtcctttttgttggacttgagtactcagcccagttgttctcatagatgctttgcattttctctgtgctttggcatctgaatatgttctttaaatgtgtgtttagtttaggacagttactaggaatgagtttataacttcattagaaatcatttctatttttgttatcctgtgattattttgatggtgctagtgactagtttcttgctttttgtgttgttccgtatgctaacatgtgcatggcaaaaatttagaatagccagggtctgtaggcatcacattgtgaggaagggagctttctggaagtacttgcttcatgtatggatgagtgtcaaagtgaatttgatttgtacttagacacacgcgtttacacacacacacatatcacaagatctgttagaaatggaatttttctctttttctggagatagttttcacttttagttggagtggaaatccctttatatttacattgaagtattttaattggcatagcctgctcattattttcatgtttatacactttcccacgttgaggtggtgtgttctgtgctgtgactatagaaatcttggtcagggctggatagattatctaagtcaagcttgagaatgaatgtatgtaattttcctgtttattgtacatgatgggttaggtggggtgaatgtggtacaggaatgtcctgtatgcccaagtgggcaagaaccccaacttgtttctcaggggacttgattgttctcttagctggtggaatatgttggcttatgtgtttgaactctgtcgtgtttaattggtttatataatatatgtatgctatcttgattcatgaacttgattctattaatttatatgctgatattgtactttagacatacgcttgtctcctgaatgtcctctgaatatttatagttaaatgatttatatttgaaatgtgttgccagacttaacccagcagacactctgacatcacggagcttcactgatgacaggtaacgaaacttcctatgttatgtcaggtagtagtaagtagtattggaatgatgttttcatttttggtggctctcaactggaattggtagtgtttccaggccaagggtcgactgcaggttgtttgagaaatgatgagtaggtcagtctaggaagaaagagaaagtagcaggaaaggaagtgggaagggccagccaaggacagactgtagaggatccacatcaggtggccacgaggacttgcaggctatagttatggtggtgacatgcatgaggtgggctggtagagcaggaagctctgtgatgtcagagcatctactgggactacaggtgcactgtagtccccactactgggggtggcaatgaagacactctgtctgttgggccctagaatttaatgtggatttcctccttccttccaagttctgagattcttaaatgagagctggctgtcttctagaggtaagacctggaatggagtccagttggtactttttcactccctcttagaatctcttatgaaaaaatgatcagagagaaaagtggggttttgtttccccacctaataatatatcctacaaccagccaaatgcacttttgtgaaaatggggtgtgaggagtggttctgcagcttgagtcctctggttttaagtagtttgtttctacttgtttaaagaatcttctggtctgaccacttaaagtaaaaactacatgatttattttcgggcaattatgtttagctttcatcattatactccaacagacccgtctgaaggggtatttttttttaacaataatgtttgtaacattttgttgtgtcaattagagggtcacttgtttgtattgcaataaacactgggaccagttccggggttaagaattaatttttgtttttaatatttcacatgaaaagaatcaaagtaattgtaatggctagaagagacctgccagaagattaaaaaaaagaatgagagaaaagcccagttagtggtgtgcaaacttacttcctttaaatgtcccatggatgtaggacagtgccatgtttcaagatgcctgtgagctaggtcttcaagatttatagaatgttacttatgaacaaaatataattatttatggtacaattcttgtactttagcaaatctggagttagttcatagtcaaagtcagttaatatttcttagaggaaagttttgctttttgtggcaacatttttatagcttgtgtgagttcttttttatttaatgatttgaaagcagtatttttgcacagtcgtgaccgtgtgtggtggcgtcactgtaaccaaagtatatgcaccagcccttgtgcatttattgtttctcctgattttgtggatttaaatgtccaaatgcaaacctttgtgacttcctttggaggacttggcagcacagcatgcccccgtgacctgcctgctgtggtatgagctatgaccaagagcaggcttcctgctccatggagtcctgagttgctctggggcaggggattacgttatgaaaactaaccatgtgtacatatacacgttgtcgtttgtgggcccttcggtgggggtgcggtctgctgcccgtgcgtggggtggcttgtgcggggtggca

SEQ ID NO: 337536 - DNA, 3538 bp, Homo sapiens
  misc_feature (3509)..(3509): n is a, c, g, or t
agcgggtccctgcggccgccagagggagggttaaggcgcctgggcgcacagcgagccggctgagggggctgtggcggccgcggcgggcgacatggacaacgcggggaaggagcgtgaggcagtacagctgatggcggaggccgagaagcgagtcaaggcctcccactccttcctccgagggctgtttggaggaaacacaagaatagaagaggcttgtgaaatgtataccagagctgcaaatatgttcaagatggctaaaaattggagtgctgcaggaaacgcattttgtcaggcagccaagctccacatgcagcttcagagcaaacatgactctgctaccagctttgtggatgctggaaatgcttacaaaaaggcagatccccaagaggctatcaactgcttaaatgcagccatcgacatttacacagacatgggaaggtttacaattgcagccaagcaccacattactattgcagagatctatgagactgaacttgtagacattgagaaggctattgcacattatgaacaatctgctgattattacaaaggagaagaatccaacagctcagcaaacaagtgtctgctgaaggtggcagcatatgctgcccagcttgagcagtaccagaaagccattgagatctatgagcaggttggggcaaacacaatggataatcctttgttgaaatacagtgcaaaggattacttcttcaaagctgccctctgccacttcatagtagacgagttgaatgccaagcttgctcttgagaaatatgaggaaatgtttccagcatttactgattcaagagaatgtaaattattgaaaaaactcctagaagctcatgaagaacagaacagtgaagcttacactgaagcagtgaaggaatttgactcaatatctcgcttggatcagtggctgaccaccatgttgcttcgcatcaaaaagtccatccaaggggatggagaaggagatggagacctaaaatgaaatgtttttgtctttgtggcatgcagctaactcctctttagttttgtcttagggtcaagtgatctttatgggatgcctatttaatggcttaatttgttgcatatgagccagacggcctgtgtattgtttaagctcgccaagtctgtgttgctgtgaaatgaatgaaggagaggctcctgttcatcttgtggtaatgatgggttgtttcatgcttatcagaacccccagcgttttctgagaagtacttcagaatctcattcctcatatttcattggtatttgtggagcctatgtttaatgttgccacgtgtttttatgtcctttttgttggacttgagtactcagcccagttgttctcatagatgctttgcattttctctgtgctttggcatctgaatatgttctttaaatgtgtgtttagtttaggacagttactaggaatgagtttataacttcattagaaatcatttctatttttgttatcctgtgattattttgatggtgctagtgactagtttcttgctttttgtgttgttccgtatgctaacatgtgcatggcaaaaatttagaatagccagggtctgtaggcatcacattgtgaggaagggagctttctggaagtacttgcttcatgtatggatgagtgtcaaagtgaatttgatttgtacttagacacacgcgtttacacacacacacatatcacaagatctgttagaaatggaatttttctctttttctggagatagttttcacttttagttggagtggaaatccctttatatttacattgaagtattttaattggcatagcctgctcattattttcatgtttatacactttcccacgttgaggtggtgtgttctgtgctgtgactatagaaatcttggtcagggctggatagattatctaagtcaagcttgagaatgaatgtatgtaattttcctgtttattgtacatgatgggttaggtggggtgaatgtggtacaggaatgtcctgtatgcccaagtgggcaagaaccccaacttgtttctcaggggacttgattgttctcttagctggtggaatatgttggcttatgtgtttgaactctgtcgtgtttaattggtttatataatatatgtatgctatcttgattcatgaacttgattctattaatttatatgctgatattgtactttagacatacgcttgtctcctgaatgtcctctgaatatttatagttaaatgatttatatttgaaatgtgttgccagacttaacccagcagacactctgacatcacggagcttcactgatgacaggtaacgaaacttcctatgttatgtcaggtagtagtaagtagtattggaatgatgttttcatttttggtggctctcaactggaattggtagtgtttccaggccaagggtcgactgcaggttgtttgagaaatgatgagtaggtcagtctaggaagaaagagaaagtagcaggaaaggaagtgggaagggccagccaaggacagactgtagaggatccacatcaggtggccacgaggacttgcaggctatagttatggtggtgacatgcatgaggtgggctggtagagcaggaagctctgtgatgtcagagcatctactgggactacaggtgcactgtagtccccactactgggggtggcaatgaagacactctgtctgttgggccctagaatttaatgtggatttcctccttccttccaagttctgagattcttaaatgagagctggctgtcttctagaggtaagacctggaatggagtccagttggtactttttcactccctcttagaatctcttatgaaaaaatgatcagagagaaaagtggggttttgtttccccacctaataatatatcctacaaccagccaaatgcacttttgtgaaaatggggtgtgaggagtggttctgcagcttgagtcctctggttttaagtagtttgtttctacttgtttaaagaatcttctggtctgaccacttaaagtaaaaactacatgatttattttcgggcaattatgtttagctttcatcattatactccaacagacccgtctgaaggggtatttttttttaacaataatgtttgtaacattttgttgtgtcaattagagggtcacttgtttgtattgcaataaacactgggaccagttccggggttaagaattaatttttgtttttaatatttcacatgaaaagaatcaaagtaattgtaatggctagaagagacctgccagaagattaaaaaaaagaatgagagaaaagcccagttagtggtgtgcaaacttacttcctttaaatgtcccatggatgtaggacagtgccatgtttcaagatgcctgtgagctaggtcttcaagatttatagaatgttacttatgaacaaaatataattatttatggtacaattcttgtactttagcaaatctggagttagttcatagtcaaagtcagttaatatttcttagaggaaagttttgctttttgtggcaacatttttatagccagtntggagagacgggggatcctctaggcagcc

SEQ ID NO: 337537 - DNA, 2006 bp, Homo sapiens
agcgggtccctgcggccgccagagggagggttaaggcgcctgggcgcacagcgagccggctgagggggctgtggcggccgcggcgggcgacatggacaacgcggggaaggagcgtgaggcagtacagctgatggcggaggccgagaagcgagtcaaggcctcccactccttcctccgagggctgtttggaggaaacacaagaatagaagaggcttgtgaaatgtataccagagctgcaaatatgttcaagatggctaaaaattggagtgctgcaggaaacgcattttgtcaggcagccaagctccacatgcagcttcagagcaaacatgactctgctaccagctttgtggatgctggaaatgcttacaaaaaggcagatccccaagaggctatcaactgcttaaatgcagccatcgacatttacacagacatgggaaggtttacaattgcagccaagcaccacattactattgcagagatctatgagactgaacttgtagacattgagaaggctattgcacattatgaacaatctgctgattattacaaaggagaagaatccaacagctcagcaaacaagtgtctgctgaaggtggcagcatatgctgcccagcttgagcagtaccagaaagccattgagatctatgagcaggttggggcaaacacaatggataatcctttgttgaaatacagtgcaaaggattacttcttcaaagctgccctctgccacttcatagtagacgagttgaatgccaagcttgctcttgagaaatatgaggaaatgtttccagcatttactgattcaagagaatgtaaattattgaaaaaactcctagaagctcatgaagaacagaacagtgaagcttacactgaagcagtgaaggaatttgactcaatatctcgcttggatcagtggctgaccaccatgttgcttcgcatcaaaaagtccatccaaggggatggagaaggagatggagacctaaaatgaaatgtttttgtctttgtggcatgcagctaactcctctttagttttgtcttagggtcaagtgatctttatgggatgcctatttaatggcttaatttgttgcatatgagccagacggcctgtgtattgtttaagctcgccaagtctgtgttgctgtgaaatgaatgaaggagaggctcctgttcatcttgtggtaatgatgggttgtttcatgcttatcagaacccccagcgttttctgagaagtacttcagaatctcattcctcatatttcattggtatttgtggagcctatgtttaatgttgccacgtgtttttatgtcctttttgttggacttgagtactcagcccagttgttctcatagatgctttgcattttctctgtgctttggcatctgaatatgttctttaaatgtgtgtttagtttaggacagttactaggaatgagtttataacttcattagaaatcatttctatttttgttatcctgtgattattttgatggtgctagtgactagtttcttgctttttgtgttgttccgtatgctaacatgtgcatggcaaaaatttagaatagccagggtctgtaggcatcacattgtgaggaagggagctttctggaagtacttgcttcatgtatggatgagtgtcaaagtgaatttgatttgtacttagacacacgcgtttacacacacacacatatcacaagatctgttagaaatggaatttttctctttttctggagatagttttcacttttagttggagtggaaatccctttatatttacattgaagtattttaattggcatagcctgctcattattttcatgtttatacactttcccacgttgaggtggtgtgttctgtgctgtgactatagaaatcttgaatagggagctttgtcaagggatgacctgagtcccttcctcaattataaaaagacaccaccgggccgggcatggtggctcatgcctgtaatcccagcactttgggaggcggaggtgtcagaagtgagaagcg

SEQ ID NO: 337538 - DNA, 813 bp, Homo sapiens
agcgggtccctgcggccgccagagggagggttaaggcgcctgggcgcacagcgagccggctgagggggctgtggcggccgcggcgggcgacatggacaacgcggggaaggagcgtgaggcagtacagctgatggcggaggccgagaagcgagtcaaggcctcccactccttcctccgagggctgtttggaggaaacacaagaatagaagaggcttgtgaaatgtataccagagctgcaaatatgttcaagatggctaaaaattggagtgctgcaggaaacgcattttgtcaggcagccaagctccacatgcagcttcagagcaaacatgactctgctaccagctttgtggatgctggaaatgcttacaaaaaggcagatccccaagggaaggtttacaattgcagccaagcaccacattactattgcagagatctatgagactgaacttgtagacattgagaaggctattgcacattatgaacaatctgctgattattacaaaggagaagaatccaacagctcagcaaacaagtgtctgctgaaggtggcagcatatgctgcccagcttgagcagtaccagaaagccattgagatctatgagcaggttggggcaaacacaatggataatcctttgttgaaatacagtgcaaaggattacttcttcaaagctgccctctgccacttcatagtagacgagttgaatgccaagcttgctccttgagacaatattgaggaaaatggtttcccaggcattttactggattccagagaatgctacttattgaaaaaaactcctagaagctcctgacgaa

SEQ ID NO: 337539 - DNA, 4422 bp, Homo sapiens
agcgggtccctgcggccgccagagggagggttaaggcgcctgggcgcacagcgagccggctgagggggctgtggcggccgcggcgggcgacatggacaacgcggggaaggagcgtgaggcagtacagctgatggcggaggccgagaagcgagtcaaggcctcccactccttcctccgagggctgtttggaggaaacacaagaatagaagaggcttgtgaaatgtataccagagctgcaaatatgttcaagatggctaaaaattggagtgctgcaggaaacgcattttgtcaggcagccaagctccacatgcagcttcagagcaaacatgactctgctaccagctttgtggatgctggaaatgcttacaaaaaggcagatccccaagaggctatcaactgcttaaatgcagccatcgacatttacacagacatgggaaggtttacaattgcagccaagcaccacattactattgcagagatctatgagactgaacttgtagacattgagaaggctattgcacattatgaacaatctgctgattattacaaaggagaagaatccaacagctcagcaaacaagtgtctgctgaaggtggcagcatatgctgcccagcttgagcagtaccagaaagccattgagatctatgagcaggttggggcaaacacaatggataatcctttgttgaaatacagtgcaaaggattacttcttcaaagctgccctctgccacttcatagtagacgagttgaatgccaagcttgctcttgagaaatatgaggaaatgtttccagcatttactgattcaagagaatgtaaattattgaaaaaactcctagaagctcatgaagaacagaacagtgaagcttacactgaagcagtgaaggaatttgactcaatatctcgcttggatcagtggctgaccaccatgttgcttcgcatcaaaaagtccatccaaggggatggagaaggagatggagacctaaaatgaaatgtttttgtctttgtggcatgcagctaactcctctttagttttgtcttagggtcaagtgatctttatgggatgcctatttaatggcttaatttgttgcatatgagccagacggcctgtgtattgtttaagctcgccaagtctgtgttgctgtgaaatgaatgaaggagaggctcctgttcatcttgtggtaatgatgggttgtttcatgcttatcagaacccccagcgttttctgagaagtacttcagaatctcattcctcatatttcattggtatttgtggagcctatgtttaatgttgccacgtgtttttatgtcctttttgttggacttgagtactcagcccagttgttctcatagatgctttgcattttctctgtgctttggcatctgaatatgttctttaaatgtgtgtttagtttaggacagttactaggaatgagtttataacttcattagaaatcatttctatttttgttatcctgtgattattttgatggtgctagtgactagtttcttgctttttgtgttgttccgtatgctaacatgtgcatggcaaaaatttagaatagccagggtctgtaggcatcacattgtgaggaagggagctttctggaagtacttgcttcatgtatggatgagtgtcaaagtgaatttgatttgtacttagacacacgcgtttacacacacacacatatcacaagatctgttagaaatggaatttttctctttttctggagatagttttcacttttagttggagtggaaatccctttatatttacattgaagtattttaattggcatagcctgctcattattttcatgtttatacactttcccacgttgaggtggtgtgttctgtgctgtgactatagaaatcttggtcagggctggatagattatctaagtcaagcttgagaatgaatgtatgtaattttcctgtttattgtacatgatgggttaggtggggtgaatgtggtacaggaatgtcctgtatgcccaagtgggcaagaaccccaacttgtttctcaggggacttgattgttctcttagctggtggaatatgttggcttatgtgtttgaactctgtcgtgtttaattggtttatataatatatgtatgctatcttgattcatgaacttgattctattaatttatatgctgatattgtactttagacatacgcttgtctcctgaatgtcctctgaatatttatagttaaatgatttatatttgaaatgtgttgccagacttaacccagcagacactctgacatcacggagcttcactgatgacaggtaacgaaacttcctatgttatgtcaggtagtagtaagtagtattggaatgatgttttcatttttggtggctctcaactggaattggtagtgtttccaggccaagggtcgactgcaggttgtttgagaaatgatgagtaggtcagtctaggaagaaagagaaagtagcaggaaaggaagtgggaagggccagccaaggacagactgtagaggatccacatcaggtggccacgaggacttgcaggctatagttatggtggtgacatgcatgaggtgggctggtagagcaggaagctctgtgatgtcagagcatctactgggactacaggtgcactgtagtccccactactgggggtggcaatgaagacactctgtctgttgggccctagaatttaatgtggatttcctccttccttccaagttctgagattcttaaatgagagctggctgtcttctagaggtaagacctggaatggagtccagttggtactttttcactccctcttagaatctcttatgaaaaaatgatcagagagaaaagtggggttttgtttccccacctaataatatatcctacaaccagccaaatgcacttttgtgaaaatggggtgtgaggagtggttctgcagcttgagtcctctggttttaagtagtttgtttctacttgtttaaagaatcttctggtctgaccacttaaagtaaaaactacatgatttattttcgggcaattatgtttagctttcatcattatactccaacagacccgtctgaaggggtatttttttttaacaataatgtttgtaacattttgttgtgtcaattagagggtcacttgtttgtattgcaataaacactgggaccagttccggggttaagaattaatttttgtttttaatatttcacatgaaaagaatcaaagtaattgtaatggctagaagagacctgccagaagattaaaaaaaagaatgagagaaaagcccagttagtggtgtgcaaacttacttcctttaaatgtcccatggatgtaggacagtgccatgtttcaagatgcctgtgagctaggtcttcaagatttatagaatgttacttatgaacaaaatataattatttatggtacaattcttgtactttagcaaatctggagttagttcatagtcaaagtcagttaatatttcttagaggaaagttttgctttttgtggcaacatttttatagcttgtgtgagttcttttttatttaatgatttgaaagcagtatttttgcacagtcgtgaccgtgtgtggtggcgtcactgtaaccaaagtatatgcaccagcccttgtgcatttattgtttctcctgattttgtggatttaaatgtccaaatgcaaacctttgtgacttcctttggaggacttggcagcacagcatgcccccgtgacctgcctgctgtggtatgagctatgaccaagagcaggcttcctgctccatggagtcctgagttgctctggggcaggggattacgttatgaaaactaaccatgtgtaacaataaatctaccttagcagaaaaagtatgcttgttttattttaacctataaagtggaaattatcagtaatattttgatgagtcttgttgctaaattggcataggtcaaaagtagcttccattgtttcaagttgttcccgttaagattaaggcaacagacgttaatactctctaggctccggtcatttgttgggaattccagggcaccgtaatggttttgcagactgagggtttagaaggaaaccctggtaacttctgttgatgcagtccactaaagtacatgataaccctgcagaccccacattctcatcccttccttgaatcctttagggtctacagttacttgcaaagttgaggaaggcatggttgctggaagactggtggggaggtgaggcacccctaagcctgacactctcctaccccaagaaagtaccactcaactatctggtcagtgtgggcatttattttaattttgcaaaatatctgcacagggagaggagatgcccctggggaagggtcagtcccactgaccactggggcctgaagttctgatgaggaagaggacccatggcgggtagtgcagaccggctcatcctaccatcctatc

SEQ ID NO: 337540 - DNA, 1484 bp, Homo sapiens
  misc_feature (1343)..(1343): n is a, c, g, or t
  misc_feature (1392)..(1392): n is a, c, g, or t
  misc_feature (1483)..(1483): n is a, c, g, or t
agcgggtccctgcggccgccagagggagggttaaggcgcctgggcgcacagcgagccggctgagggggctgtggcggccgcggcgggcgacatggacaacgcggggaaggagcgtgaggcagtacagctgatggcggaggccgagaagcgagtcaaggcctcccactccttcctccgagggctgtttggaggaaacacaagaatagaagaggcttgtgaaatgtataccagagctgcaaatatgttcaagatggctaaaaattggagtgctgcaggaaacgcattttgtcaggcagccaagctccacatgcagcttcagagcaaacatgactctgctaccagctttgtggatgctggaaatgcttacaaaaaggcagatccccaagaggctatcaactgcttaaatgcagccatcgacatttacacagacatgggaaggtttacaattgcagccaagcaccacattactattgcagagatctatgagactgaacttgtagacattgagaaggctattgcacattatgaacaatctgctgattattacaaaggagaagaatccaacagctcagcaaacaagtgtctgctgaaggtggcagcatatgctgcccagcttgagcagtaccagaaagccattgagatctatgagcaggttggggcaaacacaatggataatcctttgttgaaatacagtgcaaaggattacttcttcaaagctgccctctgccacttcatagtagacgagttgaatgccaagcttgctcttgagaaatatgaggaaatgtttccagcatttactgattcaagagaatgtaaattattgaaaaaactcctagaagctcatgaagaacagaacagtgaagcttacactgaagcagtaagttatgcttttgggacatggtacattatttgaagatttaagttaaagaaacttcttttccttttcattatgtgaattctaaacatttatttgaacatgactccagcataccttaagttgtattttccaaacgtcaccttttatatatcacacaaattaaacagttccattagccatgctgagattcgacttacactcaaaactaatttagctgtgagactagttcaggagcaaatattccatttatattcttataatttgctgttttaattttttcttttgaaaataatctgacccataaataagtataaagtaaaattagttaaggccgggcacggcgtctcacacctgtaatcctggcactttcggaggccgaggcaggcagatcatgagtcaggaaattgagaccatcctcgccaacatggtgaaaccccgtctctactaaaaatataaaaattagccnggcatgctggcacacgcctgtagtcccagctactcgggaggctgaggcnggagaatcgcttgaacccgggaggcagaggttgcagtgagctgagattgcaccactgcactccagcctggtgacagagcgagactctgtcnc

SEQ ID NO: 337541 - DNA, 537 bp, Homo sapiens
aatttattatgtaaatctggaatcctacactaataaggtcatttgctgtttccagtagaataaaaacttgaagccatgctttttgaccttgatgtctgcagtaactgttcttttcaagcttgctgagaagacagaaagcaatgttgactttcaagggggaaaataaatatttgaagatagggtttagttgtctcagtttgcactgtcagcataagcaaagaccttcccttattcgctttgaaaaaaaaaccttatttttagagtaagggaaggaaacatgtctgttgagaaaaccttgctaaattttgtggaagtgcaaaattctctccttagtcctctccttttctgtagctaacaatagtaacagtgattacagtcagcatttgaatgtgtatgagccagaccctgaactgtttacccttaaaatacctccattagttgttactctcattgctacaaatgatgagactgaggtttagagaggttatttatcacttaaagccataataaatttagggttgatggggtaccgagctc

SEQ ID NO: 337542 - DNA, 936 bp, Homo sapiens
agcggggtactgaaaaaagtctatacgcaataagtaagcccaaagaggcatgtttgcttggcgatgcccagcagataagccaggcaaacctcggtgtgatcgaagaagccaatttgagactcagcctagtccaggcaagctactggcacctgctgctctcaactaacctccacacaatggtgttcgcattttggaaggtctttctgatcctaagctgccttgcaggtcaggttagtgtggtgcaagtgaccatcccagacggtttcgtgaacgtgactgttggatctaatgtcactctcatctgcatctacaccaccactgtggcctcccgagaacagctttccatccagtggtctttcttccataagaaggagatggagccaatttctatttacttttctcaaggtggacaagctgtagccatcgggcaatttaaagatcgaattacagggtccaacgatccaggtaatgcatctatcactatctcgcatatgcagccagcagacagtggaatttacatctgcgatgttaacaaccccccagactttctcggccaaaaccaaggcatcctcaacgtcagtgtgttagtgaaaccttctaagcccctttgtagcgttcaaggaagaccagaaactggccacactatttccctttcctgtctctctgcgcttggaacaccttcccctgtgtactactggcataaacttgagggaagagacatcgtgccagtgaaagaaaacttcaacccaaccaccgggattttggtcattggaaatctgacaaattttgaacaaggttattaccagtgtactgccatcaacagacttggcaatagttcctgcgaaatcgatctcacttcttcacgtgagttgaccatacaactttaacggtttctccttaaatcaagtagtctgggcctgtcagacaaataaatta

SEQ ID NO: 337543 - DNA, 478 bp, Homo sapiens
ccgagatgcagcaacgacgtcacgggccatgtggacgtcacacatattaatgtcacacagacgcggcgatggcatcacacagacggtgatgatgtcacacacagacacagtgaccacacacaccatgacgacgacacctatagattatggcacctacatcacaagcacgcatgcccgttcacacacactttctacccaattctcacctagtgtcacgttcccccgggaagttcctggtacttcccgggggagggaagagacatcgtgccagtgaaagaaaacttcaacccaaccaccgggattttggtcattggaaatctgacaaattttgaacaaggttattaccagtgtactgccatcaacagacttggcaatagttcctgcgaaatcgatctcacttcttcacgtgagttgaccatacaactttaacggtttctccttaaatcaagtagtctgggcctgtcagacaaataaatta

SEQ ID NO: 337544 - DNA, 1006 bp, Homo sapiens
atgctgagcgctggcctaggactgctgatgctggtggcagtggttgaatttctcatcggtttaattggaaatggaagcctggtggtctggagttttagagaatggatcagaaaattcaactggtcctcatataacctcattatcctgggcctggctggctgccgatttctcctgcagtggctgatcattttggacttaagcttgtttccacttttccagagcagccgttggcttcgctatcttagtatcttctgggtcctggtaagccaggccagcttatggtttgccaccttcctcagtgtcttctattgcaagaagatcacgaccttcgatcgcccggcctacttgtggctgaagcagagggcctataacctgagtctctggtgccttctgggctactttataatcaatttgttacttacagtccaaattggcttaacattctatcatcctccccaaggaaacagcagcattcggtatccctttgaaagctggcagtacctgtatgcatttcagctcaattcaggaagttatttgcctttagtggtgtttcttgtttcctctgggatgctgattgtctctttgtatacacaccacaagaagatgaaggtccattcagctggtaggagggatgtccgggccaaggctcacatcactgcgctgaagtccttgggctgcttcctcttacttcacctggtttatatcatggccagccccttctccatcacctccaagacttatcctcctgatctcaccagtgtcttcatctgggagacactcatggcagcctatccttctcttcattctctcatattgatcatggggattcctagggtgaagcagacttgtcagaagatcctgtggaagacagtgtgtgctcggagatgctggggcccatgatctgggaagaaaagtgtggtcaggacactcttgggacgctcttttgatagctctctataagggagctgctttccatgtcttttaagattttccttcttttacacca

SEQ ID NO: 337545 - DNA, 498 bp, Homo sapiens
cttcttgtacaaccaaaagactggcagctcgtgtttatcttttccctatgaggctcaggggttagcagctctatagataaggacaattgtgccataaactcaactgcatttgcacaaaactagtagagatagcctatcccttcctatcttaaatctttgtacttgcttctcttctttactaatgtatgtctttcatgccatttattttctagagtagggcacttttgtctgcattaaaaatctgttcaggcagttatcctttcttctcaatgattttcttaatggcatctgggaactggtttgctgtttcttggtcagcagaagctgcttctcctattatcttgacatttttaagtaaaacctctttctcaaattatcaaaccatcctttgctggtattaaattcgcctttaatctatcacataatggagacttgacttttcctcaaatcgcattagagtctataggtaagcctttcctttcttagcaatccagcact

SEQ ID NO: 337546 - DNA, 602 bp, Homo sapiens
ccgggttcaagcgattgtcctgcctcagcctcccaaatagatgggatcacaaatgtctaccaccatgcctggctaattgttatatttttagtagagacggggttttgccatgttggccaggctggtctcttaattcctgacttcaagtgacccacccacctcagcctcccaaggtgctgggattacaagcgtgagctactgcgcccggcctctccaggatttcaagttaggcgccctgcattttgggcagagattgagattgtgaatctgtctcctggccatgcagtatgtttgtttgtttcacgtgaatttattgccaagtttaaaaagaaaaatcatagagggacatagcaactggcgtttgctctcgctcagttccccactcatgagttcaagccttggctctggcatggtttttatgttttctgtggtatgagctggccacaccctggtctggggatgctgttggccatgccgatgaccgagtgtctcatgcagccggccctgtctatgttactctttgcctatgtccagcatttggtcaccgttctgtactaaagttgaatattgcctgtgggcctcaggaagtcactgtatatggc

SEQ ID NO: 337547 - DNA, 774 bp, Homo sapiens
gaaggtggctgtgatgtgccttacagagaaaaagtcttagataagctttgttcaggcatgagttatagtgctgttggctgtgaattgctgcataaggtatcttcaaacagaaacccacataaaacaaggttatgtattgatcagtaacaaaaatgtggccagaggctcccgggaacctaattctatattttttccctaggctggatgcttcgctgttcactaattcagtgtttacagcaactttatagaatgtgactaccacacataatgagaatcgactatactattgttatctttttggctttctttttaacagatgaggaaacaggttgggagagattaaataacttgttccgagtcagtgtttctagtgaatagcagagtcaggatggaatccaggtcctgtctcattgcaaaggcttgaccatacgaaattcttcctcctcccacatactcgagttcgtgtatacggggggttagaaactcagttaccttggctccccaggcaaataaagcacatgggtgaaacagtaccagacatagaccacagactgttgaacggagaatgcacatcgtctaaaagggcagcagagaatcggctccagcaaaggccgccagctggaggcgggcccgggactgcctgggcagccttttgttttttatattttaagagaacctgaatgtttgggtattgatgtaaacttcaaattttttaatgctggccactaaattttttttttttttttgagatgggatcttgctcagccactgagg

SEQ ID NO: 337548 - DNA, 553 bp, Homo sapiens
taccccacagcttcaagtgcaccctccgtagggcctcaccccctttgccttttctaaccactgcctcccctcatccacacaatctccctcctcctccaccctccagagcctcccctcctcttgctccacttcctctcctaagtggaattgcacaactcagcgagtgcagaggatctgactccacacagactcactttgcagcctaggggcaaacagaaggacactgtttctggaagcttctttcccagccaccagcatggggctgccagggccaaactgccctcatcccttacctgactcccaggtcaggaggcactgccaagggctcctcagccggctctcctgctttcccaggccaggctttctgtggtttgaatttcccaactgatgctcagaaacccgcctcccgctgggccacatatctcttttcacacaagcttcaactccacatggcagaaagacaaaagccactgctgctttaacagccctggtagcacgcttctatcattaaaaggcgagggagtgagggcccagaggggccgtcttccccggt

SEQ ID NO: 337549 - DNA, 353 bp, Homo sapiens
ttaaaactgcatgttaattttctattgctgctgaaataaattcaaaaatttagttgcttaaaaataacttttttttttttacagttctatattttagaaggccaacatgggtctcactgaactaaaaccaaggtgtcaagagggcagtattcctttctacaggctgtaagaaagaatctgtttctattttctatgacttttctagcttctagtgggtgcccacatttcacaatttgtagccctttcctccaacttcaaagccatcaacattgtatctctctgaccactcttttgtagtctcatctttctctgactctcttttattgcctctcctttaactttttttttttttt

SEQ ID NO: 337550 - DNA, 599 bp, Homo sapiens
caaaagctgattggaagtctattcttccacccttgccagcctgccaggatggtgtcagaaaggccatgtagaaagcagagtttcatccccactgagtggtgagaagattttctcaatggatatcatatgaagagtcagaacttcaccatgtcacccctcaatttggcagtaaagaagtacctgtcccctctcagcagggtagtgtcagaagaagcctactggagagtcaggactttcaccaccactcaattgccacaggccacccccatggtgtcaatagaggatgagtggggagctggaaaccccgcttccacccggcaataatgaggttccctcccctccccgacttgagtgtcaacagatgctgagggggaactgaaagaaaaaaatagattaacccacaattatagttagaaacttctctactcttttctcaacaactgatagagcaactagacagaaaatcagcaaagatataaaagaactcaatgaaagcatcaatcaaaaggatttaattgactttaatagaacatgctacctaataacagcaagatgtacattatttttatacatatccaagatagactatatgctgggcc

SEQ ID NO: 337551 - DNA, 811 bp, Homo sapiens
gtttaagcaaaaggggtcatgttactgtatctgtgctatggaacataattagctgacgcttagaaggtgaccctgagaggtgaggtccaagatagagagtcagccagggaattagtgaagtcgtctaggcaaaagctgagagggaaagcagagacatggagaggggttggagctgttgcccatagcaagcagttaaaaattggctgagccagacctgaacccactgggtcctttgatttcatgcctttttcttgttagcatttaccaatttttcttccagagcttaagttgtaactaggtgttcagtgggacaaaaggttctgggatcaaataagtgtgggcatgccaggttaaacagagttagagagattccttcatttgagaattcttaggagttaggtacggatttatgtatcatgactctgagatattgtttcccagtcatttgactacagaacccattggtccctgtcagtagtagtacaccttgtggaaagcggcaaaagtttggtaaatgtttctctgtatcagcatgcctaactttgaatcctaatgagaactctgtgaggcagaaataacagtttcaggctgggcacggtggctcacacctgtaaacccagcactttgggaggctgaggtgggtggatcatttgaggtcaggagttcgagaccagcctggccaacgtggtgaaaccccatctctactaaaataaaaaagaaaagaaaagaaaacagtttcaccaatgagaaaactgagactcaggtgaagtaactttccgaggtcccacattaagtagtcaagtagaggaag

SEQ ID NO: 337552 - DNA, 162 bp, Homo sapiens
gcatgagccactgcacccggcccagatatggaattttgccactgtggctgcctgcacaggttttgggaacagacttcatggggctattcttaactgtgaaaagaaccattcctggtgataattcgtaattttatgtataagatcatagatgtatctagttgt

SEQ ID NO: 337553 - DNA, 494 bp, Homo sapiens
attaaacctacatttaaataaccaaatcatattttcttgaatccaaaattattctgaaaaacaaaacaaagaaatttaaagtctcaaggctcctaacgtcacaacaatgcttctgtaaaaattttcagctatttaggggggaaatactagttctagtaagttttccaaaataaagatgtaatgaaaaatagtatctcagagtccatcccagtcttaagattttaatactctacataaaccattcttgtaggcattttgaaaatatgacctactatgttaaaacagggatattctcaaggatctaaaactatcaggcaggttagggattccaaactaaacttgggcaatgagcctaagcaaatttcaatataaactatgcttcccagcttagcttagttttcataaatttctgaatatgtcagctttgagcagatatcagagtatttttaatctatcaaagataaaatacacagagtatagtaacaattacattt

SEQ ID NO: 337554 - DNA, 469 bp, Homo sapiens
tcacacattatggaatctaacttgctatatgtcattggtgcacaatagctagaatttagtattaaaactagtccatgaaaaaagcaatttaccaataatatgaggaaaaagtaaactgagaggagattttatgatttaggagaggttatatgtatagttgtaaatcataagttataacaggaaagatagctataacataaatgagcaaataagcaagacttgagtatatgagaaaagtaactggacatattgcctatcttgcaaaatgtgtgaaccagaattcttggtataatattttaatgagtactctggattctaaagtattctaaccaaattgttattttatagaatatcaaggtatatctttggttaactttgtgttagaattctatgtggatgtcacccattttctggcacctttaatgaaatcttctagactttctttctgtaaaatctcattactctgact

SEQ ID NO: 337555 - DNA, 463 bp, Homo sapiens
ttaattcattgaaagcttgtaggacagtgcctggtagataacggcactcagtaaacattagcaatcattacctggtccctcatttaacatttaacccctttaataccctaagaggcagacgcttttgtcccttccattttgctgagatccaccaagtcgtgggaagggtgcgtgactcacccacactgctggtcagtgagtgcagacgcggggatctataggagaactgggtggtggatctctaggggaatagtgtggtggttctgatccaaagcctgtctgcctggatccacatcccggctctgcttctcctgcactgctcactctggaaagctgcttaaattctctgtgacccaatttccccttcctaaaatggagacaatagtacgtagtcgcagtctcgtatatttgatgtggggtttaaatgacctcatgtatgtaaaatgcttagagccaagcctga

SEQ ID NO: 337556 - DNA, 314 bp, Homo sapiens
tgcggagagtatctaggtgtgaggagagaggcagcctctcatccccaaggagactgagggctttggctgctgggacacgaggcctgtgttctttgtttttgtttttgtttgagacaggtctcactctgtttcccaggctggagtacagtggtgcaatcatagctcactgcagcctccacctcccgggctccagtgatcctcccctctcagtctcctgagtaactgggactatgctcagctctgtgtaaaaattagctgccaccactcctggctaatttttaactttttgtagaaacggtgtctccatatgctgc

SEQ ID NO: 337557 - DNA, 221 bp, Homo sapiens
aaataaagtgtctgaaagaatgaaaaaaatggaagaattctttagtaaggtataaaataccctttctatctttgtagcattctaagccttttgtcacctttccaaactcccaacatgccatattccctgactaggccacagccatgtacattgatccctttattttcttctctctgcctgagatttctctcattcccccttctctgcctggtatatgattg

SEQ ID NO: 337558 - DNA, 358 bp, Homo sapiens
ctgctgctgttattcattccactgtatctaatctctgtactcttaaattttacaactttactcaataacttttaaaatattctacacttgtggctcccataaatttcctctttgctctattgaggccatttctagtccctgtgtgatcagggttattggagagcaactgataaaccagccatgctccccacttcctctctaggagctcggcctcctcagcttgtctgcagacctttgcctcttaatttatccagtccagctctcatgtcttccctgatgaagtggagtcgagaaatctgctccgtcaccttctgtgtgaggagcagcctctgcagcttgtcccactgctgtagctctc

SEQ ID NO: 337559 - DNA, 330 bp, Homo sapiens
gtataggtttgttgcgtaggagctgtaggctataccatatagcctagatttaggctgtattatctaggtttgttaagggacactctgtgatgtttgcacaatgatgaaatggaatgaaggcacatttctcgtaatgtatccctgtcattaagctaggcatgactgaaccgatatgtgctacaatgttgatgtatttgaaaacactatgctaagtaaaagaagccagtcacaaagaactagatattgtgtgatgccatttatattaaatgtcctgaataggtaaatccataaagacgcaaatacgtaagtggttgtcaagggcaggggtga

SEQ ID NO: 337560 - DNA, 491 bp, Homo sapiens
ggtctggaaagcaagactctgaaattacttcactctaacttttcaaagcccctttctcacatattcatgtcttagtttgctattctttaaaatgaggaggaaaatcttaaggaagtcaacaatggtaatagagggatactagtgactttaaggcctacgctgaaatcacaatagaaagacaataaaatggttttaaattgtggcagaggaagtttcgtatccaaagggatttctaattgttgaactaatggaaccatcctccagagatcactgaaaatgggagaggccttcaacctgtctttactaggttaagagacaccctatttggagtccagagtaaagggcaagaggatcccttgaagtcctgccagatttttgtgattttttcctgaaatctgtccaattgttttagtacaataaattggggtattcttccagaccttaagaacaccttccaggcctggcgtggtggcttgcacccataatcctgg

SEQ ID NO: 337561 - DNA, 106 bp, Homo sapiens
gtatgaaaaatggaatcatgttctggaattttttttcccctcaatctcagaccaacaggcattttaaaaagtttaagccaataaaacgtttagagaccatagatta

SEQ ID NO: 337562 - DNA, 372 bp, Homo sapiens
tggaaaaagtaaataggcttcatatttgaatagctaaatcatacattttggacttttcaaaaactaagtgtaaaaaggtatatataacacaagtttcaaattgcttggaagaaataatcaaccaaaggagacaggagttatgataaacaaaatgaacagtatttttaaaactagacagtcttatttgataggaaaagtaaaagattgtaatgcaagccccacatttatcacaggtttacgctcagacacctgaaactttgtgcagatctctatgagggagaaaacaaagtagatgaatagagaacacagatggagggctttttgttttgttttgtttcttttgaggctgagtctcgctgtcacccaggctgg

SEQ ID NO: 337563 - DNA, 528 bp, Homo sapiens
ctccattactccatcatgcaagcaaacacaatttctaagaaaaaagaaaaggaaagtggacatatagtagtgtctaagcgccccctgccttgtacccctggagatacaagctcccaaatgtttttattagtgagtcaattatttaacagggatattgaaattatttgtggaaaagtgttctcagatgtgataacaaaagacaagtattttattttctatatgtttgtgattaatgaacatcttttaacagctgaacctggaaggcaactgaaatccaggccatagtgtgtacagggcacctatggctctgctgaagggaatgtgagttaactcacgacccagagtaattcaatttatgaaggattcccttggttttaatactattttactaaactcaaatattggctaatgaggttatttgaagaaaaaaatagtgtttcagaaatggaaatacttaatacaagatgattccttatgtgtagtttgtcatctagtgttaatttgtgggaattaaaaaaggcaggtaca

SEQ ID NO: 337564 - DNA, 878 bp, Homo sapiens
tgtgtggtctctagagtagacacgaactatggcatattgttttgctatagagattctgagtacccagtcttttggaagtactgttttaacaagggtttggcaacgtagaaacatgaggagcactctggctccctagcaagaggaaggagcatctcagtggtgctgaattctcatcttcggagggtttgtcctgcagccctctgcggcagaagctgagagcactggctcttgccctggcttgggttggccacccttgctggagggtgttctgcagggaccctgcttttttcctaccagttcaactagttgtactatacaaaactgtacagtggtgactaaccagggaccggatacagcttgtttagatttgagataaaacctactgtttaatttcacgaacttccctggtgaaagccaaacttagctgtgtcccttgtcctggtcactgcttggctggtggtggggcaggggtgaataaggctactgcaaggactgggagcgtagcctgcgggaggcagtgaggagcctagcctagcattgaggagactgaggaggggggcattttaaaaataaaactatggcttctgccaagaagagaaaagcagctgatgaaaatcatgtgtttcaaagtaagtagactgagcgatgcttattatttgtgctgaagatactgtcatttgtctgattagcaatagaaaacaatcttattttaaagagcacagtagcttgtaagttcagtcaggaaaagacaaatacacagcctcagaagactcctctgcagggtaaagcaaatttggtttagtgcgtggcattatcatgagtccctgaaggctgtgctcattaaagagtgttgacatttttttagccccccaaaaagg

SEQ ID NO: 337565 - DNA, 532 bp, Homo sapiens
gatgtatatcccgaggtggttttaaacctggcatgtgtaattaaatccctgagttcctaatggagtccctcatgtcttttatttctgagctctctttatagggctattttgacacttttctgttttttttttttctctttttttttcctcgctcttgtcccccaggctggagtgcagtggcacaatcttggctcactgcaaccgccacctcctgggttcaagtgattctcctgcctcagcctcccaattagtgggattacaagcgtgagccaccgttccccaccaatagttacttttttttatgaggagcaaataatctagaatccttcttagttcctaggtaagcaattaactgttcagagtcttccagccccaccccctaattttccttatttgtcttctgccactaagtttcagcatttggtttggttttgggccctttgtactcttctttctggcttttgctaattgccctggtatttttctagtgtccattgttagcactcctcaaattttaacttagtccattttt

SEQ ID NO: 337566 - DNA, 669 bp, Homo sapiens
tgtgtgtgtgtgtgtgtgtgtgtgtgtgtatgtatgtgtatgtgtatgtgtgtctgcctgcctgtgtggaggggacccttttagaactctccttacagtggcagatagcagtagttatttttttcttttctttttttttgagacagagtcttcctgtgtcacccaggctggagtgcagtggcacaatcttggctcactgcaaccgccacctcctgggttcaagtgattctcctgcctcagcctcccaattagctggaattacaggcacccaccactacgcctggctaatttttgtatttttagtagagctggggtttcaccataatggccaggctggtctcaaactcctgacctcaggtgatccacccaccttggcctcccaaagtgctgggattacaagcgtgagccaccgttccccaccaatagttacttttttttatgaggagcaaataatctagaatccttcttagttcctaggtaagcaattaactgttcagagtcttccagccccaccccctaattttccttatttgtcttctgccactaagtttcagcatttggtttggttttgggccctttgtactcttctttctggcttttgctaattgccctggtatttttctagtgtccattgttagcactcctcaaattttaacttagtccattttt

SEQ ID NO: 337567 - DNA, 438 bp, Homo sapiens
cattcagatatcttaaaggataacttgttcttattttgagtagatgacatataaaaaacatattttgaaactgatagagaattctattctctaaggtttctttttcttagttttttactcctcgagtaatcagatggacacagattcttcagaagacacatttagaggaaagacagataatcaaggaaaactgtgtgacattttgagaataaatactaaaagaggaatttggtgctaaaaagaagttatcaagacaaaaatattagttctctcaaaacttataagaccaactattgaacctagaaataacctgaacataagaaatgaactattctgtcaggaatagataaagaaaagggacacaagagacagctaactatgaagttttaaaaaagaaaaaagggccaggtgcagtggctcatgcctgtaatcctagca

SEQ ID NO: 337568 - DNA, 393 bp, Homo sapiens
tctcatttttgtgtagttactgaacttggtggctgtgattagtatgctgtaaataagcagagataattgtctaaccatcagacacctaagcattagatttattgcttttatgtgaagaatattgtaactgatttgaatataaactatgaattttctgtactccatagttcttttatggtaaatgcacatatacatttttacatttccattgatatttaggatagtataataacttcacaaattatttttgaatgaatacagaaaaggaaactggcagattttcattcacattcatttagcaattatttattaaatgcctactgtggcaggccctgtaaagtactgtgaaatattttgacttttaagattgatcttgtgttaaggctgagatac

SEQ ID NO: 337569 - DNA, 125 bp, Homo sapiens
caggcaggctttcaaatctcatgtgcctctaattttctcagtgtgattcagtagctctgctcctgtttggcctctctgggttatctcaggcctctcaggaagctctcagaactctcgtcactaca

SEQ ID NO: 337570 - DNA, 934 bp, Homo sapiens
aaaaaagtaaaatatttcattaataatttttatatttcattcatattgaagtaatattttagatatattaatttcacgtttctaaaactagaaaatctaaacttacaatgtgattcacattagatttctattggatggtgctgtcctacagcaaagcaaccagctttcaaatcctacccacgcacctagagtttccaatctgctttgtaatccctcattcttaaacatgagtagacaacccaggattatcagacatctgaggaaagatcctaacatgagagaaagcggggctgggggaagcaacttgccaaataaacagtatgcaacaagaagaaagatgttctaaaaatcattaatatccacaacaaacattcagaggaaaaagaggtcattagaagtttaaaatacaagaacagaaatgaaaactcaataaaaggactggaagaattaaggaaattccccaaaaagtacagcaaaaagataagaaaattagaagaccagtttgggaggaccaatatccaaataataggagaaaacataaaatagagagcaagttatcaaggaaataaagaaaatttcccagtattgaaggataagtctctagcacaaaggacaaaaatagattattcaaaggcatataatggtgaaatttcaaaacaccggaatacaaagaaaatcctacaaaattccacagaaaggatgaaaacaggtcatatacaaaggaatcagagcagttctgggtttcttaacaataatatcaacagctgggtggcaatggaacaaggcctttaaaaatctgaagaaaaataatttccaaactacaaatctatacccaacaaaaactatcaatcaaatgtcagcttagaatagacattttcagacatttaagctttaaaaaatctgttcccatataccgcaggaagctactgtagga

SEQ ID NO: 337571 - DNA, 376 bp, Homo sapiens
atcgcgccattgcattccagcctaggtaacagagcgagattccatctctaaataaataaatagaacattgtggatgtggcaggaaacctccttccttcagaaagtaagccagagcctcaagccccagtgtgcaccgagggccttccaggacctgtctcctgggatctcggctcacagtccccgtcctgatctcttccttcctggaagaacaaggaataatttcaaatcctcttgcagctagcttgtccgtacgactcacaaaccgcatcctttaacccaatttttttttttggacaagtaaaactagaattagctttatttaacatgattgtgaaaggaacacttattttaatttttttaaaagaatttagatttc

SEQ ID NO: 337572 - DNA, 510 bp, Homo sapiens
aatcatgccaaacactattctacttattgatttaaatatgaagaatgctggctatgtatgctccagcaattcctctcccaaatctaccctagaaagacatttacacgtggcctaggagaatcacacaaagatgtttgtcacattgctgtatgcaacagcaagtaatgaatagccgtgcaactgtcagatgaactatggtacattcataatatacagcatttgaaaaggatgcagcctgggtgacagagtgagactctgtctccaaaaaaaaaaaaaaaaaaatttaactttggaaataattacaaactcaaaaaacctgtgcaaaagtggtccagagatctgtggggtcctcttatatacaactacccggaacggtggatatctaacccatagaccttggtagaaaccaataaatggacattggagacaaggttataaatccaagacagatttaactgggacttacatcagatacacaatgcactctcgggtgatagtactacccaatgg

SEQ ID NO: 337573 - DNA, 450 bp, Homo sapiens
aatcatgccaaacactattctacttattgatttaaatatgaagaatgctggctatgtatgctccagcaattcctctcccaaatctaccctagaaagacatttacacgtggcctaggagaatcacacaaagatgtttgtcacattgctgtatgcaacagcaagtaatgaatagccgtgcaactgtcagatgaactatggtacattcataatatacagcatttgaaaaggatgcaggccgggcgcggtggctcacgcctgtaatcccagcactttgggaggccgaggcgggcggatcacgaggtcaggagatcgagaccatcccggctaaaacggtgaaaccccgtctctactaaaaatacaaaaaattagccgggcgtagtggcgggcgcctgtagtcccagctacttgggaggctgaggcaggagaatggcgtgaacccgggaggcggag

SEQ ID NO: 337574 - DNA, 4677 bp, Homo sapiens
caggcacgtcccgggggctccagcttctgctcagagcgcggagagccgggccgggcgggcgcgcgcgcaggactcgggccgctcgaggggtccggccggacggtgtcgggagccggacccgtcggcagaggagcgggcgccgcgatggctgagggcagtgccgtgtctgaccctcagcacgccgcgcgtctgctgcgagcgctcagctctttccgcgaggagtctcgcttctgcgacgcgcacctggtcctcgacggggaggagatcccggtgcagaagaacatcctggcggcggccagcccgtacatcaggacaaagttaaactataatcctccaaaagatgatggatcaacttataagattgaacttgaagggatatcggtaatggttatgagagagatcctggattacatcttcagtgggcagatcaggctaaatgaagatacaatccaagatgttgttcaggcagctgacctgctgctactgacggaccttaaaaccctgtgctgtgagtttttggaaggctgcattgctgctgagaactgtattggtatccgtgactttgcactacattactgcctccatcacgttcattaccttgccacagaatacctggagactcatttccgagacgtcagcagcacggaagaattcttagagctgagtcctcaaaagcttaaagaagtgatttctcttgagaagttaaacgttggcaatgaaagatatgtctttgaagcagtaattcgatggatagcacatgatacagaaataagaaaggtccacatgaaggatgttatgtcagctctgtgggtttcagggttggactccagttatttacgggaacagatgctgaatgaaccattagtacgagaaattgtcaaagagtgtagcaatataccgctcagccagccgcagcaaggggaggcgatgctggccaacttcaaaccccggggctactctgagtgcatcgtgactgttggtggagaagagagagtttcacggaaacccacagcagcgatgcgatgcatgtgccctctctatgaccctaacaggcagctttggatcgaactggcccctttaagcatgccgagaattaaccatggagttctctcagcagaaggatttttgtttgtattcgggggccaagatgaaaataagcagactcttagctcaggagaaaagtatgatccagatgcaaatacatggacagcattgccacctatgaacgaggcaagacataacttcggaattgtggagatagatgggatgctgtacattttgggaggagaggatggtgaaaaggagctgatttccatggagtgttacgatatttattctaaaacctggacaaagcaacctgatttgaccatggtcagaaagatcggctgctatgcagctatgaaaaagaaaatctacgccatgggtggaggctcctatggaaagctttttgagtctgtagagtgttatgatcccaggacccagcagtggactgccatatgtccactaaaagagaggaggtttggagcggtggcctgtggagttgctatggagctgtatgtgtttgggggagtccgaagtcgtgaggacgcccagggtagcgagatggtaacttgcaagtccgagttctaccatgatgagtttaaaaggtggatctatcttaacgaccagaatttatgcatccccgccagttcctcttttgtttatggagctgtacctataggagccagtatttatgttattggagatcttgatacaggtaccaattacgactacgtgcgtgagtttaaaagaagcacaggaacctggcaccacactaaaccactccttccatccgaccttcgccgtacaggatgtgcagccttacgcattgcgaattgcaagcttttccgcctgcagcttcagcaaggcttattccgtattcgtgttcattccccttgaggaggaagcagagcagagtgcgagatcctgacccaagagcaccataacatagctccgaaagggagagcagagatggcagctgaaactcactctgtgctgggctttggtatggtaactctttggtggttttatgatgcttacaaacttgagctttagctcttgtttgggagaacacgtaactgttgaaaaactacctgggaggagtgagttcctccagttaaatgtggctgtagatgttggaggctagggaggctagtaaatatcaaaaggaaaagggagtgggaattgctatcatgtaaaatatcaaagttaaaatactaaggtgcattttccctgaagggaactcatgtctgactgctgtattcaaatacgtagctttggtaacaaacaaaatccgtatatgcaaatcaacatatccaaacatgccaagactgcttttccactgcacttggaaggatatattatgcctaaccctgcccaacaaattaaggtttgtgcctaaaatgttagattggactgtatgccagttagtctccatttattcctagtactctgtcctaagaatctttttaaaactatatcatgatgaattgaaatgaagataaaattgctcttttgtaactttatcttagtaatgtaaagattcagtaaattgatgagtcaggttgcagccctcatgtgaactgaaagaagttgctcgcttctgtgttgacttagatcaagacacgtcacgcatcctttctggggtagtacctgtggagccgggaagggtctcctgcagtgccattctgccttctcaatgagcaaaaccattttctaagtatgaggatattagtgagtaggagattttataaaagaaagacctgagtcagacaaataataaaggtctgctgtggctaaaaaagcaaaaacaaaaaagctatccagacaaaatacatagggatcagaaactttttcatataacctgtctgaaagcacacaaagtcttgtttactactgtttagggtttgaaaacttgtcttagaatgcgaatctgtgttaagaatctagtctttgtaatagaagtttcccagtggcattcactagtgagagttttagacaaattatgttacgagtaaagtttggctggtagaataaactacctcaacttaatttcattctgttcatagtagagcaaattaatcttttcctccttccctcctttcctatctctcattctcacctcaacccactttaccccacttctcattgggggaaaaatgtctttcgttcgtggaacgtatcttgtaagatattttgttttccacttgaattacaccaccctagtgtgaaatcggggacttcaaagtgcttgattccttcctaaattgaattttatgcaatgtcaaatttctaatcaatttaatatacagtacttcatttttaattgttttctaaaaaaaaggttttttttttccttttggaatatggctgtaagaagcagcattttgtcttattaacacatgtataaaggtatcctttggttttaagtcgagaacaggaatttcttctagaaacttcctgtatggaacgtttatatgcaattaacatgcatatgaaaaacatcacttacgttctcccacccatagacataaaaaagggtgacctgtgattttttttcttatacctgctggaagtcagtacaatgcgtcaaaagttgctgaaagatgctgtgcctatggggttctagagagtgttgagtgtggtacattaactctccattttagccagaagatacctgataagagaaggtgtaaggtttttatcttatatgccagaggcaccaggccagatgtgccgcacagtcatgtaattcaatcatgtttaatatgtcagtcaaaaccaaattcagaattgttttgtgtaccagtcagctgttgtctgcacattttcgtagtgacagtgtggagatctttttaatgaaagcaaactatgtggcctctgcaaagaaaggaagatttttctttttacaactagatattagttttagaggaaggaaatagctgaaaaactaaatttgctttggtgaaatgtcctgtacagaacagttccttggcattcagcagctgtaattggggaacattaaaacagtaactgacatccagttaaagccacgatcgtcagcaattctccttttttaatttctgatatttaaagttttttttccagtctacaccaggcctctccaaggagacagttcattatttaggagtgaatgtgttcctcttgcaatattatcagtacctgcatgacttggtaaattcattttataaaaatagtgttttttttttttaatttcagttcattgactctataactgcagaaattagataatgttttataaaataaatttgccacataatatgggatgcaataaccaacaaagctgctaagtgccaaactgttattttactatatataaatattaaaatattgtgttgaagtatagggatgtatttaattttactatgctccaacattaatcatgactcttttgtaaattacagttatttcagtattgtaaaataaatgttgactcatttcatgcaggtttgtgttttaacattccacttatgccttgaaacatcatttcttgataactttttgatacttctttcttgataaggcacttttaccaggtgtgtgttggaattggtggctcaggataggtcttaaattttaaatacaaatatctttggg

SEQ ID NO: 337575 - DNA, 467 bp, Homo sapiens
ttttaaataaagttagccgggcacagtgctgtgcacctgtagtcccagctacccaggaggctgaggcggaaggatctgttgagcccaggagtttgaagctgcagtgaactatgatggcaccactgcactccagccaaggcaactgaacgagaccctgtctctaataaataaataaataaaaatgaggcttttgaacttctttcagttagtgaaatagtatcagttggagtaagagctccttttctgaagattaagaatatgtgtcttactttgctcttctcattttaaagtccggtgttgtaatactgaaaagcaccatcgttttacggttagaaatcaaaccccttcctaaatctctttaagtatggcccagacagtttaatatctgttcacctgacctgaatgagaaatgttgcctctcccccaccattgttctctgctttcagatcggctgctatgcagctatg

SEQ ID NO: 337576 - DNA, 1815 bp, Homo sapiens
caggcacgtcccgggggctccagcttctgctcagagcgcggagagccgggccgggcgggcgcgcgcgcaggactcgggccgctcgaggggtccggccggacggtgtcgggagccggacccgtcggcagaggagcgggcgccgcgatggctgagggcagtgccgtgtctgaccctcagcacgccgcgcgtctgctgcgagcgctcagctctttccgcgaggagtctcgcttctgcgacgcgcacctggtcctcgacggggaggagatcccggtgcagaagaacatcctggcggcggccagcccgtacatcaggacaaagttaaactataatcctccaaaagatgatggatcaacttataagattgaacttgaagggatatcggtaatggttatgagagagatcctggattacatcttcagtgggcagatcaggctaaatgaagatacaatccaagatgttgttcaggcagctgacctgctgctactgacggaccttaaaaccctgtgctgtgagtttttggaaggctgcattgctgctgagaactgtattggtatccgtgactttgcactacattactgcctccatcacgttcattaccttgccacagaatacctggagactcatttccgagacgtcagcagcacggaagaattcttagagctgagtcctcaaaagcttaaagaagtgatttctcttgagaagttaaacgttggcaatgaaagatatgtctttgaagcagtaattcgatggatagcacatgatacagaaataagaaaggtccacatgaaggatgttatgtcagctctgtgggtttcagggttggactccagttatttacgggaacagatgctgaatgaaccattagtacgagaaattgtcaaagagtgtagcaatataccgctcagccagccgcagcaaggggaggcgatgctggccaacttcaaaccccggggctactctgagtgcatcgtgactgttggtggagaagagagagtttcacggaaacccacagcagcgatgcgatgcatgtgccctctctatgaccctaacaggcagctttggatcgaactggcccctttaagcatgccgagaattaaccatggagttctctcagcagaaggatttttgtttgtattcgggggccaagatgaaaataagcagactcttagctcaggagaaaagtatgatccagatgcaaatacatggacagcattgccacctatgaacgaggcaagacataacttcggaattgtggagatagatgggatgctgtacattttgggaggagaggatggtgaaaaggagctgatttccatggagtgttacgatatttattctaaaacctggacaaagcaacctgatttgaccatggtcagaaagatcggctgctatgcagctatgaaaaagaaaatctacgccatgggtggaggctcctatggaaagctttttgagtctgtagagtgttatgatcccaggacccagcagtggactgccatatgtccactaaaagagaggaggtttggagcggtggcctgtggagttgctatggagctgtatgtgtttgggggagtccgaagtcgtgaggacgcccagggtagcgagatggtaacttgcaagtccgagttctaccatgatgagtttaaaagaatctacctgcttttcttcagtttccagagtgctcaggtagttgtagtttgtccagagtttacggctgacacttggagcaactgaggagccatttgttaagagttacttctgccatactggaagcagacgcctcactacagctctctttttctttcctcctctcctttc

SEQ ID NO: 337577 - DNA, 261 bp, Homo sapiens
tgtcttgactgagttctcctcccagggtgcaatagaagcagggcctgagctccgagggtgcccagggacagtgagggcaggtgatgctggccgtgatgcccctcagctctggtgaggagtcaggaagctgctaacagaagccacctggtttaaggaacgcattccaagcagaagtgtcctggcttccagagggagactcaggaggaggaaaatattatctcctctgggagcagaatttcatctttccaatcagttcttgct

SEQ ID NO: 337578 - DNA, 601 bp, Homo sapiens
  misc_feature (443)..(443): n is a, c, g, or t
  misc_feature (446)..(446): n is a, c, g, or t
  misc_feature (460)..(460): n is a, c, g, or t
  misc_feature (462)..(462): n is a, c, g, or t
  misc_feature (469)..(469): n is a, c, g, or t
  misc_feature (475)..(475): n is a, c, g, or t
gccttagcgccatttttttggaaacctctgcgccatgagagccaagtggaggaagaagcgaatgcgcaggctgaagcgcaaaagaagaaagatgaggcagaggtccaagtaaaccgctagcttgttgcaccgtggaggccacaggagcagaaacatggaatgccagacgctggggatgctggtacaagttgtgggactgcatgctactgtctagagcttgtctcaatggatctagaacttcatcgccctctgatcgccgatcacctctgagacccaccttgctcataaacaaaatgcccatgttggtcctctgccctggacctgtgacattctggactatttctgtgtttatttgtggccgagtgtaacaaccatataataaatcacctcttccgctgttttagctgaaaggaattaaatcaaaaaaaaaaaaaaaaaaaganaanaaaaaacaaacaananaaaaaanacaaanagaacagacaaacactaaccacagaacaggagaagaaggaaagaagcgacaggcggggacacacagatgtagggcagaaggagcagtactgggagccggagatcggaaggacagcgagagggagat

SEQ ID NO: 337579 - DNA, 338 bp, Homo sapiens
gccttagcgccatttttttggaaacctctgcgccatgagagccaagtggaggaagaagcgaatgcgcaggctgaagcgcaaaagaagaaagatgaggcagaggtccaagtaaaccgctagcttgttgcaccgtggaggccacaggagcagaaacatggaatgccagacgctggggatgctggtacaagttgtgggactgcatgctactgtctagagcttgtctcaatggatctagaacttcatcgccctctgatcgccgatcacctctgagacccacctttacatactaaacgcccacagttcggcccttatcagagggtaccgaactcgagtgtata

SEQ ID NO: 337580 - DNA, 505 bp, Homo sapiens
gccttagcgccatttttttggaaacctctgcgccatgagagccaagtggaggaagaagcgaatgcgcaggctgaagcgcaaaagaagaaagatgaggcagaggtccaagtaaaccgctagcttgttgcaccgtggaggccacaggagcagaaacatggaatgccagacgctggggatgctggtacaagttgtgggactgcatgctactgtctagagcttgtctcaatggatctagaacttcatcgccctgtctaaatcaccacgatcaaaagggacaagcatcaagcacgcagcaatgcacgcccaaaacgctcagcactagccaggacccccatggggaaacagcagtgattaaccctttagcaataaacgaaagtttaactacagctatactaaaccccagggttggtccaatttcgttgccagccaccgtggtcacacgattaacccacgtcaatagaagccggcgtaaagagtgttctagatcactccttcaccccagcta

SEQ ID NO: 337581 - DNA, 499 bp, Homo sapiens
  misc_feature (341)..(341): n is a, c, g, or t
  misc_feature (344)..(344): n is a, c, g, or t
  misc_feature (358)..(358): n is a, c, g, or t
  misc_feature (360)..(360): n is a, c, g, or t
  misc_feature (367)..(367): n is a, c, g, or t
  misc_feature (373)..(373): n is a, c, g, or t
cgatcgggtggggagcgcccggcactggtaggcgggactggacggttggcaaacagatcgcgagctgctggggatgctggtacaagttgtgggactgcatgctactgtctagagcttgtctcaatggatctagaacttcatcgccctctgatcgccgatcacctctgagacccaccttgctcataaacaaaatgcccatgttggtcctctgccctggacctgtgacattctggactatttctgtgtttatttgtggccgagtgtaacaaccatataataaatcacctcttccgctgttttagctgaaaggaattaaatcaaaaaaaaaaaaaaaaaaaganaanaaaaaacaaacaananaaaaaanacaaanagaacagacaaacactaaccacagaacaggagaagaaggaaagaagcgacaggcggggacacacagatgtagggcagaaggagcagtactgggagccggagatcggaaggacagcgagagggagat

SEQ ID NO: 337582 - DNA, 307 bp, Homo sapiens
gccttagcgccatttttttggaaacctctgcgccatgagagccaagtggaggaagaagcgaatgcgcaggctgaagcgcaaaagaagaaagatgaggcagaggtccaagtaaaccgctagcttgttgcaccgtggaggccacaggagcagaaacatggaatgccagacgctggggatgctggtacaagttgtgggactgcatgctactgtctagagcttgtctcaatggatctagaacttcatcgccctctctgtgctgtccacctcctctgtgctgtccagctgtccacctcctctgtgctgtcca

SEQ ID NO: 337583 - DNA, 303 bp, Homo sapiens
gccttagcgccatttttttggaaacctctgcgccatgagagccaagtggaggaagaagcgaatgcgcaggctgaagcgcaaaagaagaaagatgaggcagaggtccaagtaaaccgctagcttgttgcaccgtggaggccacaggagcagaaacatggaatgccagacgctggggatgctggtacaagttgtgggactgcatgctactgtctagagcttgtctcaatggatctagaacttcatcgccctatccgcttatccaatgggggatcctggagattcccatacaggcaacttccctta

SEQ ID NO: 337584 - DNA, 1606 bp, Homo sapiens
tctaatcgttattgattagaagcatgactcctgaaggaaagggaaataaatctcaattcatactaacttgcaacaaaacacttttaccatataaataagtatatgatttatttttaacccaaaaaatgtataaaataagtgtgtcctttactgtcaatttatcgagaagatctataatatatagactacatatatataatatatacaacatagccaaatgtatgaaaacttgacaatgtataatttggaattcacatgctacctatgtagacaggtatgaaattaagttataattttcatgagacattttcatcactgttgacacagtttcaagcattccatcatgttattttgactctttttcttttttttttctttaaaaatatatttttaactagaccaggccccactataatatcacttaagagagtcagggcaaagtttttgcatttatgaagatgtgttcatgtaagggtgattgtaatggagttcattggtaatagaagcaaaagtacagtaacgaagtattgaaaagaaaattttggagacattggagcatattatatatagcttgtggaaagacataaggctacagatggaatggaacattcctgttttcttgaagaaattcacatacacatagctgacctgactagtacttcagctcttccacagccttctataaaggttctttcttctgcaaagaaaacaaaacaaaacaaaacaaaacaaaaaaaacaaaaaaagcgcaaaaaacaaaaaaacaaaaaaaagcaaagtaaaatttaaaaatacagaaaacaaacaacaaaaaagaattcaaccataaatagtgactattattttcagtgtgtccttcatgtgaaagctattaaggaccaaatatactactgttcataagaagaaattactttctaaacagtaactgaaaatacttagagttaaacttgctgtggattttgtcttggcagttgtcatcttacattatttgtcaaaggaaatgtgtttggcagttaaaaatctttccttagatttagtggtggactttaacctcttaaataaatgttagtatatcagattgtgtccttgaaaaatattttacttgtatgaatcatgacaacgtctaaatctttactattcttctggcaaaagcatcagtaagaaagaaggcgaaaaagagaagtatagcctttatgtcagaaaaacattctttttagctgcttactttctcatgaaaagtaaagatgtttacagtgtatgccaagttttcagtttctgtataacaacaggtagaggttctaatcatattgaaaattgtgttataatggtctgagccatgttgctaggaaacaataggttccaattttgtattcctgctctcctgtgctgaaaagtgactggatactgtacaggttcatgttctctggctgcagttaaatggtcttttgcattttgctctggctttcaggccagaagcatgcatttttctacaagagcatcacaacaacatgctgtaaatatttaaagttaaacattatgtgttgatatttgaaagaaaagtactttgaatatttcatttttaaaaaataaaattgccaatgaaaaa

SEQ ID NO: 337585 - DNA, 416 bp, Homo sapiens
attggacagtgaagatatagcatatttccatcatctcaggaagttctattggacagtgctggtctagactagttctcaaagcttggtcccaagctaccagcatcagccatcacctgggaacttgttagaaatgcacattcccagctgggcgcagtggttcacacctgtaatcccagaactttgagagaaagaggagggcagatcatttgaggtcagcagtttaaggccagcctggccaacatagtgaaaccctatctctactaaaaataaaaaaataaaaaaaaactagcaggcggggtggcaggtttctgtaatcccagctactcggaaggctcaggcaggagaattgtttgaatctgggaggtgaaggttgcaatgagctgagactgtgttccgaattagtaggttcttggtct

SEQ ID NO: 337586 - DNA, 413 bp, Homo sapiens
ctccaaacttttgaaggctactttccatagcatctatgtctgatgcataggcccagtgagggtcttagtgtcaatctgtatataaaaatcagcaatgggttaatggatacaagcatatagctagatataaggaataagtccttatgttcaacagcagagtagggtgactatagaaatgtattgtgtatttcaaaatggctagaagagagatcttaaaatatttccaacacatagaagggataaatacttgaggtgatggatatgccaaatactctgacttgatcaatatacattctatacatgtaacaaaatatctcacgtaccccataaatatgtatgaacattatgtatcaatatttacttcttatttttaataagaaatataacttaaaaagatgttctataaaaagatg

SEQ ID NO: 337587 - DNA, 272 bp, Homo sapiens
agagccccattcccaggccctggtctcccgtgccgcagttctatattctgcttcaaatcagccttcagggtgcccacagcatggcccctgctgacacgagaacccaaagttttcccaaatctaaatcatcaaaacagattcccaccagaccactaacaatcaatactaaacccccataaataggagaaggcttagaagaaaaccccacaaaccccattactaaacccacactcaacagaaataaagcatacatcattattcttgcacgggct

SEQ ID NO: 337588 - DNA, 140 bp, Homo sapiens
tggtttaaggatgagatcattggaattgcagttggaattggaattaataccactgacatgatggatatggatgaagcatttcagctgtccaataagaagtcacgagacactgagacctgggtacccaacaagacatcatt

SEQ ID NO: 337589 - DNA, 646 bp, Homo sapiens
ttatagctatatcagctgagtttatactctacgttgagtttttttgcttttaaaactaaaaataatgttctactcttttctctgttgcctcatttaaggagaaatctgctatcaacctttcctttgttcctccataaaacatgtcctttgtctctgactgctttgaggatttcattttaacactgatttagagcattctggttatgactcatgtggcttagtgtagttttcttcatgcctcttgtgctcagggtttgatgagcttcttagatcagtaagttcccatcacatttggacattttttcatcatctcaaaatattgttttctgttcttttcccactttccttttacagactccaattccatgtgtgttagagactacttgaagttctcttaaagctcacaggggcttggagtctgtaaaaggaaagtgggacaagaaaagaaagacaatattccaaaagattaacatgttcaagtattgtgagaggaaaggggagattcaaaatagaatgggttcagaataagtcaattatatttactaccttaggagagacactgacacaactgttttatcccgtaatatttatgcccttagaacacatactgtttccatttaaaggcagattcctttctggagctgtt

SEQ ID NO: 337590 - DNA, 437 bp, Homo sapiens
ttatagctatatcagctgagtttatactctacgttgagtttttttgcttttaaaactaaaaataatgttctactcttttctctgttgcctcatttaaggagaaatctgctatcaacctttcctttgttcctccataaaacatgtcctttgtctctgactgctttgaggatttcattttaacactgatttagagcattctggttatgactcatgtggcttagtgtagttttcttcatgcctcttgtgctcagggtttgatgagcttcttagatcagtaagttcccatcacatttggacattttttcatcatctcaaaatattgttttctgttcttttcccactttccttttacagactccaattccatgtgtgttagagactacttgaagttctcttaaagctcacaggggcttgctttttttttttttttttttttt

SEQ ID NO: 337591 - DNA, 920 bp, Homo sapiens
attacagctgacccttgaacaacacaggtttgaactgcactagtccacttatatacagattttctgccagcctgagacagcaagaccaacctcatcacttcttcctcattaggctactcaacatgaagactctgagtatgaagacttttatgatgatccacttccatttaatgaacaatgaagacattttctgggaaaactggtacttctgtcatcactacagcagaagatgttaagaagcaagaagagaagaaaaagaagaatctatcttgactatgttaggtatagctggaacagtacttaacctcttagtgattgttttggtctacatccataccacactctgaaggtcttgttcaagggactgcattcagggcaaaacctggctctaacaagaaagatttagaaactatcctttaaaagcacacctccagaatattaagacatacatcccagggtaactcccttgctctaagagcaattactatatgatgcttccagtttgaggaataaaattataacaaagcaaacaggtaaattttaactttacacagaggaaaaaaacaggacaaagcaatgaatatggacactgaagatggactactccaaaacatacaagatttagtaacgtatacaagacacaacagcaaaaatgctacaaccatttttctaagagtacatataaaatacacattaattaaaataaaactgcatttaggtttgtgttttccttaagcctctagtaatctactgaatacaggaaagggaaatttagtcagtataggaaagaagactatgaaaatgtttagaaaaatgaagttttagttagcattaatgaacactgaatattttaaaaactgtctttggaaattatattttagtaactccaaagaaatgagccttagcgtgacttttggtag

SEQ ID NO: 337592 - DNA, 101 bp, Homo sapiens
attagaaatagttacagaaagtttgtgttttgccttgttttttaaaataatagaatcatactttccaaaatacattgtaacctactttttaatatactatg

SEQ ID NO: 337593 - DNA, 194 bp, Homo sapiens
agtctaaaactttagtacttttccatgcagatttgtgcacatgtgagagggtgtccagtttgtctagtgattgttatttagagagttggaccactatgtgtgttgctaatcattgactgtagtcccaaaaaagccttgtgaaaatgttatgccctatgtaacagcagagtaacataaaataaaagtacatttta

SEQ ID NO: 337594 - DNA, 266 bp, Homo sapiens
ccacccccacgaccccaataccacaaatacctacctctctgtccaccacactgatgtagagaaaggcatgaaggtcacagatgagaagtagaaaatgctatgttaggacatctgctgagaatcagagcaactctgtcttccaaaaagacaagagtttggtctgaacaacgccaggtactgagcttccctctgccatcaccgttgcaccaccagatgaataaggagagagcaccacttccacttgaggacccactacaactactcca

SEQ ID NO: 337595 - DNA, 284 bp, Homo sapiens
cactgttgatgtgaaggaaagtaatataaacactatgaaaaatagtatggagtttactttaaaaattaaaactacaataaccatctgactcagcaaagtaattgctgtatatgtagctgtaaaaaaaaaacgaagtatatcagaaacacgtctgcacacctatgtttactgcagcaatattcacaaaagccaagatagggaatcaacctaattgcctagtgattaatggataaagaaaatatggcatatacattcaatgaaacactattaagccataaaacagt

SEQ ID NO: 337596 - DNA, 738 bp, Homo sapiens
gtcattactccatggctgtgactggtgccactgcatctccagcctgtatgacaaagcaagacgctgttccaaaattaaaagttaaaaaatgagataaatacttgaaatattacaattattaaaatagttgttttccccatgggaaaaaaaagttgagcagagctgtgtctttgcactcagaaaaaactcttactctgttgaaggctagtgactcttctaaacaccaaccccttcacctttttactttccttagactttctttggaaaatcaaggagttagcactttttccccctggaagaattaaatgcctctccagaactgcagcacaggaggttaacttctaccacctttggaggcctgcaagctaccagattaaatacttaaagctaagcattcatcatttcttaacctgccctctacagtcatgcacttcctgctttttactttgtcagggctcgtactcaaactattcatagcttcatgaaacaggaactaaatgctgtctgagcctttccccttgtaactctcagcgttctgcttatccttcatagacagaagatgatgatatgtcctgactgttgaagagaaattagacttaatgtgatcctgtacagttaaaccaaaggccagatagggattttttatttcaatcactttctattgtaggcctaggtttggaaaaccttagcaccccctaatttgtaagacttgaactgttttaaagataagggatacac

SEQ ID NO: 337597 - DNA, 310 bp, Homo sapiens
tcaaaataaaacaaatttttattcacttaaaaggccaaaaaggattctggggccaggcacagtggctctcgcctataatccctgcacttcaggaggccgaggcaggaggatcacttgagcccatgagttcaagaccagcctcggaaacacagcaagaccaatctctacaaaaaatttaaaaattagctgggtgtggtggtatgtgcctgtagtctcagctactcaggaggctgaggcatgagaatcacttgcaacccgaaggtggaggttgcaggactccagcctgggctacagagcaatactccaactc

SEQ ID NO: 337598 - DNA, 3009 bp, Homo sapiens
tgcgcatgctcggaagagcgggcagggttcccactccgggagcggagacggagaacaggttatgtgggagccggcgggggcatttgccggcgacacccgagcgggggccggaagtggggccacagctcgcagcaggagctccgggctagaccgtggcgccggcagcggcccctgggctggaggaggatgatgaggagcgacggaagcgacgcgggggtacgctgctgcgcggcgcccggtttcgtgcccgcggccgactgcgcagcctgtccgcgagtctgagatacttacagagagctacaatggaaaagtcctggatgctgtggaactttgttgaaagatggctaatagccttggcttcatggtcttgggctctctgccgtatttctcttttacctttaatagtgacttttcatctgtatggaggcattatcttacttttgttaatattcatatcaatagcaggtattctgtataaattccaggatgtattgctttattttccagaacagccatcctcttcacgtctttatgttcccatgcccactggcattccacatgaaaacattttcatcagaaccaaagatggaatacgtctgaatcttattttgatacgatacactggagacaattcaccctattccccaactataatttattttcatgggaatgcaggcaacataggtcacaggttgccaaatgcattacttatgttggttaacctcaaagttaaccttttgctggttgattatcgaggatatggaaaaagtgaaggagaagcaagtgaagaaggactctacttagattctgaagctgtgttagactacgtgatgactagacctgaccttgataaaacaaaaatttttctttttggccgttccttgggtggagcagtggctattcatttggcttctgaaaattcacataggatttcagccattatggtggagaacacatttttaagcataccacatatggccagcactttattttcattctttccgatgcgttaccttcctttatggtgctacaaaaataaatttttgtcctacagaaaaatctctcagtgtagaatgccttcacttttcatctctggactctcagatcaattaattccaccagtaatgatgaaacaactttatgaactctccccatctcggactaagagattagccatttttccagatgggactcacaatgacacatggcagtgccaaggctatttcactgcacttgaacagttcatcaaagaagtcgtaaagagccattctcctgaagaaatggcaaaaacttcatctaatgtaacaattatataatgtttccctttttgattattgcattgtattttaatttgtgcagaatgataaagaatgttccttttagaagtgtgttatgtctgtacctgtctgaagagtgacattaaactttgaaaggacttcactgctcctttacgatattccaaatagttttttacattggaaaaactaattcttgggattctttcatacattttcatcaaaactttcagtgtgattatgtattcatatcttcagtttaatatgtcagtataatagatattgttcaaaagtttcttgttgctaaagtggtgtaatctgttacacagatgaatagctagatgtggaaagagatatgtaaacaagaaacctttgggtattgtttcttaagtaaatattgggacaatcatggtaagcaaacttagttctgtaactgcatttttcaccttaaaagttaaatgaaatgcatgatggtattttattccttgaattatgcaatgcaacattttacatgtaaatagcactggtcatatactgatgtatatggttatctgggttatatctatttttatgtaaactctattttgtttttggcaagaagtgaaattgagacttatgtgcaggttgccattgaattttgctctggtgaatgctgagatccagctttttcttacaaataaatgggaccctgttttccaatacaaatgtaccgtgtttttgttaggtacagtctggatcatggcatgtagaaatagaaatttagaattttactgcagctttgatgtgcatatttgaactttttaacatttgtaactttggtggcaaagagaattttagcttctatcgattttgtaagtcttcagctgaaccactaatagcagtcatagtgaagattagcactacttagaattaaattaggaagtcttttatcattgcaggattgtacatactactttataaaaattctcacctttgattttaaatcccagtacctagttatatctaacctatcaaaggcaagatatcatttattggacttcttgaaaataaaagttacaaaatccaacaacaacaacaacaaaacaatgttcttggttttaatgttccagttttttacatgtaggagtgtgggaatgaaggaattctggagctttttgacacaaaacctattaccacatttagcagttaaatggctataggtgggaagtaggatttagatgtatagaaaagtaagaaaatcttacttagaaaaaagccccttgaaacttgcaggatttacttaataaaaatacacgctatgagtcataattgtgccaagttgtttcatgcagtcctcaaaaattagatgtaattgagctttgtgtaatattatgtcagctttaacatataatattttgaatattttagctatatttagtggctttctgcaagcaactagaacagagaagtaatgggtcaataatcttgaccttaatttaaaactttcaatggagatagggctagaaatacttttgccaaatagcattcttattcactttatgccggtatttagaaaaaataaattatagcaagtatgatttctaagaatgtttttctataaattactaattgtaaaaagtcttgctttttaaaacaagttggtaatgcatatcatggaaggcatattttgtatgtataaattcaccacaattaaagattattcttgtcagtcctt

SEQ ID NO: 337599 - DNA, 1683 bp, Homo sapiens
tgcgcatgctcggaagagcgggcagggttcccactccgggagcggagacggagaacaggttatgtgggagccggcgggggcatttgccggcgacacccgagcgggggccggaagtggggccacagctcgcagcaggagctccgggctagaccgtggcgccggcagcggcccctgggctggaggaggatgatgaggagcgacggaagcgacgcgggggtacgctgctgcgcggcgcccggtttcgtgcccgcggccgactgcgcagcctgtccgcgagtctgagatacttacagagagctacaatggaaaagtcctggatgctgtggaactttgttgaaagatggctaatagccttggcttcatggtcttgggctctctgccgtatttctcttttacctttaatagtgacttttcatctgtatggaggcattatcttacttttgttaatattcatatcaatagcaggtattctgtataaattccaggatgtattgctttattttccagaacagccatcctcttcacgtctttatgttcccatgcccactggcattccacatgaaaacattttcatcagaaccaaagatggaatacgtctgaatcttattttgatacgatacactggagacaattcaccctattccccaactataatttattttcatgggaatgcaggcaacataggtcacaggttgccaaatgcattacttatgttggttaacctcaaagttaaccttttgctggttgattatcgaggatatggaaaaagtgaaggagaagcaagtgaagaaggactctacttagattctgaagctgtgttagactacgtgatgactagacctgaccttgataaaacaaaaatttttctttttggccgttccttgggtggagcagtggctattcatttggcttctgaaaattcacataggatttcagccattatggtggagaacacatttttaagcataccacatatggccagcactttattttcattctttccgatgcgttaccttcctttatggtgctacaaaaataaatttttgtcctacagaaaaatctctcagtgtagaatgccttcacttttcatctctggactctcagatcaattaattccaccagtaatgatgaaacaactttatgaactctccccatctcggactaagagattagccatttttccagatgggactcacaatgacacatggcagtgccaaggctatttcactgcacttgaacagttcatcaaagaagtcgtaaagagccattctcctgaagaaatggcaaaaacttcatctaatgtaacaattatataatgtttccctttttgattattgcattgtattttaatttgtgcagaatgataaagaatgttccttttagaagtgtgttatgtctgtacctgtctgaagagtgacattaaactttgaaaggacttcactgctcctttacgatattccaaatagttttttacattggaaaaactaattcttgggattctttcatacattttcatcaaaactttcagtgtgattatgtattcatatcttcagtttaatatgtcagtataatagatattgttcaaaagtttttggtggcaaagagggtgcaatttgccacacgataagttctcttagatggaaaaattttttctaccaacaaaaccttggggggtggtttcta

SEQ ID NO: 337600 - DNA, 3075 bp, Homo sapiens
tgcgcatgctcggaagagcgggcagggttcccactccgggagcggagacggagaacaggttatgtgggagccggcgggggcatttgccggcgacacccgagcgggggccggaagtggggccacagctcgcagcaggagctccgggctagaccgtggcgccggcagcggcccctgggctggaggaggatgatgaggagcgacggaagcgacgcgggggtacgctgctgcgcggcgcccggtttcgtgcccgcggccgactgcgcagcctgtccgcgagtctgagatacttacagagagctacaatggaaaagtcctggatgctgtggaactttgttgaaagatggctaatagccttggcttcatggtcttgggctctctgccgtatttctcttttacctttaatagtgacttttcatctgtatggaggcattatcttacttttgttaatattcatatcaatagcaggtattctgtataaattccaggatgtattgctttattttccagaacagccatcctcttcacgtctttatgttcccatgcccactggcattccacatgaaaacattttcatcagaaccaaagatggaatacgtctgaatcttattttgatacgatacactggagacaattcaccctattccccaactataatttattttcatgggaatgcaggcaacataggtcacaggttgccaaatgcattacttatgttggttaacctcaaagttaaccttttgctggttgattatcgaggatatggaaaaagtgaaggagaagcaagtgaagaaggactctacttagattctgaagctgtgttagactacgtgatgactagacctgaccttgataaaacaaaaatttttctttttggccgttccttgggtggagcagtggctattcatttggcttctgaaaattcacataggatttcagccattatggtggagaacacatttttaagcataccacatatggccagcactttattttcattctttccgatgcgttaccttcctttatggtgctacaaaaataaatttttgtcctacagaaaaatctctcagtgtagaatgccttcacttttcatctctggactctcagatcaattaattccaccagtaatgatgaaacaactttatgaactctccccatctcggactaagagattagccatttttccagatgggactcacaatgacacatggcagtgccaaggctatttcactgcacttgaacagttcatcaaagaagtcgtaaagagccattctcctgaagaaatggcaaaaacttcatctaatgtaacaattatataatgtttccctttttgattattgcattgtattttaatttgtgcagaatgataaagaatgttccttttagaagtgtgttatgtctgtacctgtctgaagagtgacattaaactttgaaaggacttcactgctcctttacgatattccaaatagttttttacattggaaaaactaattcttgggattctttcatacattttcatcaaaactttcagtgtgattatgtattcatatcttcagtttaatatgtcagtataatagatattgttcaaaagtttcttgttgctaaagtggtgtaatctgttacacagatgaatagctagatgtggaaagagatatgtaaacaagaaacctttgggtattgtttcttaagtaaatattgggacaatcatggtaagcaaacttagttctgtaactgcatttttcaccttaaaagttaaatgaaatgcatgatggtattttattccttgaattatgcaatgcaacattttacatgtaaatagcactggtcatatactgatgtatatggttatctgggttatatctatttttatgtaaactctattttgtttttggcaagaagtgaaattgagacttatgtgcaggttgccattgaattttgctctggtgaatgctgagatccagctttttcttacaaataaatgggaccctgttttccaatacaaatgtaccgtgtttttgttaggtacagtctggatcatggcatgtagaaatagaaatttagaattttactgcagctttgatgtgcatatttgaactttttaacatttgtaactttggtggcaaagagaattttagcttctatcgattttgtaagtcttcagctgaaccactaatagcagtcatagtgaagattagcactacttagaattaaattaggaagtcttttatcattgcaggattgtacatactactttataaaaattctcacctttgattttaaatcccagtacctagttatatctaacctatcaaaggcaagatatcatttattggacttcttgaaaataaaagttacaaaatccaacaacaacaacaacaaaacaatgttcttggttttaatgttccagttgctgtgaaatagaactcctacaatcaaaagacagttttaggaagtcttatttattgattttaaaagttttacatgtaggagtgtgggaatgaaggaattctggagctttttgacacaaaacctattaccacatttagcagttaaatggctataggtgggaagtaggatttagatgtatagaaaagtaagaaaatcttacttagaaaaaagccccttgaaacttgcaggatttacttaataaaaatacacgctatgagtcataattgtgccaagttgtttcatgcagtcctcaaaaattagatgtaattgagctttgtgtaatattatgtcagctttaacatataatattttgaatattttagctatatttagtggctttctgcaagcaactagaacagagaagtaatgggtcaataatcttgaccttaatttaaaactttcaatggagatagggctagaaatacttttgccaaatagcattcttattcactttatgccggtatttagaaaaaataaattatagcaagtatgatttctaagaatgtttttctataaattactaattgtaaaaagtcttgctttttaaaacaagttggtaatgcatatcatggaaggcatattttgtatgtataaattcaccacaattaaagattattcttgtcagtcctt

SEQ ID NO: 337601 - DNA, 1993 bp, Homo sapiens
tgcgcatgctcggaagagcgggcagggttcccactccgggagcggagacggagaacaggttatgtgggagccggcgggggcatttgccggcgacacccgagcgggggccggaagtggggccacagctcgcagcaggagctccgggctagaccgtggcgccggcagcggcccctgggctggaggaggatgatgaggagcgacggaagcgacgcgggggtacgctgctgcgcggcgcccggtttcgtgcccgcggccgactgcgcagcctgtccgcgagtctgagatacttacagagagctacaatggaaaagtcctggatgctgtggaactttgttgaaagatggctaatagccttggcttcatggtcttgggctctctgccgtatttctcttttacctttaatagtgacttttcatctgtatggaggcattatcttacttttgttaatattcatatcaatagcaggtattctgtataaattccaggatgtattgctttattttccagaacagccatcctcttcacgtctttatgttcccatgcccactggcattccacatgaaaacattttcatcagaaccaaagatggaatacgtctgaatcttattttgatacgatacactggagacaattcaccctattccccaactataatttattttcatgggaatgcaggcaacataggtcacaggttgccaaatgcattacttatgttggttaacctcaaagttaaccttttgctggttgattatcgaggatatggaaaaagtgaaggagaagcaagtgaagaaggactctacttagattctgaagctgtgttagactacgtgatgactagacctgaccttgataaaacaaaaatttttctttttggccgttccttgggtggagcagtggctattcatttggcttctgaaaattcacataggatttcagccattatggtggagaacacatttttaagcataccacatatggccagcactttattttcattctttccgatgcgttaccttcctttatggtgctacaaaaataaatttttgtcctacagaaaaatctctcagtgtagaatgccttcacttttcatctctggactctcagatcaattaattccaccagtaatgatgaaacaactttatgaactctccccatctcggactaagagattagccatttttccagatgggactcacaatgacacatggcagtgccaaggctatttcactgcacttgaacagttcatcaaagaagtcgtaaagagccattctcctgaagaaatggcaaaaacttcatctaatgtaacaattatataatgtttccctttttgattattgcattgtattttaatttgtgcagaatgataaagaatgttccttttagaagtgtgttatgtctgtacctgtctgaagagtgacattaaactttgaaaggacttcactgctcctttacgatattccaaatagttttttacattggaaaaactaattcttgggattctttcatacattttcatcaaaactttcagtgtgattatgtattcatatcttcagtttaatatgtcagtataatagatattgttcaaaagtttcttgttgctaaagtggtgtaatctgttacacagatgaatagctagatgtggaaagagatatgtaaacaagaaacctttgggtattgtttcttaagtaaatattgggacaatcatggtaagcaaacttagttctgtaactgcatttttcaccttaaaagttaaatgaaatgcatgatggtattttattccttgaattatgcaatgcaacattttacatgtaaatagcactggtcatatactgatgtatatggttatctgggttatatctatttttatgtaaactctattttgtttttggcaagaagtgaaattgagacttatgtgcaggttgccattgaattttgctctggtgaatgctgagatccagctttttcttacaaataaatgggaccctgttttcca

SEQ ID NO: 337602 - DNA, 1382 bp, Homo sapiens
tgcgcatgctcggaagagcgggcagggttcccactccgggagcggagacggagaacaggttatgtgggagccggcgggggcatttgccggcgacacccgagcgggggccggaagtggggccacagctcgcagcaggagctccgggctagaccgtggcgccggcagcggcccctgggctggaggaggatgatgaggagcgacggaagcgacgcgggggtacgctgctgcgcggcgcccggtttcgtgcccgcggccgactgcgcagcctgtccgcgagtctgagatacttacagagagctacaatggaaaagtcctggatgctgtggaactttgttgaaagatggctaatagccttggcttcatggtcttgggctctctgccgtatttctcttttacctttaatagtgacttttcatctgtatggaggcattatcttacttttgttaatattcatatcaatagcaggtattctgtataaattccaggatgtattgctttattttccagaacagccatcctcttcacgtctttatgttcccatgcccactggcattccacatgaaaacattttcatcagaaccaaagatggaatacgtctgaatcttattttgatacgatacactggagacaattcaccctattccccaactataatttattttcatgggaatgcaggcaacataggtcacaggttgccaaatgcattacttatgttggttaacctcaaagttaaccttttgctggttgattatcgaggatatggaaaaagtgaaggagaagcaagtgaagaaggactctacttagattctgaagctgtgttagactacgtgatgactagacctgaccttgataaaacaaaaatttttctttttggccgttccttgggtggagcagtggctattcatttggcttctgaaaattcacataggatttcagccattatggtggagaacacatttttaagcataccacatatggccagcactttattttcattctttccgatgcgttaccttcctttatggtgctacaaaaataaatttttgtcctacagaaaaatctctcagtgtagaatgccttcacttttcatctctggactctcagatcaattaattccaccagtaatgatgaaacaactttatgaactctccccatctcggactaagagattagccatttttccagatgggactcacaatgacacatggcagtgccaaggctatttcactgcacttgaacagttcatcaaagaagtcgtaaagagccattctcctgaagaaatggcaaaaacttcatctaatgtaacaattatataatgtttccctttttgattattgcattgtattttaatttgtgcagaatgataaagaatgttcctttta

SEQ ID NO: 337603 - DNA, 304 bp, Homo sapiens
ccatctggtgcccactagactgaatgatcgtccagtgtatgaaagagtgctaggccagatgcggtggctcatgcctgtaatcccagcactttgggaggccgaggttggcagattgcttgaggccaggagttcgagaccagcctcggcaacatggcgaaacccccatctctatcaaaaatacaaaaattagccaggtgtggtggtgtgcctgggaggctgaggcacgagaatcgctggaacagagaaggcggaggttgcagggagctgagattgtgccactgcactccagcatggatgactgagc

SEQ ID NO: 337604 - DNA, 133 bp, Homo sapiens
tttcttttactttccactctcattactgttaaccatactaaaataaatcttcaggccaggcgcagcagtggttcatgcctgtaatcccagcactttgggaggccgaggcggggggatcacttgaggtcaggag

SEQ ID NO: 337605 - DNA, 379 bp, Homo sapiens
aatccctatggattcagtttcctcatttatcaaaggaagattatagtgcatgtcttacctaccagacagggttgttcatgaggatcaaaggccatgatgtttttaagatattttgaaaagcataaagcgctgtgttaatatttgtagattgttatccacattactgctgttattcaatatgttaatgctgggctattaactgagcccagatctttctgctcctctttggctgcttttcaaaagaaaaaaatgagtgttagatttagtaaaataataacctgacaaggggttctattttttattagctttgcagtgctgtctgaagaggccaactgtctatcctttatgaaaaagtggcactttctgtgtcagttagtat

SEQ ID NO: 337606 - DNA, 317 bp, Homo sapiens
tggacttccagataggtagatgaggtaaatcacatttctgtttctacaaatcatttgacaaagtcttccccagctgactcatcagtaaagcggtgcctggctgagtatttacttaggttcatgcacagatagcccaagatccaaaaacagtgatgatgaatgattctgcggctacctaaaccagctgtccagtggaggggcacaaggctctgcaccagggcctgcctacagaccaatgaactgaagggaggcttagaaggcacacttactacattgcagatagaacgaagaaagaatagcccagtgttgcaggtgat

SEQ ID NO: 337607 - DNA, 856 bp, Homo sapiens
acgcagatggacaagggaagagagagaatggccgctgccgccgccgctgctgccgccgccgccgccgccgctcagtgccggagccctcggtgcgcggcggagagaagaggattccggcgggaactcgactcttggcgccaccgcctcatgcactgtgtaggttttgagagtattttagaagggctttatggaccacggctacgaagagacctcagtttatttgaagactgtgaaccagaagagctgactgactggtctatggatgaaaaatgttcattttgtaacctacagagagaagcagtcagtgattgtataccatctcttgattcttcacagtcaacaccaacagaggagctatcatctcagggccagtccaacactgataagattgaatgccaagcagaaaattacctaaatgcactctttcgaaagaaagatcttcctcagaactgtgatcctaacattcccctagttgctcaggaattaatgaaaaagatgatacgtcaatttgcgattgagtacatttcaaaaagtggtaaaactcaagagaatagaaatggttcaattggaccaagtatagtatgtaaaagtatccaaatgaatcaagcagaaaactcccttcaggaagagcaggaaggccccttagacctcactgtgaatcgaatgcaagaacaaaatactcagcaaggggatggagtgttagatctctctacaaagaaaaccagcataaaatctgaagagtcatccatatgtgatccttcttctgaaaattcagtggctggcatgctatcagtgagcccccattagaagtgccctaatcggtccattgaaaggatctgaattgacaccgcttttt

SEQ ID NO: 337608 - DNA, 1195 bp, Homo sapiens
acgcagatggacaagggaagagagagaatggccgctgccgccgccgctgctgccgccgccgccgccgccgctcagtgccggagccctcggtgcgcggcggagagaagaggattccggcgggaactcgactcttggcgccaccgcctcatgcactgtgtaggttttgagagtattttagaagggctttatggaccacggctacgaagagacctcagtttatttgaagactgtgaaccagaagagctgactgactggtctatggatgaaaaatgttcattttgtaacctacagagagaagcagtcagtgattgtataccatctcttgattcttcacagtcaacaccaacagaggagctatcatctcagggccagtccaacactgataagattgaatgccaagcagaaaattacctaaatgcactctttcgaaagaaagatcttcctcagaactgtgatcctaacattcccctagttgctcaggaattaatgaaaaagatgatacgtcaatttgcgattgagtacatttcaaaaagtggtaaaactcaagagaatagaaatggttcaattggaccaagtatagtatgtaaaagtatccaaatgaatcaagcagaaaactcccttcaggaagagcaggaaggccccttagacctcactgtgaatcgaatgcaagaacaaaatactcagcaaggggatggagtgttagatctctctacaaagaaaaccagcataaaatctgaagagtcatccatatgtgatccttcttctgaaaattcagtggctgggagactacacagaaacagagaggactatgtggaaagaagtgctgagtttgcagatggtttgctctcaaaagctttgaaagacattcagtctggagcactggacataaataaagcaggcatactttatggcatacctcaaaaaactttacttcttcacttagaagccttaccagcagggaagcctgcatcttttaaaaacaaaactcgagatttccatgatagttattcatataaggacagtaaagaaacttgtgcagtgctgcaaaaagtagccttgtgggcaagagctcaagcagagcgcacagaaaaaagtaaactcaatctacttgaaacctcagaaataaaattcccaacagcttccacttacctccatcagctaactctacagaaaatggtcactcagtttaaagaaa

SEQ ID NO: 337609 - DNA, 1404 bp, Homo sapiens
acgcagatggacaagggaagagagagaatggccgctgccgccgccgctgctgccgccgccgccgccgccgctcagtgccggagccctcggtgcgcggcggagagaagaggattccggcgggaactcgactcttggcgccaccgcctcatgcactgtgtaggttttgagagtattttagaagggctttatggaccacggctacgaagagacctcagtttatttgaagactgtgaaccagaagagctgactgactggtctatggatgaaaaatgttcattttgtaacctacagagagaagcagtcagtgattgtataccatctcttgattcttcacagtcaacaccaacagaggagctatcatctcagggccagtccaacactgataagattgaatgccaagcagaaaattacctaaatgcactctttcgaaagaaagatcttcctcagaactgtgatcctaacattcccctagttgctcaggaattaatgaaaaagatgatacgtcaatttgcgattgagtacatttcaaaaagtggtaaaactcaagagaatagaaatggttcaattggaccaagtatagtatgtaaaagtatccaaatgaatcaagcagaaaactcccttcaggaagagcaggaaggccccttagacctcactgtgaatcgaatgcaagaacaaaatactcagcaagcatgctacaagtgaaaactgatgagaaactgaatgtgtctgatgagaatacagcaagttgccctttgagccccattaagatgtgccttaatcgtcccattgaatggaatctgaatttgacaacagcatctctaacgagctgtacagttcataaccaaaatctcaaaagcgaagagaaatagattgcagttcttcttgcactatctttattttgtatgtcagtattccttctgaacaataagcatttatcaattgatcttgaagtatttctagtcctgtgatttgtctttatattaaatcattagcattaatcattttgattatattctttatatgtttttttacatgttttacatcagatcattgtggaattttgtaaacggattttgatgtttctcttttagtggtattatgtgaattttttatgccctaagtttaaatacgtaattgtccctagttttatttctgtgcacaaagttttaatatataacacattgtgatttataaagctagtattgtaaagatttgtgatgataacctgacccatgagcagttgtaaaacaggtggataccaactacctcgaagcaaattggtgaaagaaaaggcaaaggtatctcttagaagtaaatctccttcaacgttatatatgtacagaagaaaaaaagttgatcatagctttttgtcaagtagcatgtttcccattcacaggaaaatgt

SEQ ID NO: 337610 - DNA, 447 bp, Homo sapiens
aagcattatctgggcagctttgaatggaaaacagtcatgaatgagcaatcaatggctattcactacaaaatggtggagaggtgactaaaagtttatcttagacaaattttatatcatatatttagttagtttcttcctatcacctggcaatgccagctcctcctctgttctttttttcctatatagtgccttcccagtcatatcctgttcctaaacccgtttaagatgaataggtaatggccacatatcaaatactagtgttatgaattagatcaacaaaatatgaaatattaaaatgtaaggattgcctatctgttgcaaatataaagttttttctcttgcaaaaattataggggatggagtgttagatctctctacaaagaaaaccagcataaaatctgaagagtcatccatatgtgatccttcttctgaaaattcagtggctgg

SEQ ID NO: 337611 - DNA, 391 bp, Homo sapiens
gcagaacaaatgggcatttagagcattaattttttgtcatttttaatggaattccatgtttgaattaaaaaataattctgtatgttgttgttttcttatacttttaggattgtataccatctcttgattcttcacagtcaacaccaacagaggagctatcatctcagggccagtccaacactgataagattgaatgccaagcagaaaattacctaaatgcactctttcgaaagaaaggtaatattggtatgctttgtcatttaaaatttgcaatagagatgtaaaatgttggaatttttttacacaaaagttttttatatgtcagtctctctacttcactctttattgtttctttattcttaatttttctttatatttttagggacagtag

SEQ ID NO: 337612 - DNA, 1498 bp, Homo sapiens
acgcagatggacaagggaagagagagaatggccgctgccgccgccgctgctgccgccgccgccgccgccgctcagtgccggagccctcggtgcgcggcggagagaagaggattccggcgggaactcgactcttggcgccaccgcctcatgcactgtgtaggttttgagagtattttagaagggctttatggaccacggctacgaagagacctcagtttatttgaagactgtgaaccagaagagctgactgactggtctatggatgaaaaatgttcattttgtaacctacagagagaagcagtcagtgattgtataccatctcttgattcttcacagtcaacaccaacagaggagctatcatctcagggccagtccaacactgataagattgaatgccaagcagaaaattacctaaatgcactctttcgaaagaaagatcttcctcagaactgtgatcctaacattcccctagttgctcaggaattaatgaaaaagatgatacgtcaatttgcgattgagtacatttcaaaaagtggtaaaactcaagagaatagaaatggttcaattggaccaagtatagtatgtaaaagtatccaaatgaatcaagcagaaaactcccttcaggaagagcaggaaggccccttagacctcactgtgaatcgaatgcaagaacaaaatactcagcaaggggatggagtgttagatctctctacaaagaaaaccagcataaaatctgaagagtcatccatatgtgatccttcttctgaaaattcagtggctggcatgctacaagtgaaaactgatgagaaactgaatgtgtctgatgagaatacagcaagttgccctttgagccccattaagatgtgccttaatcgtcccattgaatggaatctgaatttgacaacagcatctctaacgagctgtacagttcataaccaaaatctcaaaagcgaagagaaatagattgcagttcttcttgcactatctttattttgtatgtcagtattccttctgaacaataagcatttatcaattgatcttgaagtatttctagtcctgtgatttgtctttatattaaatcattagcattaatcattttgattatattctttatatgtttttttacatgttttacatcagatcattgtggaattttgtaaacggattttgatgtttctcttttagtggtattatgtgaattttttatgccctaagtttaaatacgtaattgtccctagttttatttctgtgcacaaagttttaatatataacacattgtgatttataaagctagtattgtaaagatttgtgatgataacctgacccatgagcagttgtaaaacaggtggataccaactacctcgaagcaaattggtgaaagaaaaggcaaaggtatctcttagaagtaaatctccttcaacgttatatatgtacagaagaaaaaaagttgatcatagctttttgtcaagtagcatgtttcccattcacaggaaaatgt

SEQ ID NO: 337613 - DNA, 1246 bp, Homo sapiens
acgcagatggacaagggaagagagagaatggccgctgccgccgccgctgctgccgccgccgccgccgccgctcagtgccggagccctcggtgcgcggcggagagaagaggattccggcgggaactcgactcttggcgccaccgcctcatgcactgtgtaggttttgagagtattttagaagggctttatggaccacggctacgaagagacctcagtttatttgaagactgtgaaccagaagagctgactgactggtctatggatgaaaaatgttcattttgtaacctacagagagaagcagtcagtgattgtataccatctcttgattcttcacagtcaacaccaacagaggagctatcatctcagggccagtccaacactgataagattgaatgccaagcagaaaattacctaaatgcactctttcgaaagaaaggggatggagtgttagatctctctacaaagaaaaccagcataaaatctgaagagtcatccatatgtgatccttcttctgaaaattcagtggctggcatgctacaagtgaaaactgatgagaaactgaatgtgtctgatgagaatacagcaagttgccctttgagccccattaagatgtgccttaatcgtcccattgaatggaatctgaatttgacaacagcatctctaacgagctgtacagttcataaccaaaatctcaaaagcgaagagaaatagattgcagttcttcttgcactatctttattttgtatgtcagtattccttctgaacaataagcatttatcaattgatcttgaagtatttctagtcctgtgatttgtctttatattaaatcattagcattaatcattttgattatattctttatatgtttttttacatgttttacatcagatcattgtggaattttgtaaacggattttgatgtttctcttttagtggtattatgtgaattttttatgccctaagtttaaatacgtaattgtccctagttttatttctgtgcacaaagttttaatatataacacattgtgatttataaagctagtattgtaaagatttgtgatgataacctgacccatgagcagttgtaaaacaggtggataccaactacctcgaagcaaattggtgaaagaaaaggcaaaggtatctcttagaagtaaatctccttcaacgttatatatgtacagaagaaaaaaagttgatcatagctttttgtcaagtagcatgtttcccattcacaggaaaatgt

SEQ ID NO: 337614 - DNA, 302 bp, Homo sapiens
gagattctgtcttcggaatcgacccagctctttaaaagaatgaggaaaacatggggtctttatatatcctggaaagtcgcctaggcgttcagtgaaaaacgcaaaaggcacgtggattcctatttgtgtaaaaatataaatggggcagggggttaaacatcaggttttttctgcacgaaaggtctcagcgcagagggttggagatttttcttttcattgtatgtctttcgggactgttcgaagccaatgtgtgttgcttaccatattcttgcattgaattttcaattaaaaaaagaaactgc

SEQ ID NO: 337615 - DNA, 371 bp, Homo sapiens
tttcttgtttaagactcaccagcatgagaacttaaaccataggagagatgttcttacttaggaatattactgccctgcccactatcctctcccaatgtaaaataactcatttactaactgaaatatcatcagactctacaagtggctgatgtgactagatatctttaagtcaataagacctaaggtatgtgtgtatgctaccagctttaccagctaccttgaacttgtaagaatgtctgtccctacccctcggggcaccgctggacgaccattctttctcagtctcacttttaggccttctttcctcctttctagtgcttcccaaggtgccatatcgtgatccttcactcttattcctttcttggactcct

SEQ ID NO: 337616 - DNA, 611 bp, Homo sapiens
tgcagtctggctgcttcagctttgctgagaacacatttggatcatagagcactctctaatacccccagacactgaaaatggttccattttattcagtaatggctagtcactaaatgcaaacaatgtttatctaatgggtatcgttcccagtctcattcctatttcaattcctgtggttaataagctaacatcttatcaataagctaacatctccaaaagtgggttctattgaacacttgttctatagaaattcatatatgttacttctgggattgtatcagtataatttgttataatagagtaacttgtaagcatggtatttctagtatttcatgtgacttggtgatatggtatggctgtgtcccaccaaaatctcatcttgaattgtagcttccataattaccacgtgttgtgggagggactcaatggaagttaattgaatcatgggagcggtttccctcatgctgttctcatggtcgtgaataagtctcacgagatccgatggttttataaggggaaatcccttttccttggttcccattctctctcttgcctgccaccgatgtgccttttgccttctgtcatgattgtgaggcctccccagccgcgtg

SEQ ID NO: 337617 - DNA, 779 bp, Homo sapiens
agatcagaatgatgtgttttaaatgtgtaattcataattgtacattttaatattctaaagtgacattgattaatttgacattggagtcaagtagattgattaattcaacaaagaagagaaggcattcaagtcaacagaaaacaagtagattttacttctccactgggggtgttaggacattaattatgtacttggtcttacttgtttagtagtagatctatattgagtgtcttactgtgcccaaacttaggatctttgtatatttctaaaaggatgaaactgtataataaaaacactttccaattttggtagattgtagacagatcagagtattcaaaagtatacacatcttctctattgtgaaagaccaaaaaatggaaatgtgttgtgaaattagaaaagctgtatactagtatgtctgatgttgtgagaagctggatttttgaaaccagagttgtctgttcagccttttatcagtctgtactaagtttgatgtccataggtacataatatagggaaatacataaaggataaaattaagtgaagttacatattttatacttattaggtgggtgcaaaagtaattgcggttttggcaaaaaccgcagttactttcacaccagtctaatattaaatggaactagagtcaaatagaatttagcgattgccagttctgttccacagatttcaaagtacactaaggaaaatttcagcaaattgtgcatggctgttttacttgggggagagtaaaacggccataataaactaaaaaataaaaa

SEQ ID NO: 337618 - DNA, 164 bp, Homo sapiens
ggtatgtggtcttttataagtatctagtccctgagtttaaaactattttgggaataagaataattattaaagtacctctttcaatgttaggccaagatattgctttcctagaacagcctagacatggatttgcgatgtcattaaccatctgtggtctggtaaaa

SEQ ID NO: 337619 - DNA, 379 bp, Homo sapiens
tcccaccaagagctaagcagaatgaatgaaagactcatgaaattttatgacactgggtgtttttaaaaaggtcctgaaagttccaaggaggagaaaaagcttactcacaaagagatggaatagacttccagaatcaattacacagagtgtaagaagatatccctttcaatcctaacaagggaaaattatttttaagctagaattctacatacacccaaactgagaaataagtgaaaagttaaaataaatgcattttaagatatacaacaattctacattatatatcactttgagaaaaacaaaatgaggatgaaaactgaaaaagaggaatatccaactcaagtccaaaaactgcatttaatctataaacgcaggaaga

SEQ ID NO: 337620 - DNA, 429 bp, Homo sapiens
cagcttaataaattccactcttcgagtttctttgggtattttagaaactgatttatacatacaatatctctctcgaaatgagacaatcaacacaggataaaattattgagttatgaaaatcagggtcagacagaggtgcagcactttaaattaaaccggcaaaatatatctttcatactaaattgactctttttgtcttggaaataaatgtttaatcagttaagacgctgaagttgagagagaagccttaagcatatttaattttgtaaaaggggttcgattccaatactgtacatgactcctgctagctgccataccttcaaagcagaaagctaactcccacccacgcctgcaaggctgaacaggccagggcaggggaccggaaagaattggtggcctctgggatcagagccaagggggctttggcat

SEQ ID NO: 337621 - DNA, 201 bp, Homo sapiens
agccgggggcgcgcacacagacccgagctcagccaacactcactccagcgggggacacgtgcacagaccggagctcagagcaaacacttactccagccggggacacgtgcacagacccgagctcagcaaacactcactccagccagggacgcacgcacagaccggagctcagagcaaacacttactccagccggggacgcg

SEQ ID NO: 337622 - DNA, 289 bp, Homo sapiens
catgagccctggtgctggcaaatactaccagaaaacatctccccttcaacagcttggatctcatcactccttaatgtaactaataccatgaattgctcatataaattcagtaacatgcacctactacaggtaaagcagtattcttaaccctgcaagggcaggagcagtgggtgtagtatgagtcaggagccctgcactcaaaggtattatggtctgttagggtataggaaatgggcctgagataagtatactaataaccccaataaattttaagcaccataagagaggt

SEQ ID NO: 337623 - DNA, 429 bp, Homo sapiens
caactcaactgacacacacaaaagacacaaaaccagcacacgcaaacaatcattgctagccctgtgtatagtggcacgagggaaattgcacaaccgacctcaggtggccggcagtggcgtgcctggtgccctttctcctcttccgcctctgttgctccctttggtcctctggggcctcagagaggcaggtcctaaaggagggggggtctcctgggggcagaccgagggtctcggaggatagaatgagaggtttccagggctggcagagtgtgtgcgtgtgtgtgtgcagaagttttgctttcaaacaaatgaagatacaagaggcagtaggacctgggttggaacccaggggagcagactggggggctgttgcccctccctccatctccccaacccaccccaccccacagcagggctcctggcccccac

SEQ ID NO: 337624 - DNA, 2618 bp, Homo sapiens
aggccgcggaggcggaggccgaggccccggcgcagcggggcgcgccccgggcccaggcccggccccagccgccgctgcggagcccgccgggaccccccggagcgcggccacggcgcagatggcccagacactgcagatggagatcccgaacttcggcaacagcatcctggagtgcctcaatgaacagcggctgcagggcctgtactgtgacgtgtcagtggtggtcaagggccatgccttcaaggcccaccgggccgtgcttgctgccagcagctcctacttccgggacctgttcaacaacagccgcagcgccgtggtggagctgccggcggctgtgcagccccagtctttccagcagatcctcagcttctgctacacgggccggctgagcatgaacgtgggcgaccagttcctgctcatgtacacggctggcttcctgcagatccaggagatcatggagaagggcaccgagttcttcctcaaggtgagctccccgagctgcgactcccagggcctgcatgcggaggaggccccatcgtcggagccccagagccccgtggcgcagacatcgggctggccagcctgtagcaccccgctgcccctcgtgtcgcgggtgaagacggagcagcaggagtcggactccgtgcagtgcatgcccgtggccaagcggctgtgggacagtggccagaaggaggctgggggcggcggcaatggcagccgcaagatggccaagttctccacgccggacctggctgccaaccggcctcaccagcccccgccaccccaacaggctccggtggtggcagcagcccagcccgccgtggctgcgggagcagggcagccagccggtggggtggcagcagcagggggtgtggtgagtgggcccagcacgtcggagcggaccagcccaggcacctcaagcgcctacaccagcgacagccctggctcctaccacaatgaggaggacgaggaggaggatggtggcgaggagggcatggatgagcagtaccggcagatctgcaacatgtacaccatgtacagcatgatgaacgtcggccagacagccgagaaggtggaggccctcccggagcaggtagcccccgagtcccgaaatcgcatccgggttcggcaagacctggcgtctctcccggctgaacttatcaaccagattgggaaccgctgccaccccaagctctacgacgagggcgacccctctgagaagctggagctggtgacaggcaccaacgtgtacatcacaagggcgcagctgatgaactgccacgtcagcgcaggcacgcggcacaaggtcctactgcggcggctcctggcctccttctttgaccggaacacgctggccaacagctgcggcaccggcatccgctcttctaccaacgatccccgtcggaagcccctggacagccgcgtgctccacgctgtcaagtactactgccagaacttcgcccccaacttcaaggagagcgagatgaatgccatcgcggccgacatgtgcaccaacgcccgccgcgtcgtgcgcaagagctggatgcccaaggtcaaggtgctcaaggctgaggatgacgcctacaccaccttcatcagtgaaacgggcaagatcgagccggacatgatgggtgtggagcatggcttcgagaccgccagccacgagggcgaggcgggtccctcggctgaagccctgcagtaacccgcccagcctcccgcggggccgcacacttcccctcccaacacacacacacacctgccatcttggtcatgagctactgtctgtccctccccaggacccgcggtgggtgctgcatgttcccggccctctgcccctcctgtcctaccccctttccccaccgagagctgggccgggagaggaccgcagggcaggtggcgtgaggtccgtgttgccttctttaacacacactcgtgcagtgggggagttctggctccccaacctaacccctagccgtcatctccacactcaccaggcccaccaggggagggggctggcctgggggtcttgggaaggcccctccccaggccctaggccacctcgcggaagccttcagcctccgcccctcactgcagccccttgggacttgaggggggccccaggggttctcaggacccctcccaccagctcccagtgcttccacgtctccaaaagcgccttcctgtcaccctcgtctatccctgcgcctgggggctggggtaggcgaggccgtggggactacccattttatagctggggaaacaggctccgagaaattgcacaaccgacctcaggtggccggcagtggcgtgcctggtgccctttctcctcttccgcctctgttgctccctttggtcctctggggcctcagagaggcaggtcctaaaggagggggggtctcctgggggcagaccgagggtctcggaggatagaatgagaggtttccagggctggcagagtgtgtgcgtgtgtgtgtgcagaagttttgctttcaaacaaatgaagatacaagaggcagtaggacctgggttggaacccaggggagcagactggggggctgttgcccctccctccatctccccaacccaccccaccccacagcagggctcctggcccccac

SEQ ID NO: 337625 - DNA, 524 bp, Homo sapiens
ggagactctcggtctcctgtgggcagacggtctcggaggatagaatgagaggctcccagtgcttccacgtctccaaaagcgccttcctgtcaccctcgtctatccctgcgcctgggggctggggtaggcgaggccgtggggactacccattttatagctggggaaacaggctccgagaaattgcacaaccgacctcaggtggccggcagtggcgtgcctggtgccctttctcctcttccgcctctgttgctccctttggtcctctggggcctcagagaggcaggtcctaaaggagggggggtctcctgggggcagaccgagggtctcggaggatagaatgagaggtttccagggctggcagagtgtgtgcgtgtgtgtgtgcagaagttttgctttcaaacaaatgaagatacaagaggcagtaggacctgggttggaacccaggggagcagactggggggctgttgcccctccctccatctccccaacccaccccaccccacagcagggctcctggcccccac

SEQ ID NO: 337626 - DNA, 1468 bp, Homo sapiens
aggccgcggaggcggaggccgaggccccggcgcagcggggcgcgccccgggcccaggcccggccccagccgccgctgcggagcccgccgggaccccccggagcgcggccacggcgcagatggcccagacactgcagatggagatcccgaacttcggcaacagcatcctggagtgcctcaatgaacagcggctgcagggcctgtactgtgacgtgtcagtggtggtcaagggccatgccttcaaggcccaccgggccgtgcttgctgccagcagctcctacttccgggacctgttcaacaacagccgcagcgccgtggtggagctgccggcggctgtgcagccccagtctttccagcagatcctcagcttctgctacacgggccggctgagcatgaacgtgggcgaccagttcctgctcatgtacacggctggcttcctgcagatccaggagatcatggagaagggcaccgagttcttcctcaaggtgagctccccgagctgcgactcccagggcctgcatgcggaggaggccccatcgtcggagccccagagccccgtggcgcagacatcgggctggccagcctgtagcaccccgctgcccctcgtgtcgcgggtgaagacggagcagcaggagtcggactccgtgcagtgcatgcccgtggccaagcggctgtgggacagtggccagaaggaggctgggggcggcggcaatggcagccgcaagatggccaagttctccacgccggacctggctgccaaccggcctcaccagcccccgccaccccaacaggctccggtggtggcagcagcccagcccgccgtggctgcgggagcagggcagccagccggtggggtggcagcagcagggggtgtggtgagtgggcccagcacgtcggagcggaccagcccaggcacctcaagcgcctacaccagcgacagccctggctcctaccacaatgaggaggacgaggaggaggatggtggcgaggagggcatggatgagcagtaccggcagatctgcaacatgtacaccatgtacagcatgatgaacgtcggccagacagccgagaaggtggaggccctcccggagcaggtagcccccgagtcccgaaatcgcatccgggttcggcaagacctggcgtctctcccggctgaacttatcaaccagattgggaaccgctgccaccccaagctctacgacgagggcgacccctctgagaagctggagctggtgacaggcaccaacgtgtacatcacaagggcgcagctgatgaactgccacgtcagcgcaggcacgcggcacaaggtcctactgcggcggctcctggcctccttctttgaccgggcgcctgacaaacgttctccacccgcagccaaactcaaacggctgtttcacggcctccaaaacccaacgacgcgtcttcaaacccgcccccagctcgtgcacacgccagcgtgcacagccggt

SEQ ID NO: 337627 - DNA, 2800 bp, Homo sapiens
  misc_feature (2560)..(2560): n is a, c, g, or t
aggccgcggaggcggaggccgaggccccggcgcagcggggcgcgccccgggcccaggcccggccccagccgccgctgcggagcccgccgggaccccccggagcgcggccacggcgcagatggcccagacactgcagatggagatcccgaacttcggcaacagcatcctggagtgcctcaatgaacagcggctgcagggcctgtactgtgacgtgtcagtggtggtcaagggccatgccttcaaggcccaccgggccgtgcttgctgccagcagctcctacttccgggacctgttcaacaacagccgcagcgccgtggtggagctgccggcggctgtgcagccccagtctttccagcagatcctcagcttctgctacacgggccggctgagcatgaacgtgggcgaccagttcctgctcatgtacacggctggcttcctgcagatccaggagatcatggagaagggcaccgagttcttcctcaaggtgagctccccgagctgcgactcccagggcctgcatgcggaggaggccccatcgtcggagccccagagccccgtggcgcagacatcgggctggccagcctgtagcaccccgctgcccctcgtgtcgcgggtgaagacggagcagcaggagtcggactccgtgcagtgcatgcccgtggccaagcggctgtgggacagtggccagaaggaggctgggggcggcggcaatggcagccgcaagatggccaagttctccacgccggacctggctgccaaccggcctcaccagcccccgccaccccaacaggctccggtggtggcagcagcccagcccgccgtggctgcgggagcagggcagccagccggtggggtggcagcagcagggggtgtggtgagtgggcccagcacgtcggagcggaccagcccaggcacctcaagcgcctacaccagcgacagccctggctcctaccacaatgaggaggacgaggaggaggatggtggcgaggagggcatggatgagcagtaccggcagatctgcaacatgtacaccatgtacagcatgatgaacgtcggccagacagccgagaaggtggaggccctcccggagcaggtagcccccgagtcccgaaatcgcatccgggttcggcaagacctggcgtctctcccggctgaacttatcaaccagattgggaaccgctgccaccccaagctctacgacgagggcgacccctctgagaagctggagctggtgacaggcaccaacgtgtacatcacaagggcgcagctgatgaactgccacgtcagcgcaggcacgcggcacaaggtcctactgcggcggctcctggcctccttctttgaccggaacacgctggccaacagctgcggcaccggcatccgctcttctaccaacgatccccgtcggaagcccctggacagccgcgtgctccacgctgtcaagtactactgccagaacttcgcccccaacttcaaggagagcgagatgaatgccatcgcggccgacatgtgcaccaacgcccgccgcgtcgtgcgcaagagctggatgcccaaggtcaaggtgctcaaggctgaggatgacgcctacaccaccttcatcagtgaaacgggcaagatcgagccggacatgatgggtgtggagcatggcttcgagaccgccagccacgagggcgaggcgggtccctcggctgaagccctgcagtaacccgcccagcctcccgcggggccgcacacttcccctcccaacacacacacacacctgccatcttggtcatgagctactgtctgtccctccccaggacccgcggtgggtgctgcatgttcccggccctctgcccctcctgtcctaccccctttccccaccgagagctgggccgggagaggaccgcagggcaggtggcgtgaggtccgtgttgccttctttaacacacactcgtgcagtgggggagttctggctccccaacctaacccctagccgtcatctccacactcaccaggcccaccaggggagggggctggcctgggggtcttgggaaggcccctccccaggccctaggccacctcgcggaagccttcagcctccgcccctcactgcagccccttgggacttgaggggggccccaggggttctcaggacccctcccaccagctcccagtgcttccacgtctccaaaagcgccttcctgtcaccctcgtctatccctgcgcctgggggctggggtaggcgaggccgtggggactacccattttatagctggggaaacaggctccgagaaattgcacaaccgacctcaggtggccggcagtggcgtgcctggtgccctttctcctcttccgcctctgttgctccctttggtcctctggggcctcagagaggcaggtcctaaaggagggggggtctcctgggggcagaccgagggtctcggaggatagaatgagaggtttccagggctggcagagtgtgtgcgtgtgtgtgtgcagaagttttgctttcaaacaaatgaagatacaagaggcagtaggacctgggttggaacccaggggagcagactggggggctgtngacccagccgcaaccccgaggagacaccggcgcccgacagcgcaagcggacgaccccaacgccacaaaaccccacacgcgcaacaacggacggagagaccggacccgacccggagggccccgcagccacgacaatcggaccgcaccagagcccgacgacgacacgacaaagcgcgagcaccgacccgcacgacaatgcacagccacacacgccaccaccgccacccacccggcgcccgga

SEQ ID NO: 337628 - DNA, 515 bp, Homo sapiens
ctccatgtcccctgcccccaggaacacgctggccaacagctgcggcaccggcatccgctcttctaccaacgatccccgtcggaagcccctggacagccgcgtgctccacgctgtcaagtgtgagtgttggcccagctggacgaggcgtgggcccggggcacgcaggttgacgttttttcccagccttggctctcagagagggctagagttcagtgttgagaagcattctggggctcattctagccttgctgggaaaccggctgtgattgcttagagatttcttcgtgtttgggggatgcacgtgccgaagggaagccagggagcctgtgtcaggcaggagggtctcgaactcagggcagtctgggagggatgaggcagccagacagtgctagccactcgtcatggggggcatctagattttcaagtgaccactccccgttactaaattctggcaaatgatccgaatttttcaagaacacggggccatcccatcaaaaccaacacatccccacaca

SEQ ID NO: 337629 - DNA, 378 bp, Homo sapiens
caatgtacgtcgttgctcttaaatcccaggcacccggccccctgggcccctctgactgagctccagttcccagccaatgccatgctcctggctcgctgtgctgcagatagctgtcccctccttaagccccaagctgagacctggggaagccaagatcaatggcatgcatgctaccgctgtcccctcccaagctgaaggcaggcatcaacaatcaatcatgggaatcgactggctaaggatcattttaatggaactataattccaccaaaatttaaggaaaggcagaagttgatcgacagaagtcctaactctagacagctccccagaagttcgttcccctaaaagtgcatttgctcctcacctacacatgatggtgtg

SEQ ID NO: 337630 - DNA, 286 bp, Homo sapiens
acagggtgtgctgggcatcaaggtgaagatcatgctgccttgggacccaactggtaagactggccctaagaagcccctgcctgaccacgtgagcatcgtggaacccaaagatgagatactgcacaccaccccatctcagaacagaagggtgggaagccagaaccgcctgccgtcacccagccagtccccacagcgtaacagggtctccttggcagctgtattctggagtctggatgttgttctgtaaagatctttaataaaatattgtacaaagacagaaaaaaaa

SEQ ID NO: 337631 - DNA, 322 bp, Homo sapiens
acagggtgtgctgggcatcaaggtgaagatcatgctgccttgggacccaactggtaagactggccctaagaagcccctgcctgaccacgtgagcatcgtggaacccaaagatgagatactgcacaccaccccatctcagaacagaagggtgggaagccagaaccgcctgccgtcacccagccagtccccacagcgtaacagggtctccttggcagctgtattctggagtctggatgttgttctgtaaagatctttaataaaagcgatgcggccgaatatactaaatattaaaacagaagtgatgacagtcccgacggatggg

SEQ ID NO: 337632 - DNA, 257 bp, Homo sapiens
acagggtgtgctgggcatcaaggtgaagatcatgctgctaagactggccctaagaagcccctgcctgaccacgtgagcatcgtggaacccaaagatgagatactgcacaccaccccatggtgggaagccagaaccgcctgccgtcacccagccagtccccacagcgtaacagggtctccttggcagctgtattctggagtctggatgttgttctgtaaagatctttaataaaatattgtacaaagacagaaaaaaaa

SEQ ID NO: 337633 - DNA, 320 bp, Homo sapiens
acagggtgtgctgggcatcaaggtgaagatcatgctgccttgggacccaactggtaagactggccctaagaagcccctgcctgaccacgtgagcatcgtggaacccaaagatgagatactgcacaccaccccatctcagaacagaagggtgggaagccagaaccgcctgccgtcacccagccagtccccacagcgtaacagggtctccttggcagctgtattctggagtctggatgttgttctgtaaagatctttaataaacctaggtgcccgccgaagcgctgttctcctcgctctggcgcgcgcaaacgcgcacggaa

SEQ ID NO: 337634 - DNA, 501 bp, Homo sapiens
gaaggaggacataacgtagattttcaaagggatatataatttaaagtggctttttaaaatctcagctggcttaaattagatatttatcctgatggtttttgccattccatttcaataagaaaacatgctggactcaagtcaaacttgagagtcgaatgagagattttaaattgcaaaatgttactgatgatattttctctaatttgagaaaagtctggaatttctctaactttggcaactctagtttttggtagaaacacatattgaattagaataaaaagtgacagaaatgatagatggatacctgaggaagttttatctgatttcgacactttgaacacattttctttgcaaagttcctgctcaagtatgaagtttgacctgaggctgatgcgtgtgggcggagctttgaaatgccagttgtcatcacaaactacctgggtacaatgctagacagatgtgaaaaatacacactagcaacccaaagataatccaaagata

SEQ ID NO: 337635 - DNA, 398 bp, Homo sapiens
catcagtatgaactcgtggattcttttgttattcattgtactataagccattcctgtcattattcattttgattcttaaattgtcctattcttggccagtgggagtctttcatgctagctcctatgtctttttgtgtctctatctccttcagttctgctctgatcttagttatttcttgtcttctgctagcttttgaatttgtgggctcttgtttctctggttcttttaattgtgatgttagagtgtcgattttagatctttcctgctttctcttgtgggcatttagtgctataaattttcctctacacactgctttcaatgtgtcccagagatttgggtacgtcgtgtctttgttctcattggtttcaaagaccttatttctgccttcatttcgtta

SEQ ID NO: 337636 - DNA, 623 bp, Homo sapiens
taaaattgatctctattcagtttccaacccactaactccctctcccaaactgaaaagtgtcgttctttaaaattgaagagaaccttgtctcaccatacaaaggaaacaaatcaatcaacaacaacaacaacacacacacacacaacttcttcgtggtcttttccctctattacttaatttccaaattggccttgatatttctgattgctctctttttccctttccacttctgcctcatgagcaatcagaaatatcttaaaccttgccactgacaggcgcatcacctcgtatctattactgttttttaggaacttgccaaaggagcaggatctctattcactgaaacatgtttaacttttcttggagttttcatgtaaaacctatttcagggcaaattttgccatcttacattcattaggggaaaaaaatcctaggagggaaaaattgaaaaatagtaagtattaccttttacaaattcagtgttttcaacaaaagtatttaccagaagtgcatttaaaaaaaaaaaactgtaccctctaatgcttctttgaaaataacaatatttaaaataaagtcttagataattaggtcatttcaaaatattttcattcaagttatgcttg

SEQ ID NO: 337637 - DNA, 144 bp, Homo sapiens
gaaactggagatcaaagatgacgcttttatgcgagaaagcaatagaactccaatcaaactgtaagaaaatgttctacaacaaaagattgatgaatgaatgcagagagaaataaattgatggcctcgttggcctcattcagctat

SEQ ID NO: 337638 - DNA, 87 bp, Homo sapiens
gccacttttaaattatttccacttctaatgtgctaactttgatcttaaaaatccttcctgatgctacacaatatgtgattgtaaatg

SEQ ID NO: 337639 - DNA, 807 bp, Homo sapiens
aaaaaaaaaaaaaaaaaaaaaaaagatggggtgtcgctgtgttgctcaggcttgcttctgtttcaatcaagcctcatgatactggtcagcaagcactcacaatgggtgctacactgtctccctgaccctctccctttccaggactgaagctttcacacccccagccagcagctggcagtccctccccaggaactgtccttcccgggagagccacctcacccaaggtcacgcccacaccctagaggcagctcacattcactaagtccctcccctcaatgcgggacaactctgaaggtccttgcagaccagggcgcccctccattgcaagtgcaggcagcccagcttttccctgtgctcacttctccctctcccatgccagtgtgcgtcttgagggcactcccagcaaacttgctgcacacaaacctcagtctcctggggagcctgtcctgcaacagcttattaggtaccaggcacgatcctaggcactttacgcatattatttcatactatcctcccaacaaccccaagaggcaggcacttttattatcaaaggctatgtaacttgtccaaggtcacagagctagcaagccagagagccagggttgtcatgcagggagttgggctccggggctctgaaatgttacaacactgtcttaattcctatagtctagcttgaggaaattagacagaagaaacagtgaagatgtattctgatttgaggggggaataaatctcagccgggcacggtggctcatgcctataatcccagcactttgggaagttgaggcgggtggatcatttgaagtc

SEQ ID NO: 337640 - DNA, 286 bp, Homo sapiens
tccatttaaaaaacaaaacacaacaaaaaaaattcaatttgccattcaacactggaagcttatgattaaataaatgcaagttaaagcagcattaaggtgttacttttaacctaaaagattgaccaagttttaaaagtttgataaatgcccagttagtgagcaactagaccattctcatgcccattaagagggaatgtgtattaggacatactctttggaaggcaattgggtaatgtttattaaattttaaatacatactttatgacttggaattagacttgtagga

SEQ ID NO: 337641 - DNA, 159 bp, Homo sapiens
acaaatcattatctccaaattattggtatgaaatcatatcaatgcttggggctttaaaatgggtgggctgatgtggagaagaaaaaaaattgaaaaacagaatgtctcctaaataataaataagtaaaatcaaattgtaatttaattcgaatcctacca

SEQ ID NO: 337642 - DNA, 457 bp, Homo sapiens
ggggcgactctttttaactctggagttggagaatttccaaatggaaaaataagatatgcatatcaaggaaagctaaaaccttctattgaatgcatggagataggataggcattcactgagttaatatgctgtggcctactagtctttgccacattctctatgtcaccatcaactttctcaggccaagtaaatgcacctcgtctacttgatttctgccttttcttgaattcaacagcaggtgattgacagggtaaaactgttgtttcttctcaactttctgccctgttttttgtctgaggtactacaactaaagaaaaataacaggttatagaaaaaggagcagttatttttaaaaccaccaacacaaatctttggaataaggtgctgtacactaggaatagttgtttaaggctgtctttagaatatggtgaatttgaaatctgaacctgctttttct

SEQ ID NO: 337643 - DNA, 619 bp, Homo sapiens
ctggacaagaacattttcaagtaaaactgagttaaagtcagagaatgtcaaaagcagctagaaaggtgctcaagtctctaagagggttcaaggaaaggaggcataaagaagaacacctttgtctcttcaaggcaaaggtgggaaggtttcatttgtgttgaaagattttaagatttctttaagttgctttcacctggagccaagatctcctaatttatctcacagccagttctttcacctcccccagcctgaaatcatccaagtaaaagatactcataaaaaggtagacacataccgcttccccttctgtcttgattatcatctaggaaccattaccggtgtcatccaggctatccagggagagacagcaggtcaggctctgagacatgccttccatccccacctcatctaccctatgcccctgataagggccaaagggctatgttccttcattcctttgcttccccaaacctcagtctccaatatccttatttatcttctaggtttttgcaatcgcctgtgtgttttctcattcaagaaacttgagtaattgtttacaaaccagaatgtcctctgtactgagcagaagaaccctgcagtcctttgaccaggaaagcaa

SEQ ID NO: 337644 - DNA, 368 bp, Homo sapiens
ccaggctttccacactgctgttccctctgcccagaatgttcttccccctccccgccagctgttcagccccatcattcctcaggcctcagcttcaaggtccggtcagcatgctgtgtgcgctcacaagcttctagcttttttctcttgtacagtgcttcccacagctggaatcaacacatgcttaatgccactgtttgctgtctttccctctaaatgggaagccccctgaggaccagtacctcatttgtggtgttcactgtggtgcccccaatgcctggcttctagtgggtgctggacagatgtctctagaacaatggaatgcattggtttgaggacagcgcagttaactcacagccctgagtggggag

SEQ ID NO: 337645 - DNA, 304 bp, Homo sapiens
aagaatcgatattgtggttctggcactgctaaaggtgccatgatgagttattttaaaaacatatacaatctggttcttgtatttaaggaattttcagtataactaaagacacatggtaactatgtaaggactgactttaaaatatccataaatcaaagacttcccggatgaagctctgattacacccagccaccccggactcctggctgttccagcagtctcgcccagcacctacatccctgccgctctctgctttgattcaccccacaaacgccagaaccacaaatatcgccacatctagacc

SEQ ID NO: 337646 - DNA, 154 bp, Homo sapiens
gtggaacaaatccccacatttgattcttttctctaagagccttttaaggaaattgtgactctgtgttagagccaacgggctatatcctattagttcatctcactcccttctgccctgtgccccttgccccctgccttattaacattctatggtt

SEQ ID NO: 337647 - DNA, 110 bp, Homo sapiens
ttaggtacgcagcatcattctagaagggaccccctagttgcctggtttcaagaggtcataatggctattccacagatcccttctactcacccattatttgaatagtcaaa

SEQ ID NO: 337648 - DNA, 89 bp, Homo sapiens
cttcccaagagtccctcaaatgctgctgccctgcctggtcccaggctctctagactcaggcgactgaagctaatcacttcatctagttc

SEQ ID NO: 337649 - DNA, 246 bp, Homo sapiens
tgaacaggagggaagagtgggtgaggtaggggcagtgaagatgtagagggcaattagattccaggagggcttagcacaaatgcccagcaagacttgtcataggttgcttgatgatggcagtagccaccacaattgggagtgactcaaggagtctgcggctttcagagtgggtctcacagagggctgtgattcaggcgcctgtgtccatatggcatgtgatttggtagatccttctggagtcctcct

SEQ ID NO: 337650 - DNA, 338 bp, Homo sapiens
ctcattggcgggcaagggcatcctgggaaatgccatcaagtggaacttcaccaagttcctcatcgacaagaacggctgcgtggtcgcggggcgcgttgtgggattacaggcatgagccactgtgcctggttagcacagaagttttacatcttgatgaagtgcaatttattttttattttgttgcttgtgcttttggtgtcctatctaaaaattatttcccaaattcagtgtcatgaagatatacctctatgttttctccaaagagttttatagttttcacctcttacatttaggtccttgagccattttgagataatttttttttttttttttttttt

SEQ ID NO: 337651 - DNA, 582 bp, Homo sapiens
tccctaagctatcagtaactttcttcttcttcactactttaggaagctatcatatagtcatgtgtatcatacagtcatgtattgataagtcagtggaactatttttgatattttacggtaattccattcttcccaattttctgtaacagttttattttcaacagtaggtttaaatgaagatgttttatttctgacttcattttgacattgaatctaaatctatgcttcccttatgttgaaccattcaattttctctaatgttcccctaaagttcaaacttcgtatatttctttttacgtggattcacaagccatcttgaatgagtggttcatgcaaggaagcacagacatacttatagacaacactaaaagtgttgcaaggtttcctgcaataattcctgaaggcggttccactggtagagctgatacaagcatactgcacagagaaaccttaaaacctctagagaagaaaggatggggctagaaggtcaacagtagtagtagctagcacagccaatttgaaggaatgtgaaaatatagaacatataacttttttcttgttgcttggctgggaagtaagtgt

SEQ ID NO: 337652 - DNA, 161 bp, Homo sapiens
agttctcttctagtcttggtttgttgaatatttttatgataagacacttggattttgtcaaatgctttttccctatctattgagatgattatgtgggttttgtctttcattttattagtgtggtatataacactgatgttcatagactttttttttttttt

SEQ ID NO: 337653 - DNA, 541 bp, Homo sapiens
aggggaaaagaccatgtatgctttgcagagaaccctgatacaataaaggattcttcctttggactacagcacagtcttaattcaggacagagtttagagtctgtaactctgaaaggcagagctccacggaagcagatgtcccttctgaacagttctgaattccagcctcaaattagaacagttgccaagagtcacagtgactcatgcattctttcttcaaacaacctccctaccaaggatcttctttcagctctgttagaacaaggcaataaactgcgtaatgccatggtgatttctgcaatgaaatcaagcccagagaccagcatgttgttggaccaagttcatcctcctattaatgaagattctcttagagcatcaacacagatcagagccttttctaggaatcggtttaaagaccacattgaagatcacctcctcccttcaactgagaatacattttggagacacgacacaaaagctgataccagagctatacagctgctattaggccagtgctgaattagtccaaagggcggacaag

SEQ ID NO: 337654 - DNA, 578 bp, Homo sapiens
gacacggcaccaattatctcttccaattaaaccaccgccacaggatgctaaatccagtgatatgaaccggcagcaggatgcttgcccagcccagggctggcatttatgatccttattagcaggaaagctctgtcttctgctccccacggctcagctgtggaacctggagctcccaccagcccccacagcaggtgctctgggaaggggcagaagaaaatgatggcaggacttggagaagccaggacagcagagtcaacagttccaactccattggggaactttccccatcgatgacagcaatttccctaacatctaattataggcattttgtcagctaaataataagttgcatggattaaatgcctacagtgagccaggaactccaagaagtaccttgtgtaatttcatctaatcctcgcaacaaccctctgaggcaattcttcattgcccatcctcattttaaagatggggaaactgaggctaagagaaacctgccataggtgggtagacctaggactcaaagccaggtggtgtctagctccgaagtctgcacttcttccattacaccacagcagacc

SEQ ID NO: 337655 - DNA, 450 bp, Homo sapiens
ctcccagattccagatcccaacagagcatctggtccacccactgttccccaacacaatgatactaaaagaccctgagagtctacgcatttgtcccctttctctgacctaaaaaagggaggtgccacaacttacagtttttctgtatgtctcacttaaccccccacacccatcagacagaagggtgttcactctcttcctatcctgggtggaagtcaaggacagtgcagtaactatgaaacagtacttcgtatactgaaaattgcttttgaaatctctcctcagcatctgcccgtcccggcccaaactcctcactcccttacgctgtgtctgccctgggaccgtctctggatttctgctctgatggtgctgtggttttgcagctcactctcagctgcacccacgcccccggggaggggagggtctgtctggtgcctcactgctgtagtctc

SEQ ID NO: 337656 - DNA, 765 bp, Homo sapiens
atccatccacccattcgttagctatttatccattatccattcctccatctatccatcatccattcatcccttatccattcaaccattatgcatttcttcatttatccattatttatccttccatccatcatccatcatctttccatccactatctatccattcatccatctatccatcatccatccatcctttatccatcattcatcagccatcatccctccatctatccattatccatcatccactcatccattcatccctccatctgcccattatccatcaaccatccatccatccattatccgtcatccacacatacattcatccctccatctgcccattatccatcaaccatccatccatccattatacatttctgcattatccatttattctttatccatttcttcatctattcatcatctatccatccattatccttacacctatctatcatccatccattccttcatctatccatcatccatcaattatccatccattcatccatccatctatccatcttctattgattgcttgtcatccttccttgtatcagacttccatccatcctccttccatgtgtcacacatcctcattactcaaccatccagctgtgcatccatctattcactgatatagttcactgtgcccctactatgtgccaagcactgtggtaggcacttgaggtgggatgctggagcatccagagagggcatctattgtcgtgagcctgggttcagattccaccttctccacttgtg

SEQ ID NO: 337657 - DNA, 206 bp, Homo sapiens
tgtggctcagtactccatgatgtacacgcactcacattttccctctccaccctcgcactccaaacacccatctccatcatcaatgctgcagggagcattctcctatatgtctccttgtgaagctgtgtgagagtttccttcacacacacacacccgacacccaggggtggaagtcacaggctcacagtatgcaaataattattttg

SEQ ID NO: 337658 - DNA, 493 bp, Homo sapiens
tgtttctttagtatggaattagaacttaaatttccagaaaaatagaaggaattgatctaaatcctgttttgctctttgttctagtgtcaggggtttggggctaagtattaggaggcccagattcttaacttagccactagcaatatgaccttagataatcctcataaacctcactgtacctcagtttcctcatcagatgaaatgacagaggaatgcagtcccttccaactttaaaatgattttggaaggaatcctattcgaaattggctagaaaaaagtggactgtgacttaagggatgagacacagaagtctgaagtcaaacacactattatttggaagcttactgacctacctatgtttacaaagtatgtgtaatgttttttagaaagcagcataacactgtgtcttagggtcacataacttgacaaaggcttaaattctttgcctcggctttccattattaaccaatgaactctactggtggatctttgt

SEQ ID NO: 337659 - DNA, 864 bp, Homo sapiens
  misc_feature (29)..(29): n is a, c, g, or t
atcaggctaggtacgaggcctgggtggtngccgacgctcctggccgaataaaaaacctcttccttctttaatccggtgtccgaggagtttgtgtgcgactcgtcctgctacatttcttggttacaaaaacctcttccttctttaatccggtgtccgaggagttttgtctgcgactcgtcctgctacatttcttggttacaaaaacctcttccttctttaatccggtgtctgaggagttttgtttgcgactcgtcctgctacatttcttggttccgtgaccgggaagcgaggtgattgaaggacggtcgaggcagccccttaggctgcttaggcctgccctgtggagcgtccctgcaagggactctggccagcttgagcgacgggcatcctgagagcgctcccgggtaggcaattgccctggtggaacacctcgtcagagcagtgtgtggcaggcccccgcggaggatcaacgtggtggctgaacaccgggaaggaactggcactagaagtctggacgtctgaaacttgccaacaaaaataacagcaatggggcttaaacagagcatacgcccacaaggacaaagaaaatgatggaggagacaagaacaacacagtcctggaagctggagggaggaggacacattcagctgactttgcagatccaaaaatgcagacttcttctcagctggtagagtgggaggtgaaaagcaaacttattacactgcagaacaccccaaatactcaggaattgatggttccaggaattgcagcaaggtggggctataaaaactcagctgggagtctgcttaggaagcatttgtcttccgttttctccttcatcctgcaacagctgaagccctgccc

SEQ ID NO: 337660 - DNA, 869 bp, Homo sapiens
tctttgtgactaggtacgaggctgggttggcgctgtacattcctgggcgccgtagatatacctcttccttctttaatccggtgtccgaggagtttgtgtgcgactcgtcctgctacatttcttggttacaaaaacctcttccttctttaatccggtgtccgaggagttttgtctgcgactcgtcctgctacatttcttggttacaaaaacctcttccttctttaatccggtgtctgaggagttttgtttgcgactcgtcctgctacatttcttggttccgtgaccgggaagcgaggtgattgaaggacggtcgaggcagccccttaggctgcttaggcctgccctgtggagcgtccctgcaagggactctggccagcttgagcgacgggcatcctgagagcgctcccgggtaggcaattgccctggtggaacacctcgtcagagcagtgtgtggcaggcccccgcggaggatcaacgtggtggctgaacaccgggaaggaactggcactagaagtctggacgtctgaaacttgccaacaaaaataacagcaatggggcttaaacagagcatacgcccacaaggacaaagaaaatgatggaggagacaagaacaacacagtcctggaagctggagggaggaggacacattcagctgactttgcagatccaaaaatgcagacttcttctcagctggtagagtgggaggtgaaaagcaaacttattacactgcagaacaccccaaatactcaggaattgatggttccaggaattgcagcaaggtggggctataaaaactcagctgggagtctgcttaggaagcatttgtcttccgttttctccttcatcctgcaacagctgaagccctgccc

SEQ ID NO: 337661 - DNA, 767 bp, Homo sapiens
gctctcaatccatcacgaccctttcacgtggaaccccttagagttgtaagcccttaaaagggccaggaactctgtcttcggggagctctgctcttaagacgcgtgtctgccgacgctcctggccgaataaaaaacctcttccttctttaatccggtgtccgaggagtttgtgtgcgactcgtcctgctacatttcttggttacaaaaacctcttccttctttaatccggtgtccgaggagttttgtctgcgactcgtcctgctacatttcttggttacaaaaacctcttccttctttaatccggtgtctgaggagttttgtttgcgactcgtcctgctacatttcttggttccgtgaccgggaagcgaggtgattgaaggacggtcgaggcagccccttaggctgcttaggcctgccctgtggagcgtccctgcaagggactctggccagcttgagcgacgggcatcctgagagcgctcccgggtaggcaattgccctggtggaacacctcgtcagagcagtgtgtggcaggcccccgcggaggatcaacgtggtggctgaacaccgggaaggaactggcactagaagtctggacgtctgaaacttgaaactcattaatcttcaaaggcttcaagagtggcacagatgaatccaatattcctatatgacctactttactgaactggaaaaactgcatgctgacagcacaaatgatctgtaagaagagatgcaggttgtatatgtcagcctcgcagagaactctttcc

SEQ ID NO: 337662 - DNA, 726 bp, Homo sapiens
  misc_feature (29)..(29): n is a, c, g, or t
atcaggctaggtacgaggcctgggtggtngccgacgctcctggccgaataaaaaacctcttccttctttaatccggtgtccgaggagtttgtgtgcgactcgtcctgctacatttcttggttacaaaaacctcttccttctttaatccggtgtctgaggagttttgtttgcgactcgtcctgctacatttcttggttccgtgaccgggaagcgaggtgattgaaggacggtcgaggcagccccttaggctgcttaggcctgccctgtggagcgtccctgcaagggactctggccagcttgagcgacgggcatcctgagagcgctcccgggtaggcaattgccctggtggaacacctcgtcagagcagtgtgtggcaggcccccgcggaggatcaacgtggtggctgaacaccgggaaggaactggcactagaagtctggacgtctgaaacttgtaggctgcctgctaagaaagagtagacagacccaatgtcctccgatcagtctggactcagttcatccttcccctggtacagaagagctgcgtcagtcattctctctgtgatctactgataagagtcctggacggggaattccaaggccatgggtctattcccagccttgccactatgaatgtgacctccagcagttagatcccctgcctgcagcacgtgctgatctccaagggtgaggctggatgaagccaggggctatggaaagggagactg

SEQ ID NO: 337663 - DNA, 867 bp, Homo sapiens
acacccatggctaggtcgaggccggtgtacgagccgacgctcctggccgaataaaaaacctcttccttctttaatccggtgtccgaggagtttgtgtgcgactcgtcctgctacatttcttggttacaaaaacctcttccttctttaatccggtgtccgaggagttttgtctgcgactcgtcctgctacatttcttggttacaaaaacctcttccttctttaatccggtgtctgaggagttttgtttgcgactcgtcctgctacatttcttggttccgtgaccgggaagcgaggtgattgaaggacggtcgaggcagccccttaggctgcttaggcctgccctgtggagcgtccctgcaagggactctggccagcttgagcgacgggcatcctgagagcgctcccgggtaggcaattgccctggtggaacacctcgtcagagcagtgtgtggcaggcccccgcggaggatcaacgtggtggctgaacaccgggaaggaactggcactagaagtctggacgtctgaaacttgccaacaaaaataacagcaatggggcttaaacagagcatacgcccacaaggacaaagaaaatgatggaggagacaagaacaacacagtcctggaagctggagggaggaggacacattcagctgactttgcagatccaaaaatgcagacttcttctcagctggtagagtgggaggtgaaaagcaaacttattacactgcagaacaccccaaatactcaggaattgatggttccaggaattgcagcaaggtggggctataaaaactcagctgggagtctgcttaggaagcatttgtcttccgttttctccttcatcctgcaacagctgaagccctgccc

SEQ ID NO: 337664 - DNA, 943 bp, Homo sapiens
gctctcaatccatcacgaccctttcacgtggaaccccttagagttgtaagcccttaaaagggccaggaactctgtcttcggggagctctgctcttaagacgcgtgtctgccgacgctcctggccgaataaaaaacctcttccttctttaatccggtgtccgaggagtttgtgtgcgactcgtcctgctacatttcttggttacaaaaacctcttccttctttaatccggtgtccgaggagttttgtctgcgactcgtcctgctacatttcttggttacaaaaacctcttccttctttaatccggtgtctgaggagttttgtttgcgactcgtcctgctacatttcttggttccgtgaccgggaagcgaggtgattgaaggacggtcgaggcagccccttaggctgcttaggcctgccctgtggagcgtccctgcaagggactctggccagcttgagcgacgggcatcctgagagcgctcccgggtaggcaattgccctggtggaacacctcgtcagagcagtgtgtggcaggcccccgcggaggatcaacgtggtggctgaacaccgggaaggaactggcactagaagtctggacgtctgaaacttgccaacaaaaataacagcaatggggcttaaacagagcatacgcccacaaggacaaagaaaatgatggaggagacaagaacaacacagtcctggaagctggagggaggaggacacattcagctgactttgcagatccaaaaatgcagacttcttctcagctggtagagtgggaggtgaaaagcaaacttattacactgcagaacaccccaaatactcaggaattgatggttccaggaattgcagcaaggtggggctataaaaactcagctgggagtctgcttaggaagcatttgtcttccgttttctccttcatcctgcaacagctgaagccctgccc

SEQ ID NO: 337665 - DNA, 749 bp, Homo sapiens
  misc_feature (29)..(29): n is a, c, g, or t
atcaggctaggtacgaggcctgggtggtngccgacgctcctggccgaataaaaaacctcttccttctttaatccggtgtccgaggagtttgtgtgcgactcgtcctgctacatttcttggttacaaaaacctcttccttctttaatccggtgtctgaggagttttgtttgcgactcgtcctgctacatttcttggttccgtgaccgggaagcgaggtgattgaaggacggtcgaggcagccccttaggctgcttaggcctgccctgtggagcgtccctgcaagggactctggccagcttgagcgacgggcatcctgagagcgctcccgggtaggcaattgccctggtggaacacctcgtcagagcagtgtgtggcaggcccccgcggaggatcaacgtggtggctgaacaccgggaaggaactggcactagaagtctggacgtctgaaacttgaagaacgaccacacttttgcgttaaggttaagactctctgagtttctgaagccttgcagaagtaatctttgcctagctttgggaagatctgacccactacagattatgttagaagtgccagaggaggaagacttcctgtacccgtctgttatggagctaaatcacatcagtcacactgtgacatgtgatgaacagacatgggcgccatagtaagtcagcagagcccagagcaatgagtatgtctggaaggaggagactgcccaaagctaactgtggggctgtgcgttgaaggatga

SEQ ID NO: 337666 - DNA, 476 bp, Homo sapiens
ggaagatagctgtgaataaactgaatttgagtgtacatttaagttggtgataacagaattgtagatgttatagaagtataattttacaggtaatttggaggaagttcataaatatatgaaaacctgcatttgtagccatagaactctaattttaatgccaagctctcattaataattaactgaaagtgtctacacaatggaggcgtttcttcgttatgcaaatatctactcagtacatgcaaagttttagggaaaggtcttgtaaaaattgcatatggtggatagcttatatagcaaattcttattgagcatattctgtttagaagacacgtatccccattataagtgttgggggaagctaggcgtgttggcttattcctgtaatcccaagctactcaggagactgaggcagcaggatcacttgaagccgagagttcaagaccaacctgggcaacgtagtgagaccctaattgtag

SEQ ID NO: 337667 - DNA, 355 bp, Homo sapiens
gccctggatccagagggggtgggaccacatctcgaaggaagacagagggaatgcagcaaaaatgggcaaaggcaaaccatctaactagagggccaaaaagtggagtgagctcccacctgatggcctctatttactctgtgcagtaagatggagatcacgtagggaggagagctagatgttaaaattacaagaattctatgagtaggttgctaaacacagacattaaaatagtgaccatggtgtctggaaatggtagctcgtgcctgtaatcctagcactttgggaggccgagtgggagggtcgcttgaggccaggagttcaagaccagcctgatcaacatagtgagaccccattt

SEQ ID NO: 337668 - DNA, 2524 bp, Homo sapiens
cggcgtggggcgcgacttccggggcggcggttgcatcagattctaggaagtgtctgtagccgcagctgcgggtccgggattcccagccatggcagattcctccgggcagcagggcaaaggccggcgtgtgcagccccagtggtcccctcctgctgggacccagccatgcagactccacctttacaacagcctcaccaggaacaaggaagtgttcatacctcaagatgggaaaaaggtgacgtggtattgctgtgggccaaccgtctatgacgcatctcacatggggcacgccaggtcctacatctcttttgatatcttgagaagagtgttgaaggattacttcaaatttgatgtcttttattgcatgaacattacggatattgatgacaagatcatcaagagggcccggcagaaccacctgttcgagcagtatcgggagaagaggcctgaagcggcacagctcttggaggatgttcaggccgccctgaagccattttcagtaaaattaaatgagaccacggatcccgataaaaagcagatgctcgaacggattcagcacgcagtgcagcttgccacagagccacttgagaaagctgtgcagtccagactcacgggagaggaagtcaacagctgtgtggaggtgttgctggaagaagccaaggatttgctctctgactggctggattctacacttggctgtgatgtcactgacaattccatcttctccaagctgcccaagttctgggagggggacttccacagagacatggaagctctgaatgttctccctccagatgtcttaacccgggttagtgagtatgtgccagaaattgtgaactttgtccagaagattgtggacaacggttacggctatgtctccaatgggtctgtctactttgatacagcgaagtttgcttctagcgagaagcactcctatgggaagctggtgcctgaggccgttggagatcagaaagcccttcaagaaggggaaggtgacctgagcatctctgcagaccgcctgagtgagaagcgctctcccaacgactttgccttatggaaggcctctaagcccggagaaccgtcctggccgtgcccttggggaaagggtcgtccgggctggcatatcgagtgctcggccatggcaggcaccctcctaggggcttcgatggacattcacggaggtgggttcgacctccggttcccccaccatgacaatgagctggcacagtcggaggcctactttgaaaacgactgctgggtcaggtacttcctgcacacaggccacctgaccattgcaggctgcaaaatgtcaaagtcactaaaaaacttcatcaccattaaagatgccttgaaaaagcactcagcacggcagttgcggctggccttcctcatgcactcgtggaaggacaccctggactactccagcaacaccatggagtcagcgcttcaatatgagaagttcttgaatgagtttttcttaaatgtgaaagatatccttcgcgctcctgttgacatcactggtcagtttgagaagtggggagaagaagaagcagaactgaataagaacttttatgacaagaagacagcaattcacaaagccctctgtgacaatgttgacacccgcaccgtcatggaagagatgcgggccttggtcagtcagtgcaacctctatatggcagcccggaaagccgtgaggaagaggcccaaccaggctctgctggagaacatcgccctgtacctcacccatatgctgaagatctttggggccgtagaagaggacagctccctgggattcccggtcggagggcctggaaccagcctcagtctcgaggccacagtcatgccctaccttcaggtgttatcagaattccgagaaggagtgcggaagattgcccgagagcaaaaagtccctgagattctgcagctcagcgatgccctgcgggacaacatcctgcccgagcttggggtgcggtttgaagaccacgaaggactgcccacagtggtgaaactggtagacagaaacaccttattaaaagagagagaagaaaagagacgggttgaagaggagaagaggaagaagaaagaggaggcggcccggaggaaacaggaacaagaagcagcaaagctggccaagatgaagattccccccagtgagatgttcttgtcagaaaccgacaaatactccaagtttgatgaaaatggtctgcccacacatgacatggagggcaaagagctcagcaaagggcaagccaagaagctgaagaagctcttcgaggctcaggagaagctctacaaggaatatctgcagatggcccagaatggaagcttccagtgagggggcacaggactgactttttaaaccattgtggactagtggctgctgtctgcctcagtgacaatgtcccagcgctcctatcatgtttacagtcacccttgggtcctaaattaagagttgtgttcatgtaggttcgtgtcgtcgttggctctgagacattgataataaatttttctcaacagtgaaacc

SEQ ID NO: 337669 - DNA, 461 bp, Homo sapiens
gtctcttgatggatcccttcgactgtgggctcagtaggaaacaggaacaagaagcagcaaagctggccaagatgaagattccccccagtgagatgttcttgtcagaaaccgacaaatactccaagtttgatgaaaatggtctgcccacacatgacatggagggcaaagagctcagcaaagggcaagccaagaagctgaagaagctcttcgaggctcaggagaagctctacaaggaatatctgcagatggcccagaatggaagcttccagtgagggggcacaggactgactttttaaaccattgtggactagtggctgctgtctgcctcagtgacaatgtcccagcgctcctatcatgtttacagtcacccttgggtcctaaattaagagttgtgttcatgtaggttcgtgtcgtcgttggctctgagacattgataataaatttttctcaacagtgaaacc

SEQ ID NO: 337670 - DNA, 489 bp, Homo sapiens
agatgagtgtgctggctccagagcagtgtggtgactgaatgtccaagcaagaggacatggctgcatcagggagatagacactttgagacgggagggcaaagaaaggggagttggggttacccaggtgcagaggagaccaatagccgctgtgctctgggttttcagggtctgcccacacatgacatggagggcaaagagctcagcaaagggcaagccaagaagctgaagaagctcttcgaggctcaggagaagctctacaaggaatatctgcagatggcccagaatggaagcttccagtgagggggcacaggactgactttttaaaccattgtggactagtggctgctgtctgcctcagtgacaatgtcccagcgctcctatcatgtttacagtcacccttgggtcctaaattaagagttgtgttcatgtaggttcgtgtcgtcgttggctctgagacattgataataaatttttctcaacagtgaaacc

SEQ ID NO: 337671 - DNA, 498 bp, Homo sapiens
agtagataggccacagatttcgcacttttatagccctgctttattttgttactgtcatcctgctgacacactttcgggtctgttagatgcacccacccaattccttttctgttttccagctatgtctccaatgggtctgtctactttgatacagcgaagtttgcttctagcgagaagcactcctatgggaagctggtgcctgaggccgttggagatcagaaagcccttcaagaaggggaaggtgaggagggcatgcctgagagcatgtgggctctccctcctggcccagcctgggttgtgttgactttgcaggccacgggggctgcgctgagcccacccctcagactcttgggaacagtgctttttcacctgaaggaattttaggagttttctgcactcaacattgtgcagctctaagaccatgacatgtgtttttttaatggatatataataattatgcaatttatggggaacatgtgatgtcttaatacatgcaaa

SEQ ID NO: 337672 - DNA, 410 bp, Homo sapiens
ccaccatctatcttgtacccggtggcccaaaaacagtttgcccagctgcctacctgatagctccactgggccaggaagcctctgatatctaggctgtccaaagtaaatgtgattttcaactccccaaacttgttcctccttcctgccatggagggcgtgcctacctgatagctccactgggctgggaagcatctgaaacctaggctgtccaaaggaaaggtgaaaatgtgattttcaactccccaaacttgctccttttccgtcagtggagggcatgtctgtttgtgcaatggctcaggccagaacctcaaagcaaccgagggcttccctcaccggcacccagcctgctggctccactaataagctctccctgcagcatcagactgtcctcgcccctgcccgggtgctgc

SEQ ID NO: 337673 - DNA, 2553 bp, Homo sapiens
cggcgtggggcgcgacttccggggcggcggttgcatcagattctaggaagtgtctgtagccgcagctgcgggtccgggattcccagccatggcagattcctccgggcagcagggcaaaggccggcgtgtgcagccccagtggtcccctcctgctgggacccagccatgcagactccacctttacaacagcctcaccaggaacaaggaagtgttcatacctcaagatgggaaaaaggtgacgtggtattgctgtgggccaaccgtctatgacgcatctcacatggggcacgccaggtcctacatctcttttgatatcttgagaagagtgttgaaggattacttcaaatttgatgtcttttattgcatgaacattacggatattgatgacaagatcatcaagagggcccggcagaaccacctgttcgagcagtatcgggagaagaggcctgaagcggcacagctcttggaggatgttcaggccgccctgaagccattttcagtaaaattaaatgagaccacggatcccgataaaaagcagatgctcgaacggattcagcacgcagtgcagcttgccacagagccacttgagaaagctgtgcagtccagactcacgggagaggaagtcaacagctgtgtggaggtgttgctggaagaagccaaggatttgctctctgactggctggattctacacttggctgtgatgtcactgacaattccatcttctccaagctgcccaagttctgggagggggacttccacagagacatggaagctctgaatgttctccctccagatgtcttaacccgggttagtgagtatgtgccagaaattgtgaactttgtccagaagattgtggacaacggttacggctatgtctccaatgggtctgtctactttgatacagcgaagtttgcttctagcgagaagcactcctatgggaagctggtgcctgaggccgttggagatcagaaagcccttcaagaaggggaaggtgacctgagcatctctgcagaccgcctgagtgagaagcgctctcccaacgactttgccttatggaaggcctctaagcccggagaaccgtcctggccgtgcccttggggaaagggtcgtccgggctggcatatcgagtgctcggccatggcaggcaccctcctaggggcttcgatggacattcacggaggtgggttcgacctccggttcccccaccatgacaatgagctggcacagtcggaggcctactttgaaaacgactgctgggtcaggtacttcctgcacacaggccacctgaccattgcaggctgcaaaatgtcaaagtcactaaaaaacttcatcaccattaaagatgccttgaaaaagcactcagggcgttggctgtcttgtgtccccccacagcacggcagttgcggctggccttcctcatgcactcgtggaaggacaccctggactactccagcaacaccatggagtcagcgcttcaatatgagaagttcttgaatgagtttttcttaaatgtgaaagatatccttcgcgctcctgttgacatcactggtcagtttgagaagtggggagaagaagaagcagaactgaataagaacttttatgacaagaagacagcaattcacaaagccctctgtgacaatgttgacacccgcaccgtcatggaagagatgcgggccttggtcagtcagtgcaacctctatatggcagcccggaaagccgtgaggaagaggcccaaccaggctctgctggagaacatcgccctgtacctcacccatatgctgaagatctttggggccgtagaagaggacagctccctgggattcccggtcggagggcctggaaccagcctcagtctcgaggccacagtcatgccctaccttcaggtgttatcagaattccgagaaggagtgcggaagattgcccgagagcaaaaagtccctgagattctgcagctcagcgatgccctgcgggacaacatcctgcccgagcttggggtgcggtttgaagaccacgaaggactgcccacagtggtgaaactggtagacagaaacaccttattaaaagagagagaagaaaagagacgggttgaagaggagaagaggaagaagaaagaggaggcggcccggaggaaacaggaacaagaagcagcaaagctggccaagatgaagattccccccagtgagatgttcttgtcagaaaccgacaaatactccaagtttgatgaaaatggtctgcccacacatgacatggagggcaaagagctcagcaaagggcaagccaagaagctgaagaagctcttcgaggctcaggagaagctctacaaggaatatctgcagatggcccagaatggaagcttccagtgagggggcacaggactgactttttaaaccattgtggactagtggctgctgtctgcctcagtgacaatgtcccagcgctcctatcatgtttacagtcacccttgggtcctaaattaagagttgtgttcatgtaggttcgtgtcgtcgttggctctgagacattgataataaatttttctcaacagtgaaacc

SEQ ID NO: 337674 - DNA, 2773 bp, Homo sapiens
cggcgtggggcgcgacttccggggcggcggttgcatcagattctaggaagtgtctgtagccgcagctgcgggtccgggattcccagccatggcagattcctccgggcagcaggctcctgactacaggtccattctgagcattagtgacgaggcagccagggcacaagccctgaacgagcacctcagcacgcgtagctatgtccaggggtactcactgtcccaggcagacgtggacgcgttcaggcagctctcggccccgcccgctgacccccagctcttccacgtggctcggtggttcaggcacatagaagcgctcctgggtagcccctgtggcaaaggccagccctgcaggctccaagcaagcaaaggccggcgtgtgcagccccagtggtcccctcctgctgggacccagccatgcagactccacctttacaacagcctcaccaggaacaaggaagtgttcatacctcaagatgggaaaaaggtgacgtggtattgctgtgggccaaccgtctatgacgcatctcacatggggcacgccaggtcctacatctcttttgatatcttgagaagagtgttgaaggattacttcaaatttgatgtcttttattgcatgaacattacggatattgatgacaagatcatcaagagggcccggcagaaccacctgttcgagcagtatcgggagaagaggcctgaagcggcacagctcttggaggatgttcaggccgccctgaagccattttcagtaaaattaaatgagaccacggatcccgataaaaagcagatgctcgaacggattcagcacgcagtgcagcttgccacagagccacttgagaaagctgtgcagtccagactcacgggagaggaagtcaacagctgtgtggaggtgttgctggaagaagccaaggatttgctctctgactggctggattctacacttggctgtgatgtcactgacaattccatcttctccaagctgcccaagttctgggagggggacttccacagagacatggaagctctgaatgttctccctccagatgtcttaacccgggttagtgagtatgtgccagaaattgtgaactttgtccagaagattgtggacaacggttacggctatgtctccaatgggtctgtctactttgatacagcgaagtttgcttctagcgagaagcactcctatgggaagctggtgcctgaggccgttggagatcagaaagcccttcaagaaggggaaggtgacctgagcatctctgcagaccgcctgagtgagaagcgctctcccaacgactttgccttatggaaggcctctaagcccggagaaccgtcctggccgtgcccttggggaaagggtcgtccgggctggcatatcgagtgctcggccatggcaggcaccctcctaggggcttcgatggacattcacggaggtgggttcgacctccggttcccccaccatgacaatgagctggcacagtcggaggcctactttgaaaacgactgctgggtcaggtacttcctgcacacaggccacctgaccattgcaggctgcaaaatgtcaaagtcactaaaaaacttcatcaccattaaagatgccttgaaaaagcactcagcacggcagttgcggctggccttcctcatgcactcgtggaaggacaccctggactactccagcaacaccatggagtcagcgcttcaatatgagaagttcttgaatgagtttttcttaaatgtgaaagatatccttcgcgctcctgttgacatcactggtcagtttgagaagtggggagaagaagaagcagaactgaataagaacttttatgacaagaagacagcaattcacaaagccctctgtgacaatgttgacacccgcaccgtcatggaagagatgcgggccttggtcagtcagtgcaacctctatatggcagcccggaaagccgtgaggaagaggcccaaccaggctctgctggagaacatcgccctgtacctcacccatatgctgaagatctttggggccgtagaagaggacagctccctgggattcccggtcggagggcctggaaccagcctcagtctcgaggccacagtcatgccctaccttcaggtgttatcagaattccgagaaggagtgcggaagattgcccgagagcaaaaagtccctgagattctgcagctcagcgatgccctgcgggacaacatcctgcccgagcttggggtgcggtttgaagaccacgaaggactgcccacagtggtgaaactggtagacagaaacaccttattaaaagagagagaagaaaagagacgggttgaagaggagaagaggaagaagaaagaggaggcggcccggaggaaacaggaacaagaagcagcaaagctggccaagatgaagattccccccagtgagatgttcttgtcagaaaccgacaaatactccaagtttgatgaaaatggtctgcccacacatgacatggagggcaaagagctcagcaaagggcaagccaagaagctgaagaagctcttcgaggctcaggagaagctctacaaggaatatctgcagatggcccagaatggaagcttccagtgagggggcacaggactgactttttaaaccattgtggactagtggctgctgtctgcctcagtgacaatgtcccagcgctcctatcatgtttacagtcacccttgggtcctaaattaagagttgtgttcatgtaggttcgtgtcgtcgttggctctgagacattgataataaatttttctcaacagtgaaacc

SEQ ID NO: 337675 - DNA, 2541 bp, Homo sapiens
  misc_feature (9)..(10): n is a, c, g, or t
gtgaaactnngtagacagaaacaccttattaaaagagagagaagaaaagagacaagtctccaggtgaagaggcgacttgcacttcctggtgctgcccctggaccctgatcctgctctctctgcctcccaggcaaaggccggcgtgtgcagccccagtggtcccctcctgctgggacccagccatgcagactccacctttacaacagcctcaccaggaacaaggaagtgttcatacctcaagatgggaaaaaggtgacgtggtattgctgtgggccaaccgtctatgacgcatctcacatggggcacgccaggtcctacatctcttttgatatcttgagaagagtgttgaaggattacttcaaatttgatgtcttttattgcatgaacattacggatattgatgacaagatcatcaagagggcccggcagaaccacctgttcgagcagtatcgggagaagaggcctgaagcggcacagctcttggaggatgttcaggccgccctgaagccattttcagtaaaattaaatgagaccacggatcccgataaaaagcagatgctcgaacggattcagcacgcagtgcagcttgccacagagccacttgagaaagctgtgcagtccagactcacgggagaggaagtcaacagctgtgtggaggtgttgctggaagaagccaaggatttgctctctgactggctggattctacacttggctgtgatgtcactgacaattccatcttctccaagctgcccaagttctgggagggggacttccacagagacatggaagctctgaatgttctccctccagatgtcttaacccgggttagtgagtatgtgccagaaattgtgaactttgtccagaagattgtggacaacggttacggctatgtctccaatgggtctgtctactttgatacagcgaagtttgcttctagcgagaagcactcctatgggaagctggtgcctgaggccgttggagatcagaaagcccttcaagaaggggaaggtgacctgagcatctctgcagaccgcctgagtgagaagcgctctcccaacgactttgccttatggaaggcctctaagcccggagaaccgtcctggccgtgcccttggggaaagggtcgtccgggctggcatatcgagtgctcggccatggcaggcaccctcctaggggcttcgatggacattcacggaggtgggttcgacctccggttcccccaccatgacaatgagctggcacagtcggaggcctactttgaaaacgactgctgggtcaggtacttcctgcacacaggccacctgaccattgcaggctgcaaaatgtcaaagtcactaaaaaacttcatcaccattaaagatgccttgaaaaagcactcagcacggcagttgcggctggccttcctcatgcactcgtggaaggacaccctggactactccagcaacaccatggagtcagcgcttcaatatgagaagttcttgaatgagtttttcttaaatgtgaaagatatccttcgcgctcctgttgacatcactggtcagtttgagaagtggggagaagaagaagcagaactgaataagaacttttatgacaagaagacagcaattcacaaagccctctgtgacaatgttgacacccgcaccgtcatggaagagatgcgggccttggtcagtcagtgcaacctctatatggcagcccggaaagccgtgaggaagaggcccaaccaggctctgctggagaacatcgccctgtacctcacccatatgctgaagatctttggggccgtagaagaggacagctccctgggattcccggtcggagggcctggaaccagcctcagtctcgaggccacagtcatgccctaccttcaggtgttatcagaattccgagaaggagtgcggaagattgcccgagagcaaaaagtccctgagattctgcagctcagcgatgccctgcgggacaacatcctgcccgagcttggggtgcggtttgaagaccacgaaggactgcccacagtggtgaaactggtagacagaaacaccttattaaaagagagagaagaaaagagacgggttgaagaggagaagaggaagaagaaagaggaggcggcccggaggaaacaggaacaagaagcagcaaagctggccaagatgaagattccccccagtgagatgttcttgtcagaaaccgacaaatactccaagtttgatgaaaatggtctgcccacacatgacatggagggcaaagagctcagcaaagggcaagccaagaagctgaagaagctcttcgaggctcaggagaagctctacaaggaatatctgcagatggcccagaatggaagcttccagtgagggggcacaggactgactttttaaaccattgtggactagtggctgctgtctgcctcagtgacaatgtcccagcgctcctatcatgtttacagtcacccttgggtcctaaattaagagttgtgttcatgtaggttcgtgtcgtcgttggctctgagacattgataataaatttttctcaacagtgaaacc

SEQ ID NO: 337676 - DNA, 2820 bp, Homo sapiens
cggcgtggggcgcgacttccggggcggcggttgcatcagattctaggaagtgtctgtagccgcagctgcgggtccgggattcccagccatggcagattcctccgggcagcaggctcctgactacaggtccattctgagcattagtgacgaggcagccagggcacaagccctgaacgagcacctcagcacgcgtagctatgtccaggggtactcactgtcccaggcagacgtggacgcgttcaggcagctctcggccccgcccgctgacccccagctcttccacgtggctcggtggttcaggcacatagaagcgctcctgggtagcccctgtggcaaaggccagccctgcaggctccaagcaagcaaaggccggcgtgtgcagccccagtggtcccctcctgctgggacccagccatgcagactccacctttacaacagcctcaccaggaacaagtgtttcttgcatttcttgtgatcgtcattccttcattcctaacaaaggaagtgttcatacctcaagatgggaaaaaggtgacgtggtattgctgtgggccaaccgtctatgacgcatctcacatggggcacgccaggtcctacatctcttttgatatcttgagaagagtgttgaaggattacttcaaatttgatgtcttttattgcatgaacattacggatattgatgacaagatcatcaagagggcccggcagaaccacctgttcgagcagtatcgggagaagaggcctgaagcggcacagctcttggaggatgttcaggccgccctgaagccattttcagtaaaattaaatgagaccacggatcccgataaaaagcagatgctcgaacggattcagcacgcagtgcagcttgccacagagccacttgagaaagctgtgcagtccagactcacgggagaggaagtcaacagctgtgtggaggtgttgctggaagaagccaaggatttgctctctgactggctggattctacacttggctgtgatgtcactgacaattccatcttctccaagctgcccaagttctgggagggggacttccacagagacatggaagctctgaatgttctccctccagatgtcttaacccgggttagtgagtatgtgccagaaattgtgaactttgtccagaagattgtggacaacggttacggctatgtctccaatgggtctgtctactttgatacagcgaagtttgcttctagcgagaagcactcctatgggaagctggtgcctgaggccgttggagatcagaaagcccttcaagaaggggaaggtgacctgagcatctctgcagaccgcctgagtgagaagcgctctcccaacgactttgccttatggaaggcctctaagcccggagaaccgtcctggccgtgcccttggggaaagggtcgtccgggctggcatatcgagtgctcggccatggcaggcaccctcctaggggcttcgatggacattcacggaggtgggttcgacctccggttcccccaccatgacaatgagctggcacagtcggaggcctactttgaaaacgactgctgggtcaggtacttcctgcacacaggccacctgaccattgcaggctgcaaaatgtcaaagtcactaaaaaacttcatcaccattaaagatgccttgaaaaagcactcagcacggcagttgcggctggccttcctcatgcactcgtggaaggacaccctggactactccagcaacaccatggagtcagcgcttcaatatgagaagttcttgaatgagtttttcttaaatgtgaaagatatccttcgcgctcctgttgacatcactggtcagtttgagaagtggggagaagaagaagcagaactgaataagaacttttatgacaagaagacagcaattcacaaagccctctgtgacaatgttgacacccgcaccgtcatggaagagatgcgggccttggtcagtcagtgcaacctctatatggcagcccggaaagccgtgaggaagaggcccaaccaggctctgctggagaacatcgccctgtacctcacccatatgctgaagatctttggggccgtagaagaggacagctccctgggattcccggtcggagggcctggaaccagcctcagtctcgaggccacagtcatgccctaccttcaggtgttatcagaattccgagaaggagtgcggaagattgcccgagagcaaaaagtccctgagattctgcagctcagcgatgccctgcgggacaacatcctgcccgagcttggggtgcggtttgaagaccacgaaggactgcccacagtggtgaaactggtagacagaaacaccttattaaaagagagagaagaaaagagacgggttgaagaggagaagaggaagaagaaagaggaggcggcccggaggaaacaggaacaagaagcagcaaagctggccaagatgaagattccccccagtgagatgttcttgtcagaaaccgacaaatactccaagtttgatgaaaatggtctgcccacacatgacatggagggcaaagagctcagcaaagggcaagccaagaagctgaagaagctcttcgaggctcaggagaagctctacaaggaatatctgcagatggcccagaatggaagcttccagtgagggggcacaggactgactttttaaaccattgtggactagtggctgctgtctgcctcagtgacaatgtcccagcgctcctatcatgtttacagtcacccttgggtcctaaattaagagttgtgttcatgtaggttcgtgtcgtcgttggctctgagacattgataataaatttttctcaacagtgaaacc

SEQ ID NO: 337677 - DNA, 2387 bp, Homo sapiens
ttgagtagactgaggaggagaagggggggtcttgctgtttcagggatggcagagaaaatcatatataaatgcactcatgcagttcaaacacgtgttgttggaggttaagctatacatatcgtctggtgtggaaatgtttgttttttcattgctttaggtcctacatctcttttgatatcttgagaagagtgttgaaggattacttcaaatttgatgtcttttattgcatgaacattacggatattgatgacaagatcatcaagagggcccggcagaaccacctgttcgagcagtatcgggagaagaggcctgaagcggcacagctcttggaggatgttcaggccgccctgaagccattttcagtaaaattaaatgagaccacggatcccgataaaaagcagatgctcgaacggattcagcacgcagtgcagcttgccacagagccacttgagaaagctgtgcagtccagactcacgggagaggaagtcaacagctgtgtggaggtgttgctggaagaagccaaggatttgctctctgactggctggattctacacttggctgtgatgtcactgacaattccatcttctccaagctgcccaagttctgggagggggacttccacagagacatggaagctctgaatgttctccctccagatgtcttaacccgggttagtgagtatgtgccagaaattgtgaactttgtccagaagattgtggacaacggttacggctatgtctccaatgggtctgtctactttgatacagcgaagtttgcttctagcgagaagcactcctatgggaagctggtgcctgaggccgttggagatcagaaagcccttcaagaaggggaaggtgacctgagcatctctgcagaccgcctgagtgagaagcgctctcccaacgactttgccttatggaaggcctctaagcccggagaaccgtcctggccgtgcccttggggaaagggtcgtccgggctggcatatcgagtgctcggccatggcaggcaccctcctaggggcttcgatggacattcacggaggtgggttcgacctccggttcccccaccatgacaatgagctggcacagtcggaggcctactttgaaaacgactgctgggtcaggtacttcctgcacacaggccacctgaccattgcaggctgcaaaatgtcaaagtcactaaaaaacttcatcaccattaaagatgccttgaaaaagcactcagcacggcagttgcggctggccttcctcatgcactcgtggaaggacaccctggactactccagcaacaccatggagtcagcgcttcaatatgagaagttcttgaatgagtttttcttaaatgtgaaagatatccttcgcgctcctgttgacatcactggtcagtttgagaagtggggagaagaagaagcagaactgaataagaacttttatgacaagaagacagcaattcacaaagccctctgtgacaatgttgacacccgcaccgtcatggaagagatgcgggccttggtcagtcagtgcaacctctatatggcagcccggaaagccgtgaggaagaggcccaaccaggctctgctggagaacatcgccctgtacctcacccatatgctgaagatctttggggccgtagaagaggacagctccctgggattcccggtcggagggcctggaaccagcctcagtctcgaggccacagtcatgccctaccttcaggtgttatcagaattccgagaaggagtgcggaagattgcccgagagcaaaaagtccctgagattctgcagctcagcgatgccctgcgggacaacatcctgcccgagcttggggtgcggtttgaagaccacgaaggactgcccacagtggtgaaactggtagacagaaacaccttattaaaagagagagaagaaaagagacgggttgaagaggagaagaggaagaagaaagaggaggcggcccggaggaaacaggaacaagaagcagcaaagctggccaagatgaagattccccccagtgagatgttcttgtcagaaaccgacaaatactccaagtttgatgaaaatggtctgcccacacatgacatggagggcaaagagctcagcaaagggcaagccaagaagctgaagaagctcttcgaggctcaggagaagctctacaaggaatatctgcagatggcccagaatggaagcttccagtgagggggcacaggactgactttttaaaccattgtggactagtggctgctgtctgcctcagtgacaatgtcccagcgctcctatcatgtttacagtcacccttgggtcctaaattaagagttgtgttcatgtaggttcgtgtcgtcgttggctctgagacattgataataaatttttctcaacagtgaaacc

SEQ ID NO: 337678 - DNA, 1974 bp, Homo sapiens
cggcgtggggcgcgacttccggggcggcggttgcatcagattctaggaagtgtctgtagccgcagctgcgggtccgggattcccagccatggcagattcctccgggcagcagggcaaaggccggcgtgtgcagccccagtggtcccctcctgctgggacccagccatgcagactccacctttacaacagcctcaccaggaacaaggaagtgttcatacctcaagatgggaaaaaggtgacgtggtattgctgtgggccaaccgtctatgacgcatctcacatggggcacgccaggtcctacatctcttttgatatcttgagaagagtgttgaaggattacttcaaatttgatgtcttttattgcatgaacattacggatattgatgacaagatcatcaagagggcccggcagaaccacctgttcgagcagtatcgggagaagaggcctgaagcggcacagctcttggaggatgttcaggccgccctgaagccattttcagtaaaattaaatgagaccacggatcccgataaaaagcagatgctcgaacggattcagcacgcagtgcagcttgccacagagccacttgagaaagctgtgcagtccagactcacgggagaggaagtcaacagctgtgtggaggtgttgctggaagaagccaaggatttgctctctgactggctggattctacacttggctgtgatgtcactgacaattccatcttctccaagctgcccaagttctgggagggggacttccacagagacatggaagctctgaatgttctccctccagatgtcttaacccgggttagtgagtatgtgccagaaattgtgaactttgtccagaagattgtggacaacggttacggctatgtctccaatgggtctgtctactttgatacagcgaagtttgcttctagcgagaagcactcctatgggaagctggtgcctgaggccgttggagatcagaaagcccttcaagaaggggaaggtgacctgagcatctctgcagaccgcctgagtgagaagcgctctcccaacgactttgccttatggaaggcctctaagcccggagaaccgtcctggccgtgcccttggggaaagggtcgtccgggctggcatatcgagtgctcggccatggcaggcaccctcctaggggcttcgatggacattcacggaggtgggttcgacctccggttcccccaccatgacaatgagctggcacagtcggaggcctactttgaaaacgactgctgggtcaggtacttcctgcacacaggccacctgaccattgcaggctgcaaaatgtcaaagtcactaaaaaacttcatcaccattaaagatgccttgaaaaagcactcagcacggcagttgcggctggccttcctcatgcactcgtggaaggacaccctggactactccagcaacaccatggagtcagcgcttcaatatgagaagttcttgaatgagtttttcttaaatgtgaaagatatccttcgcgctcctgttgacatcactggtcagtttgagaagtggggagaagaagaagcagaactgaataagaagcagcaaagctggccaagatgaagattccccccagtgagatgttcttgtcagaaaccgacaaatactccaagtttgatgaaaatggtctgcccacacatgacatggagggcaaagagctcagcaaagggcaagccaagaagctgaagaagctcttcgaggctcaggagaagctctacaaggaatatctgcagatggcccagaatggaagcttccagtgagggggcacaggactgactttttaaaccattgtggactagtggctgctgtctgcctcagtgacaatgtcccagcgctcctatcatgtttacagtcacccttgggtcctaaattaagagttgtgttcatgtaggttcgtgtcgtcgttggctctgagacattgataataaatttttctcaacagtgaaacc

SEQ ID NO: 337679 - DNA, 2487 bp, Homo sapiens
cggcgtggggcgcgacttccggggcggcggttgcatcagattctaggaagtgtctgtagccgcagctgcgggtccgggattcccagccatggcagattcctccgggcagcagggcaaaggccggcgtgtgcagccccagtggtcccctcctgctgggacccagccatgcagactccacctttacaacagcctcaccaggaacaaggaagtgttcatacctcaagatgggaaaaaggtgacgtggtattgctgtgggccaaccgtctatgacgcatctcacatggggcacgccaggtcctacatctcttttgatatcttgagaagagtgttgaaggattacttcaaatttgatgtcttttattgcatgaacattacggatattgatgacaagatcatcaagagggcccggcagaaccacctgttcgagcagtatcgggagaagaggcctgaagcggcacagctcttggaggatgttcaggccgccctgaagccattttcagtaaaattaaatgagaccacggatcccgataaaaagcagatgctcgaacggattcagcacgcagtgcagcttgccacagagccacttgagaaagctgtgcagtccagactcacgggagaggaagtcaacagctgtgtggaggtgttgctggaagaagccaaggatttgctctctgactggctggattctacacttggctgtgatgtcactgacaattccatcttctccaagctgcccaagttctgggagggggacttccacagagacatggaagctctgaatgttctccctccagatgtcttaacccgggttagtgagtatgtgccagaaattgtgaactttgtccagaagattgtggacaacggttacggctatgtctccaatgggtctgtctactttgatacagcgaagtttgcttctagcgagaagcactcctatgggaagctggtgcctgaggccgttggagatcagaaagcccttcaagaaggggaaggtgacctgagcatctctgcagaccgcctgagtgagaagcgctctcccaacgactttgccttatggaaggcctctaagcccggagaaccgtcctggccgtgcccttggggaaagggtcgtccgggctggcatatcgagtgctcggccatggcaggcaccctcctaggggcttcgatggacattcacggaggtgggttcgacctccggttcccccaccatgacaatgagctggcacagtcggaggcctactttgaaaacgactgctgggtcaggtacttcctgcacacaggccacctgaccattgcaggctgcaaaatgtcaaagtcactaaaaaacttcatcaccattaaagatgccttgaaaaagcactcagcacggcagttgcggctggccttcctcatgcactcgtggaaggacaccctggactactccagcaacaccatggagtcagcgcttcaatatgagaagttcttgaatgagtttttcttaaatgtgaaagatatccttcgcgctcctgttgacatcactggtcagtttgagaagtggggagaagaagaagcagaactgaataagaacttttatgacaagaagacagcaattcacaaagccctctgtgacaatgttgacacccgcaccgtcatggaagagatgcgggccttggtcagtcagtgcaacctctatatggcagcccggaaagccgtgaggaagaggcccaaccaggctctgctggagaacatcgccctgtacctcacccatatgctgaagatctttggggccgtagaagaggacagctccctgggattcccggtcggagggcctggaaccagcctcagtctcgaggccacagtcatgccctaccttcaggtgttatcagaattccgagaaggagtgcggaagattgcccgagagcaaaaagtccctgagattctgcagctcagcgatgccctgcgggacaacatcctgcccgagcttggggtgcggtttgaagaccacgaaggactgcccacagtggtgaaactggtagacagaaacaccttattaaaagagagagaagaaaagagacgggttgaagaggagaagaggaagaagaaagaggaggcggcccggaggaaacaggaacaagaagcagcaaagctggccaagatgaagattccccccagtgagatgttcttgtcagaaaccgacaaatactccaagtttgatgaaaatggtctgcccacacatgacatggagggcaaagagctcagcaaagggcaagccaagaagctgaagaagctcttcgaggctcaggagaagctctacaaggaatatctgcagatggcccagaatggaagcttccagtgagggggcacaggactgactttttaaaccattgtggactagtggctgctgtctgcctcagtgacaatgtcctaaattaagagttgtgttcatgtaggttcgtgtcgtcgttggctctgagacattgataataaatttttctcaacagtgaaacc

SEQ ID NO: 337680 - DNA, 3155 bp, Homo sapiens
cggcgtggggcgcgacttccggggcggcggttgcatcagattctaggaagtgtctgtagccgcagctgcgggtccgggattcccagccatggcagattcctccgggcagcagggcaaaggccggcgtgtgcagccccagtggtcccctcctgctgggacccagccatgcagactccacctttacaacagcctcaccaggaacaaggaagtgttcatacctcaagatgggaaaaaggtgacgtggtattgctgtgggccaaccgtctatgacgcatctcacatggggcacgccaggtcctacatctcttttgatatcttgagaagagtgttgaaggattacttcaaatttgatgtcttttattgcatgaacattacggatattgatgacaagatcatcaagagggcccggcagaaccacctgttcgagcagtatcgggagaagaggcctgaagcggcacagctcttggaggatgttcaggccgccctgaagccattttcagtaaaattaaatgagaccacggatcccgataaaaagcagatgctcgaacggattcagcacgcagtgcagcttgccacagagccacttgagaaagctgtgcagtccagactcacgggagaggaagtcaacagctgtgtggaggtgttgctggaagaagccaaggatttgctctctgactggctggattctacacttggctgtgatgtcactgacaattccatcttctccaagctgcccaagttctgggagggggacttccacagagacatggaagctctgaatgttctccctccagatgtcttaacccgggttagtgagtatgtgccagaaattgtgaactttgtccagaagattgtggacaacggttacggctatgtctccaatgggtctgtctactttgatacagcgaagtttgcttctagcgagaagcactcctatgggaagctggtgcctgaggccgttggagatcagaaagcccttcaagaaggggaaggtgacctgagcatctctgcagaccgcctgagtgagaagcgctctcccaacgactttgccttatggaaggcctctaagcccggagaaccgtcctggccgtgcccttggggaaagggtcgtccgggctggcatatcgagtgctcggccatggcaggcaccctcctaggggcttcgatggacattcacggaggtgggttcgacctccggttcccccaccatgacaatgagctggcacagtcggaggcctactttgaaaacgactgctgggtcaggtacttcctgcacacaggccacctgaccattgcaggctgcaaaatgtcaaagtcactaaaaaacttcatcaccattaaagatgccttgaaaaagcactcagcacggcagttgcggctggccttcctcatgcactcgtggaaggacaccctggactactccagcaacaccatggagtcagcgcttcaatatgagaagttcttgaatgagtttttcttaaatgtgaaagatatccttcgcgctcctgttgacatcactggtcagtttgagaagtggggagaagaagaagcagaactgaataagaacttttatgacaagaagacagcaattcacaaagccctctgtgacaatgttgacacccgcaccgtcatggaagagatgcgggccttggtcagtcagtgcaacctctatatggcagcccggaaagccgtgaggaagaggcccaaccaggctctgctggagaacatcgccctgtacctcacccatatgctgaagatctttggggccgtagaagaggacagctccctgggattcccggtcggagggcctggaaccagcctcagtctcgaggccacagtcatgccctaccttcaggtgttatcagaattccgagaaggagtgcggaagattgcccgagagcaaaaagtccctgagattctgcagctcagcgatgccctgcgggacaacatcctgcccgagcttggggtgcggtttgaagaccacgaaggactgcccacagtggtgaaactggtagacagaaacaccttattaaaagagagagaagaaaagagacgggttgaagaggagaagaggaagaagaaagaggaggcggcccggaggaaacaggaacaagaagtaatgcattttgtttgggggtgagggctctactgggcaggagtgcaccctgaccccatgccctgtggctctctgtgcctccgtggaccttagccaggcccctgcagaccctcacagaaggagctccgctttctgcctccaccacccaaggcctgccaggcccttctcacatggggtgcagggaaggcctggccaaggggaaggctgtgccatgtggtcacaagctccaagacagcgtttatagacttactactattaggttttctagtaagctttccactattcctgtagaaataacatctggtttaattttaaattccttgtatgttccctccaccttggctttccccttcccatctttcatagcactctgaatctgagggcttggaagcaagttgagggctggaggtatgagcagatgtcgttcacagtgcggagccccaggtgctgctcgggggcagtgactgtgccgtgttgcgtgttctaggcagcaaagctggccaagatgaagattccccccagtgagatgttcttgtcagaaaccgacaaatactccaagtttgatgaaaatgtaagcatgtaagcatccttctcttctattcagaacttgatcagaccacattaaagtgggaggacaggaattttcaaccttggacaagcagattttctgtctgtagaaaatttggaatcaaatctgacacccgctttaggtccagggcctcctggcccaactactgagctccttccacagcccaggcagctaggcaagcccgtgccagggccccctccactggtgtggtgagctctggtccctagccctgggagttgtggccccgggcaaggatccacccaggccctcacaagctggctgaagtgccgtggcgcagataggcctcctacccccagtttcttcctttgtcatagcgattcacagccactgcctccaaacctctaggcccctccctgctggcatttggatgtgtttgctatgtacctttgggccagctgtgtcagaactcagccatgggtaggctctgag

SEQ ID NO: 337681 - DNA, 2260 bp, Homo sapiens
cggcgtggggcgcgacttccggggcggcggttgcatcagattctaggaagtgtctgtagccgcagctgcgggtccgggattcccagccatggcagattcctccgggcagcagggcaaaggccggcgtgtgcagccccagtggtcccctcctgctgggacccagccatgcagactccacctttacaacagcctcaccaggaacaaggaagtgttcatacctcaagatgggaaaaaggtgacgtggtattgctgtgggccaaccgtctatgacgcatctcacatggggcacgccaggtcctacatctcttttgatatcttgagaagagtgttgaaggattacttcaaatttgatgtcttttattgcatgaacattacggatattgatgacaagatcatcaagagggcccggcagaaccacctgttcgagcagtatcgggagaagaggcctgaagcggcacagctcttggaggatgttcaggccgccctgaagccattttcagtaaaattaaatgagaccacggatcccgataaaaagcagatgctcgaacggattcagcacgcagtgcagcttgccacagagccacttgagaaagctgtgcagtccagactcacgggagaggaagtcaacagctgtgtggaggtgttgctggaagaagccaaggatttgctctctgactggctggattctacacttggctgtgatgtcactgacaattccatcttctccaagctgcccaagttctgggagggggacttccacagagacatggaagctctgaatgttctccctccagatgtcttaacccgggttagtgagtatgtgccagaaattgtgaactttgtccagaagattgtggacaacggttacggctatgtctccaatgggtctgtctactttgatacagcgaagtttgcttctagcgagaagcactcctatgggaagctggtgcctgaggccgttggagatcagaaagcccttcaagaaggggaaggtgacctgagcatctctgcagaccgcctgagtgagaagcgctctcccaacgactttgccttatggaaggcctctaagcccggagaaccgtcctggccgtgcccttggggaaagggtcgtccgggctggcatatcgagtgctcggccatggcaggcaccctcctaggggcttcgatggacattcacggaggtgggttcgacctccggttcccccaccatgacaatgagctggcacagtcggaggcctactttgaaaacgactgctgggtcaggtacttcctgcacacaggccacctgaccattgcaggctgcaaaatgtcaaagtcactaaaaaacttcatcaccattaaagatgccttgaaaaagcactcagcacggcagttgcggctggccttcctcatgcactcgtggaaggacaccctggactactccagcaacaccatggagtcagcgcttcaatatgagaagttcttgaatgagtttttcttaaatgtgaaagatatccttcgcgctcctgttgacatcactggtcagtttgagaagtggggagaagaagaagcagaactgaataagaacttttatgacaagaagacagcaattcacaaagccctctgtgacaatgttgacacccgcaccgtcatggaagagatgcgggccttggtcagtcagtgcaacctctatatggcagcccggaaagccgtgaggaagaggcccaaccaggctctgctggagaacatcgccctgtacctcacccatatgctgaagatctttggggccgtagaagaggacagctccctgggattcccggtcggagggcctggaaccagcctcagtctcgaggccacagtcatgccctaccttcaggtgttatcagaattccgagaaggagtgcggaagattgcccgagagcaaaaagtccctgagattctgcagctcagcgatgccctgcgggacaacatcctgcccgagcttggggtgcggtttgaagaccacgaaggactgcccacagtggtgaaactggtagacagaaacaccttattaaaagagagagaagaaaagagacgggttgaagagggaaagtgagagagaggaagagcagaggcttgcccgactaaatcagcaggaacaagaagacttagaactggctattgcactcagcaaatctgagatatcagaagcatgaagaattctcttgttctttggcaacaatatagtattcttcttcctgaatactgaaactatttacaatgtgtatcaaaactacctgtg

SEQ ID NO: 337682 - DNA, 1790 bp, Homo sapiens
cggcgtggggcgcgacttccggggcggcggttgcatcagattctaggaagtgtctgtagccgcagctgcgggtccgggattcccagccatggcagattcctccgggcagcagggcaaaggccggcgtgtgcagccccagtggtcccctcctgctgggacccagccatgcagactccacctttacaacagcctcaccaggaacaaggaagtgttcatacctcaagatgggaaaaaggtgacgtggtattgctgtgggccaaccgtctatgacgcatctcacatggggcacgccaggtcctacatctcttttgatatcttgagaagagtgttgaaggattacttcaaatttgatgtcttttattgcatgaacattacggatattgatgacaagatcatcaagagggcccggcagaaccacctgttcgagcagtatcgggagaagaggcctgaagcggcacagctcttggaggatgttcaggccgccctgaagccattttcagtaaaattaaatgagaccacggatcccgataaaaagcagatgctcgaacggattcagcacgcagtgcagcttgccacagagccacttgagaaagctgtgcagtccagactcacgggagaggaagtcaacagctgtgtggaggtgttgctggaagaagccaaggatttgctctctgactggctggattctacacttggctgtgatgtcactgacaattccatcttctccaagctgcccaagttctgggagggggacttccacagagacatggaagctctgaatgttctccctccagatgtcttaacccgggttagtgagtatgtgccagaaattgtgaactttgtccagaagattgtggacaacggttacggctatgtctccaatgggtctgtctactttgatacagcgaagtttgcttctagcgagaagcactcctatgggaagctggtgcctgaggccgttggagatcagaaagcccttcaagaaggggaaggtgacctgagcatctctgcagaccgcctgagtgagaagcgctctcccaacgactttgccttatggaaggcctctaagcccggagaaccgtcctggccgtgcccttggggaaagggtcgtccgggctggcatatcgagtgctcggccatggcaggcaccctcctaggggcttcgatggacattcacggaggtgggttcgacctccggttcccccaccatgacaatgagctggcacagtcggaggcctactttgaaaacgactgctgggtcaggtacttcctgcacacaggccacctgaccattgcaggctgcaaaatgtcaaagtcactaaaaaacttcatcaccattaaagatgccttgaaaaagcactcagcacggcagttgcggctggccttcctcatgcactcgtggaaggacaccctggactactccagcaacaccatggagtcagcgcttcaatatgagaagttcttgaatgagtttttcttaaatgtgaaagatatccttcgcgctcctgttgacatcactggtcagtttgagaagtggggagaagaagaagcagaactgaataagaacttttatgacaagaagacagcaattcacaaagccctctgtgacaatgttgactttttaaaccattgtggactagtggctgctgtctgcctcagtgacaatgtcccagcgctcctatcatgtttacagtcacccttgggtcctaaattaagagttgtgttcatgtaggttcgtgtcgtcgttggctctgagacattgataataaatttttctcaacagtgaaacc

SEQ ID NO: 337683 - DNA, 1472 bp, Homo sapiens
cggcgtggggcgcgacttccggggcggcggttgcatcagattctaggaagtgtctgtagccgcagctgcgggtccgggattcccagccatggcagattcctccgggcagcagggcaaaggccggcgtgtgcagccccagtggtcccctcctgctgggacccagccatgcagactccacctttacaacagcctcaccaggaacaaggaagtgttcatacctcaagatgggaaaaaggtgacgtggtattgctgtgggccaaccgtctatgacgcatctcacatggggcacgccaggtcctacatctcttttgatatcttgagaagagtgttgaaggattacttcaaatttgatgtcttttattgcatgaacattacggatattgatgacaagatcatcaagagggcccggcagaaccacctgttcgagcagtatcgggagaagaggcctgaagcggcacagctcttggaggatgttcaggccgccctgaagccattttcagtaaaattaaatgagaccacggatcccgataaaaagcagatgctcgaacggattcagcacgcagtgcagcttgccacagagccacttgagaaagctgtgcagtccagactcacgggagaggaagtcaacagctgtgtggaggtgttgctggaagaagccaaggatttgctctctgactggctggattctacacttggctgtgatgtcactgacaattccatcttctccaagctgcccaagttctgggagggggacttccacagagacatggaagctctgaatgttctccctccagatgtcttaacccgggttagtgagtatgtgccagaaattgtgaactttgtccagaagattgtggacaacggttacggctatgtctccaatgggtctgtctactttgatacagcgaagtttgcttctagcgagaagcactcctatgggaagctggtgcctgaggccgttggagatcagaaagcccttcaagaaggggaaggtgacctgagcatctctgcagaccgcctgagtgagaagcgctctcccaacgactttgccttatggaaggcctctaagcccggagaaccgtcctggccgtgcccttggggaaagggtcgtccgggctggcatatcgagtgctcggccatggcaggcaccctcctaggggcttcgatggacattcacggaggtgggttcgacctccggttcccccaccatgacaatgagctggcacagtcggaggcctactttgaaaacgactgctgggtcaggtacttcctgcacacaggccacctgaccattgcaggctgcaaaatgtcaaagtcactaaaaaacttcatcaccattaaagatgccttgaaaaagcactcagcggggagtggggggggcccccagccgggaggcacctgggtctccacgaaccggggcgcgtcaaaagaaggtgaagagtaagagaagaaacaggcccggggaacagggg

SEQ ID NO: 337684 - DNA, 1249 bp, Homo sapiens
cggcgtggggcgcgacttccggggcggcggttgcatcagattctaggaagtgtctgtagccgcagctgcgggtccgggattcccagccatggcagattcctccgggcagcagggcaaaggccggcgtgtgcagccccagtggtcccctcctgctgggacccagccatgcagactccacctttacaacagcctcaccaggaacaaggaagtgttcatacctcaagatgggaaaaaggtgacgtggtattgctgtgggccaaccgtctatgacgcatctcacatggggcacgccaggtcctacatctcttttgatatcttgagaagagtgttgaaggattacttcaaatttgatgtcttttattgcatgaacattacggatattgatgacaagatcatcaagagggcccggcagaaccacctgttcgagcagtatcgggagaagaggcctgaagcggcacagctcttggaggatgttcaggccgccctgaagccattttcagtaaaattaaatgagaccacggatcccgataaaaagcagatgctcgaacggattcagcacgcagtgcagcttgccacagagccacttgagaaagctgtgcagtccagactcacgggagaggaagtcaacagctgtgtggaggtgttgctggaagaagccaaggatttgctctctgactggctggattctacacttggctgtgatgtcactgacaattccatcttctccaagctgcccaagttctgggagggggacttccacagagacatggaagctctgaatgttctccctccagatgtcttaacccgggttagtgagtatgtgccagaaattgtgaactttgtccagaagattgtggacaacggttacggctatgtctccaatgggtctgtctactttgatacagcgaagtttgcttctagcgagaagcactcctatgggaagctggtgcctgaggccgttggagatcagaaagcccttcaagaaggggaaggtgaggagggcatgcctgagagcatgtgggctctccctcctggcccagcctgggttgtgttgactttgcaggccacgggggctgcgctgagcccacccctcagactcttgggaacagtgctttttcacctgaaggaattttaggagttttctgcactcaacattgtgcagctctaagaccatgacatgtgtttttttaatggatatataataattatgcaatttatggggaacatgtgatgtcttaatacatgcaaa

SEQ ID NO: 337685 - DNA, 1122 bp, Homo sapiens
ctgcccggcacatgggcttgtctccccacagtggggagggcctggtcagagttcagccctccatgccaggccctaggagaggggcttgtttggctagacctctcactccgagagacccagcagcctgaggcagccctgtctcatctggctctgtattgaccctccaggttgaagaggagaagaggaagaagaaagaggaggcggcccggaggaaacaggaacaagaagtaatgcattttgtttgggggtgagggctctactgggcaggagtgcaccctgaccccatgccctgtggctctctgtgcctccgtggaccttagccaggcccctgcagaccctcacagaaggagctccgctttctgcctccaccacccaaggcctgccaggcccttctcacatggggtgcagggaaggcctggccaaggggaaggctgtgccatgtggtcacaagctccaagacagcgtttatagacttactactattaggttttctagtaagctttccactattcctgtagaaataacatctggtttaattttaaattccttgtatgttccctccaccttggctttccccttcccatctttcatagcactctgaatctgagggcttggaagcaagttgagggctggaggtatgagcagatgtcgttcacagtgcggagccccaggtgctgctcgggggcagtgactgtgccgtgttgcgtgttctaggcagcaaagctggccaagatgaagattccccccagtgagatgttcttgtcagaaaccgacaaatactccaagtttgatgaaaatggtctgcccacacatgacatggagggcaaagagctcagcaaagggcaagccaagaagctgaagaagctcttcgaggctcaggagaagctctacaaggaatatctgcagatggcccagaatggaagcttccagtgagggggcacaggactgactttttaaaccattgtggactagtggctgctgtctgcctcagtgacaatgtcccagcgctcctatcatgtttacagtcacccttgggtcctaaattaagagttgtgttcatgtaggttcgtgtcgtcgttggctctgagacattgataataaatttttctcaacagtgaaacc

SEQ ID NO: 337686 - DNA, 1077 bp, Homo sapiens
ccaccatctatcttgtacccggtggcccaaaaacagtttgcccagctgcctacctgatagctccactgggccaggaagcctctgatatctaggctgtccaaagtaaatgtgattttcaactccccaaacttgttcctccttcctgccatggagggcgtgcctacctgatagctccactgggctgggaagcatctgaaacctaggctgtccaaaggaaaggtgaaaatgtgattttcaactccccaaacttgctccttttccgtcagtggagggcatgtctgtttgtgcaatggctcaggccagaactccgctttctgcctccaccacccaaggcctgccaggcccttctcacatggggtgcagggaaggcctggccaaggggaaggctgtgccatgtggtcacaagctccaagacagcgtttatagacttactactattaggttttctagtaagctttccactattcctgtagaaataacatctggtttaattttaaattccttgtatgttccctccaccttggctttccccttcccatctttcatagcactctgaatctgagggcttggaagcaagttgagggctggaggtatgagcagatgtcgttcacagtgcggagccccaggtgctgctcgggggcagtgactgtgccgtgttgcgtgttctaggcagcaaagctggccaagatgaagattccccccagtgagatgttcttgtcagaaaccgacaaatactccaagtttgatgaaaatggtctgcccacacatgacatggagggcaaagagctcagcaaagggcaagccaagaagctgaagaagctcttcgaggctcaggagaagctctacaaggaatatctgcagatggcccagaatggaagcttccagtgagggggcacaggactgactttttaaaccattgtggactagtggctgctgtctgcctcagtgacaatgtcccagcgctcctatcatgtttacagtcacccttgggtcctaaattaagagttgtgttcatgtaggttcgtgtcgtcgttggctctgagacattgataataaatttttctcaacagtgaaacc

SEQ ID NO: 337687 - DNA, 905 bp, Homo sapiens
cggcgtggggcgcgacttccggggcggcggttgcatcagattctaggaagtgtctgtagccgcagctgcgggtccgggattcccagccatggcagattcctccgggcagcagggcaaaggccggcgtgtgcagccccagtggtcccctcctgctgggacccagccatgcagactccacctttacaacagcctcaccaggaacaagtgtttcttgcatttcttgtgatcgtcattccttcattcctaacaaaggaagtgttcatacctcaagatgggaaaaaggtgacgtggtattgctgtgggccaaccgtctatgacgcatctcacatggggcacgccaggtcctacatctcttttgatatcttgagaagagtgttgaaggattacttcaaatttgatgtcttttattgcatgaacattacggatattgatgacaagatcatcaagagggcccggcagaaccacctgttcgagcagtatcgggagaagaggcctgaagcggcacagctcttggaggatgttcaggccgccctgaagccattttcagtaaaattaaatgagaccacggatcccgataaaaagcagatgctcgaacggattcagcacgcagtgcagcttgccacagagaagccaagaagctgaagaagctcttcgaggctcaggagaagctctacaaggaatatctgcagatggcccagaatggaagcttccagtgagggggcacaggactgactttttaaaccattgtggactagtggctgctgtctgcctcagtgacaatgtcccagcgctcctatcatgtttacagtcacccttgggtcctaaattaagagttgtgttcatgtaggttcgtgtcgtcgttggctctgagacattgataataaatttttctcaacagtgaaacc

SEQ ID NO: 337688 - DNA, 964 bp, Homo sapiens
cggcgtggggcgcgacttccggggcggcggttgcatcagattctaggaagtgtctgtagccgcagctgcgggtccgggattcccagccatggcagattcctccgggcagcaggctcctgactacaggtccattctgagcattagtgacgaggcagccagggcacaagccctgaacgagcacctcagcacgcgtagctatgtccaggggtactcactgtcccaggcagacgtggacgcgttcaggcagctctcggccccgcccgctgacccccagctcttccacgtggctcggtggttcaggcacatagaagcgctcctgggtagcccctgtggcaaaggccagccctgcaggctccaagcaagcaaaggccggcgtgtgcagccccagtggtcccctcctgctgggacccagccatgcagactccacctttacaacagcctcaccaggaacaagtgtttcttgcatttcttgtgatcgtcattccttcattcctaacaaaggaagtgttcatacctcaagatgggaaaaaggtgacgtggtattgctgtgggccaaccgtctatgacgcatctcacatggggcacgccaggtaggtccaccgcggggtgtccctgcagcttctgcagttgcacgcagaagtcagagccattgggatccacagcagcgatcttaggtccacaaagatcttagatctgctacagagacctgagatttgaggaatcgagactgaatttcttctcttatttttaagatgaaaattttaattccataagtaatctatattcactgcagaaagactacagatcaccaaaaagaaaatgtccatagccccactgctaacatgctggactcgacctgggcactttttctcacataccttaaagttttctctcatccctcaagctctcgtggggtccccagatgctgagttcccatgacactcagacctgacaggcctgacgc

SEQ ID NO: 337689 - DNA, 525 bp, Homo sapiens
gaccacagatcagacgaaagcacggcccgggagccgccagcctcagcataggtaaggccccagcctggggagtgatgtccttgggctccttaggaaatagtccctcccagagctggcccctctgaaaccataaagacaagctgtttcacagcagcgtgtctgacctgaggaaagcagggcctgtcagcagctgggcagagcggcggcagacccacctgctgcagtagaaaggaagctcacttcatgctctctggcctgagagtctgtgtgactcgcacacctagcagggactgtgtgtcagggacgagagcgtccaggctctgggatgccggtcacagctgtagtgtgcacagcagcactgcccatgccagtccctgccctgtgtcgcggccactgagctattattctgttatgaatatgggagtgtgagcagctctcagtgaaccaaaactgttctttccgcagctcgaggccacagtcatgccctaccttcaggtgttatcagaattccgagaaggagtgcgg

SEQ ID NO: 337690 - DNA, 2329 bp, Homo sapiens
tagagtatccccgctgatcgcttagcaagatgggaaaaaggtgacgtggtattgctgtgggccaaccgtctatgacgcatctcacatggggcacgccaggtcctacatctcttttgatatcttgagaagagtgttgaaggattacttcaaatttgatgtcttttattgcatgaacattacggatattgatgacaagatcatcaagagggcccggcagaaccacctgttcgagcagtatcgggagaagaggcctgaagcggcacagctcttggaggatgttcaggccgccctgaagccattttcagtaaaattaaatgagaccacggatcccgataaaaagcagatgctcgaacggattcagcacgcagtgcagcttgccacagagccacttgagaaagctgtgcagtccagactcacgggagaggaagtcaacagctgtgtggaggtgttgctggaagaagccaaggatttgctctctgactggctggattctacacttggctgtgatgtcactgacaattccatcttctccaagctgcccaagttctgggagggggacttccacagagacatggaagctctgaatgttctccctccagatgtcttaacccgggttagtgagtatgtgccagaaattgtgaactttgtccagaagattgtggacaacggttacggctatgtctccaatgggtctgtctactttgatacagcgaagtttgcttctagcgagaagcactcctatgggaagctggtgcctgaggccgttggagatcagaaagcccttcaagaaggggaaggtgacctgagcatctctgcagaccgcctgagtgagaagcgctctcccaacgactttgccttatggaaggcctctaagcccggagaaccgtcctggccgtgcccttggggaaagggtcgtccgggctggcatatcgagtgctcggccatggcaggcaccctcctaggggcttcgatggacattcacggaggtgggttcgacctccggttcccccaccatgacaatgagctggcacagtcggaggcctactttgaaaacgactgctgggtcaggtacttcctgcacacaggccacctgaccattgcaggctgcaaaatgtcaaagtcactaaaaaacttcatcaccattaaagatgccttgaaaaagcactcagcacggcagttgcggctggccttcctcatgcactcgtggaaggacaccctggactactccagcaacaccatggagtcagcgcttcaatatgagaagttcttgaatgagtttttcttaaatgtgaaagatatccttcgcgctcctgttgacatcactggtcagtttgagaagtggggagaagaagaagcagaactgaataagaacttttatgacaagaagacagcaattcacaaagccctctgtgacaatgttgacacccgcaccgtcatggaagagatgcgggccttggtcagtcagtgcaacctctatatggcagcccggaaagccgtgaggaagaggcccaaccaggctctgctggagaacatcgccctgtacctcacccatatgctgaagatctttggggccgtagaagaggacagctccctgggattcccggtcggagggcctggaaccagcctcagtctcgaggccacagtcatgccctaccttcaggtgttatcagaattccgagaaggagtgcggaagattgcccgagagcaaaaagtccctgagattctgcagctcagcgatgccctgcgggacaacatcctgcccgagcttggggtgcggtttgaagaccacgaaggactgcccacagtggtgaaactggtagacagaaacaccttattaaaagagagagaagaaaagagacgggttgaagaggagaagaggaagaagaaagaggaggcggcccggaggaaacaggaacaagaagcagcaaagctggccaagatgaagattccccccagtgagatgttcttgtcagaaaccgacaaatactccaagtttgatgaaaatggtctgcccacacatgacatggagggcaaagagctcagcaaagggcaagccaagaagctgaagaagctcttcgaggctcaggagaagctctacaaggaatatctgcagatggcccagaatggaagcttccagtgagggggcacaggactgactttttaaaccattgtggactagtggctgctgtctgcctcagtgacaatgtcccagcgctcctatcatgtttacagtcacccttgggtcctaaattaagagttgtgttcatgtaggttcgtgtcgtcgttggctctgagacattgataataaatttttctcaacagtgaaacc

SEQ ID NO: 337691 - DNA, 3011 bp, Homo sapiens
cggcgtggggcgcgacttccggggcggcggttgcatcagattctaggaagtgtctgtagccgcagctgcgggtccgggattcccagccatggcagattcctccgggcagcagggcaaaggccggcgtgtgcagccccagtggtcccctcctgctgggacccagccatgcagactccacctttacaacagcctcaccaggaacaaggaagtgttcatacctcaagatgggaaaaaggtgacgtggtattgctgtgggccaaccgtctatgacgcatctcacatggggcacgccaggtcctacatctcttttgatatcttgagaagagtgttgaaggattacttcaaatttgatgtcttttattgcatgaacattacggatattgatgacaagatcatcaagagggcccggcagaaccacctgttcgagcagtatcgggagaagaggcctgaagcggcacagctcttggaggatgttcaggccgccctgaagccattttcagtaaaattaaatgagaccacggatcccgataaaaagcagatgctcgaacggattcagcacgcagtgcagcttgccacagagccacttgagaaagctgtgcagtccagactcacgggagaggaagtcaacagctgtgtggaggtgttgctggaagaagccaaggatttgctctctgactggctggattctacacttggctgtgatgtcactgacaattccatcttctccaagctgcccaagttctgggagggggacttccacagagacatggaagctctgaatgttctccctccagatgtcttaacccgggttagtgagtatgtgccagaaattgtgaactttgtccagaagattgtggacaacggttacggctatgtctccaatgggtctgtctactttgatacagcgaagtttgcttctagcgagaagcactcctatgggaagctggtgcctgaggccgttggagatcagaaagcccttcaagaaggggaaggtgacctgagcatctctgcagaccgcctgagtgagaagcgctctcccaacgactttgccttatggaaggcctctaagcccggagaaccgtcctggccgtgcccttggggaaagggtcgtccgggctggcatatcgagtgctcggccatggcaggcaccctcctaggggcttcgatggacattcacggaggtgggttcgacctccggttcccccaccatgacaatgagctggcacagtcggaggcctactttgaaaacgactgctgggtcaggtacttcctgcacacaggccacctgaccattgcaggctgcaaaatgtcaaagtcactaaaaaacttcatcaccattaaagatgccttgaaaaagcactcagcacggcagttgcggctggccttcctcatgcactcgtggaaggacaccctggactactccagcaacaccatggagtcagcgcttcaatatgagaagttcttgaatgagtttttcttaaatgtgaaagatatccttcgcgctcctgttgacatcactggtcagtttgagaagtggggagaagaagaagcagaactgaataagaacttttatgacaagaagacagcaattcacaaagccctctgtgacaatgttgacacccgcaccgtcatggaagagatgcgggccttggtcagtcagtgcaacctctatatggcagcccggaaagccgtgaggaagaggcccaaccaggctctgctggagaacatcgccctgtacctcacccatatgctgaagatctttggggccgtagaagaggacagctccctgggattcccggtcggagggcctggaaccagcctcagtctcgaggccacagtcatgccctaccttcaggtgttatcagaattccgagaaggagtgcggaagattgcccgagagcaaaaagtccctgagattctgcagctcagcgatgccctgcgggacaacatcctgcccgagcttggggtgcggtttgaagaccacgaaggactgcccacagtggtgaaactggtagacagaaacaccttattaaaagagagagaagaaaagagacgggttgaagaggagaagaggaagaagaaagaggaggcggcccggaggaaacaggaacaagaagtaatgcattttgtttgggggtgagggctctactgggcaggagtgcaccctgaccccatgccctgtggctctctgtgcctccgtggaccttagccaggcccctgcagaccctcacagaaggagctccgctttctgcctccaccacccaaggcctgccaggcccttctcacatggggtgcagggaaggcctggccaaggggaaggctgtgccatgtggtcacaagctccaagacagcgtttatagacttactactattaggttttctagtaagctttccactattcctgtagaaataacatctggtttaattttaaattccttgtatgttccctccaccttggctttccccttcccatctttcatagcactctgaatctgagggcttggaagcaagttgagggctggaggtatgagcagatgtcgttcacagtgcggagccccaggtgctgctcgggggcagtgactgtgccgtgttgcgtgttctaggcagcaaagctggccaagatgaagattccccccagtgagatgttcttgtcagaaaccgacaaatactccaagtttgatgaaaatggtctgcccacacatgacatggagggcaaagagctcagcaaagggcaagccaagaagctgaagaagctcttcgaggctcaggagaagctctacaaggaatatctgcagatggcccagaatggaagcttccagtgagggggcacaggactgactttttaaaccattgtggactagtggctgctgtctgcctcagtgacaatgtcccagcgctcctatcatgtttacagtcacccttgggtcctaaattaagagttgtgttcatgtaggttcgtgtcgtcgttggctctgagacattgataataaatttttctcaacagtgaaacc

SEQ ID NO: 337692 - DNA, 2571 bp, Homo sapiens
cggcgtggggcgcgacttccggggcggcggttgcatcagattctaggaagtgtctgtagccgcagctgcgggtccgggattcccagccatggcagattcctccgggcagcagggcaaaggccggcgtgtgcagccccagtggtcccctcctgctgggacccagccatgcagactccacctttacaacagcctcaccaggaacaagtgtttcttgcatttcttgtgatcgtcattccttcattcctaacaaaggaagtgttcatacctcaagatgggaaaaaggtgacgtggtattgctgtgggccaaccgtctatgacgcatctcacatggggcacgccaggtcctacatctcttttgatatcttgagaagagtgttgaaggattacttcaaatttgatgtcttttattgcatgaacattacggatattgatgacaagatcatcaagagggcccggcagaaccacctgttcgagcagtatcgggagaagaggcctgaagcggcacagctcttggaggatgttcaggccgccctgaagccattttcagtaaaattaaatgagaccacggatcccgataaaaagcagatgctcgaacggattcagcacgcagtgcagcttgccacagagccacttgagaaagctgtgcagtccagactcacgggagaggaagtcaacagctgtgtggaggtgttgctggaagaagccaaggatttgctctctgactggctggattctacacttggctgtgatgtcactgacaattccatcttctccaagctgcccaagttctgggagggggacttccacagagacatggaagctctgaatgttctccctccagatgtcttaacccgggttagtgagtatgtgccagaaattgtgaactttgtccagaagattgtggacaacggttacggctatgtctccaatgggtctgtctactttgatacagcgaagtttgcttctagcgagaagcactcctatgggaagctggtgcctgaggccgttggagatcagaaagcccttcaagaaggggaaggtgacctgagcatctctgcagaccgcctgagtgagaagcgctctcccaacgactttgccttatggaaggcctctaagcccggagaaccgtcctggccgtgcccttggggaaagggtcgtccgggctggcatatcgagtgctcggccatggcaggcaccctcctaggggcttcgatggacattcacggaggtgggttcgacctccggttcccccaccatgacaatgagctggcacagtcggaggcctactttgaaaacgactgctgggtcaggtacttcctgcacacaggccacctgaccattgcaggctgcaaaatgtcaaagtcactaaaaaacttcatcaccattaaagatgccttgaaaaagcactcagcacggcagttgcggctggccttcctcatgcactcgtggaaggacaccctggactactccagcaacaccatggagtcagcgcttcaatatgagaagttcttgaatgagtttttcttaaatgtgaaagatatccttcgcgctcctgttgacatcactggtcagtttgagaagtggggagaagaagaagcagaactgaataagaacttttatgacaagaagacagcaattcacaaagccctctgtgacaatgttgacacccgcaccgtcatggaagagatgcgggccttggtcagtcagtgcaacctctatatggcagcccggaaagccgtgaggaagaggcccaaccaggctctgctggagaacatcgccctgtacctcacccatatgctgaagatctttggggccgtagaagaggacagctccctgggattcccggtcggagggcctggaaccagcctcagtctcgaggccacagtcatgccctaccttcaggtgttatcagaattccgagaaggagtgcggaagattgcccgagagcaaaaagtccctgagattctgcagctcagcgatgccctgcgggacaacatcctgcccgagcttggggtgcggtttgaagaccacgaaggactgcccacagtggtgaaactggtagacagaaacaccttattaaaagagagagaagaaaagagacgggttgaagaggagaagaggaagaagaaagaggaggcggcccggaggaaacaggaacaagaagcagcaaagctggccaagatgaagattccccccagtgagatgttcttgtcagaaaccgacaaatactccaagtttgatgaaaatggtctgcccacacatgacatggagggcaaagagctcagcaaagggcaagccaagaagctgaagaagctcttcgaggctcaggagaagctctacaaggaatatctgcagatggcccagaatggaagcttccagtgagggggcacaggactgactttttaaaccattgtggactagtggctgctgtctgcctcagtgacaatgtcccagcgctcctatcatgtttacagtcacccttgggtcctaaattaagagttgtgttcatgtaggttcgtgtcgtcgttggctctgagacattgataataaatttttctcaacagtgaaacc

SEQ ID NO: 337693 - DNA, 2645 bp, Homo sapiens
cggcgtggggcgcgacttccggggcggcggttgcatcagattctaggaagtgtctgtagccgcagctgcgggtccgggattcccagccatggcagattcctccgggcagcagggcaaaggccggcgtgtgcagccccagtggtcccctcctgctgggacccagccatgcagactccacctttacaacagcctcaccaggaacaaggaagtgttcatacctcaagatgggaaaaaggtgacgtggtattgctgtgggccaaccgtctatgacgcatctcacatggggcacgccaggtcctacatctcttttgatatcttgagaagagtgttgaaggattacttcaaatttgatgtcttttattgcatgaacattacggatattgatgacaagatcatcaagagggcccggcagaaccacctgttcgagcagtatcgggagaagaggcctgaagcggcacagctcttggaggatgttcaggccgccctgaagccattttcagtaaaattaaatgagaccacggatcccgataaaaagcagatgctcgaacggattcagcacgcagtgcagcttgccacagagccacttgagaaagctgtgcagtccagactcacgggagaggaagtcaacagctgtgtggaggtgttgctggaagaagccaaggatttgctctctgactggctggattctacacttggctgtgatgtcactgacaattccatcttctccaagctgcccaagttctgggagggggacttccacagagacatggaagctctgaatgttctccctccagatgtcttaacccgggttagtgagtatgtgccagaaattgtgaactttgtccagaagattgtggacaacggttacggctatgtctccaatgggtctgtctactttgatacagcgaagtttgcttctagcgagaagcactcctatgggaagctggtgcctgaggccgttggagatcagaaagcccttcaagaaggggaaggtgacctgagcatctctgcagaccgcctgagtgagaagcgctctcccaacgactttgccttatggaaggcctctaagcccggagaaccgtcctggccgtgcccttggggaaagggtcgtccgggctggcatatcgagtgctcggccatggcaggcaccctcctaggggcttcgatggacattcacggaggtgggttcgacctccggttcccccaccatgacaatgagctggcacagtcggaggcctactttgaaaacgactgctgggtcaggtacttcctgcacacaggccacctgaccattgcaggctgcaaaatgtcaaagtcactaaaaaacttcatcaccattaaagatgccttgaaaaagcactcagcacggcagttgcggctggccttcctcatgcactcgtggaaggacaccctggactactccagcaacaccatggagtcagcgcttcaatatgagaagttcttgaatgagtttttcttaaatgtgaaagatatccttcgcgctcctgttgacatcactggtcagtttgagaagtggggagaagaagaagcagaactgaataagaacttttatgacaagaagacagcaattcacaaagccctctgtgacaatgttgacacccgcaccgtcatggaagagatgcgggccttggtcagtcagtgcaacctctatatggcagcccggaaagccgtgaggaagaggcccaaccaggctctgctggagaacatcgccctgtacctcacccatatgctgaagatctttggggccgtagaagaggacagctccctgggattcccggtcggagggcctggaaccagcctcagtctcgaggccacagtcatgccctaccttcaggtgttatcagaattccgagaaggagtgcggaagattgcccgagagcaaaaagtccctgagattctgcagctcagcgatgccctgcgggacaacatcctgcccgagcttggggtgcggtttgaagaccacgaaggactgcccacagtggtgaaactggtagacagaaacaccttattaaaagagagagaagaaaagagacgggttgaagaggagaagaggaagaagaaagaggaggcggcccggaggaaacaggaacaagaacactctgaatctgagggcttggaagcaagttgagggctggaggtatgagcagatgtcgttcacagtgcggagccccaggtgctgctcgggggcagtgactgtgccgtgttgcgtgttctaggcagcaaagctggccaagatgaagattccccccagtgagatgttcttgtcagaaaccgacaaatactccaagtttgatgaaaatggtctgcccacacatgacatggagggcaaagagctcagcaaagggcaagccaagaagctgaagaagctcttcgaggctcaggagaagctctacaaggaatatctgcagatggcccagaatggaagcttccagtgagggggcacaggactgactttttaaaccattgtggactagtggctgctgtctgcctcagtgacaatgtcccagcgctcctatcatgtttacagtcacccttgggtcctaaattaagagttgtgttcatgtaggttcgtgtcgtcgttggctctgagacattgataataaatttttctcaacagtgaaacc

SEQ ID NO: 337694 - DNA, 2214 bp, Homo sapiens
ccgcgggttaatcggcacaggaaggattacttcaaatttgatgtcttttattgcatgaacattacggatattgatgacaagatcatcaagagggcccggcagaaccacctgttcgagcagtatcgggagaagaggcctgaagcggcacagctcttggaggatgttcaggccgccctgaagccattttcagtaaaattaaatgagaccacggatcccgataaaaagcagatgctcgaacggattcagcacgcagtgcagcttgccacagagccacttgagaaagctgtgcagtccagactcacgggagaggaagtcaacagctgtgtggaggtgttgctggaagaagccaaggatttgctctctgactggctggattctacacttggctgtgatgtcactgacaattccatcttctccaagctgcccaagttctgggagggggacttccacagagacatggaagctctgaatgttctccctccagatgtcttaacccgggttagtgagtatgtgccagaaattgtgaactttgtccagaagattgtggacaacggttacggctatgtctccaatgggtctgtctactttgatacagcgaagtttgcttctagcgagaagcactcctatgggaagctggtgcctgaggccgttggagatcagaaagcccttcaagaaggggaaggtgacctgagcatctctgcagaccgcctgagtgagaagcgctctcccaacgactttgccttatggaaggcctctaagcccggagaaccgtcctggccgtgcccttggggaaagggtcgtccgggctggcatatcgagtgctcggccatggcaggcaccctcctaggggcttcgatggacattcacggaggtgggttcgacctccggttcccccaccatgacaatgagctggcacagtcggaggcctactttgaaaacgactgctgggtcaggtacttcctgcacacaggccacctgaccattgcaggctgcaaaatgtcaaagtcactaaaaaacttcatcaccattaaagatgccttgaaaaagcactcagcacggcagttgcggctggccttcctcatgcactcgtggaaggacaccctggactactccagcaacaccatggagtcagcgcttcaatatgagaagttcttgaatgagtttttcttaaatgtgaaagatatccttcgcgctcctgttgacatcactggtcagtttgagaagtggggagaagaagaagcagaactgaataagaacttttatgacaagaagacagcaattcacaaagccctctgtgacaatgttgacacccgcaccgtcatggaagagatgcgggccttggtcagtcagtgcaacctctatatggcagcccggaaagccgtgaggaagaggcccaaccaggctctgctggagaacatcgccctgtacctcacccatatgctgaagatctttggggccgtagaagaggacagctccctgggattcccggtcggagggcctggaaccagcctcagtctcgaggccacagtcatgccctaccttcaggtgttatcagaattccgagaaggagtgcggaagattgcccgagagcaaaaagtccctgagattctgcagctcagcgatgccctgcgggacaacatcctgcccgagcttggggtgcggtttgaagaccacgaaggactgcccacagtggtgaaactggtagacagaaacaccttattaaaagagagagaagaaaagagacgggttgaagaggagaagaggaagaagaaagaggaggcggcccggaggaaacaggaacaagaagcagcaaagctggccaagatgaagattccccccagtgagatgttcttgtcagaaaccgacaaatactccaagtttgatgaaaatggtctgcccacacatgacatggagggcaaagagctcagcaaagggcaagccaagaagctgaagaagctcttcgaggctcaggagaagctctacaaggaatatctgcagatggcccagaatggaagcttccagtgagggggcacaggactgactttttaaaccattgtggactagtggctgctgtctgcctcagtgacaatgtcccagcgctcctatcatgtttacagtcacccttgggtcctaaattaagagttgtgttcatgtaggttcgtgtcgtcgttggctctgagacattgataataaatttttctcaacagtgaaacc

SEQ ID NO: 337695 - DNA, 1712 bp, Homo sapiens
gcatcaccatccaggagatggtctggtgatccttgtagacagaaaggccatattctgtctcaaggggattgttctcctcatccttggtaggatagacagagctggagggaaaggagcactcctatgggaagctggtgcctgaggccgttggagatcagaaagcccttcaagaaggggaaggtgacctgagcatctctgcagaccgcctgagtgagaagcgctctcccaacgactttgccttatggaaggcctctaagcccggagaaccgtcctggccgtgcccttggggaaagggtcgtccgggctggcatatcgagtgctcggccatggcaggcaccctcctaggggcttcgatggacattcacggaggtgggttcgacctccggttcccccaccatgacaatgagctggcacagtcggaggcctactttgaaaacgactgctgggtcaggtacttcctgcacacaggccacctgaccattgcaggctgcaaaatgtcaaagtcactaaaaaacttcatcaccattaaagatgccttgaaaaagcactcagcacggcagttgcggctggccttcctcatgcactcgtggaaggacaccctggactactccagcaacaccatggagtcagcgcttcaatatgagaagttcttgaatgagtttttcttaaatgtgaaagatatccttcgcgctcctgttgacatcactggtcagtttgagaagtggggagaagaagaagcagaactgaataagaacttttatgacaagaagacagcaattcacaaagccctctgtgacaatgttgacacccgcaccgtcatggaagagatgcgggccttggtcagtcagtgcaacctctatatggcagcccggaaagccgtgaggaagaggcccaaccaggctctgctggagaacatcgccctgtacctcacccatatgctgaagatctttggggccgtagaagaggacagctccctgggattcccggtcggagggcctggaaccagcctcagtctcgaggccacagtcatgccctaccttcaggtgttatcagaattccgagaaggagtgcggaagattgcccgagagcaaaaagtccctgagattctgcagctcagcgatgccctgcgggacaacatcctgcccgagcttggggtgcggtttgaagaccacgaaggactgcccacagtggtgaaactggtagacagaaacaccttattaaaagagagagaagaaaagagacgggttgaagaggagaagaggaagaagaaagaggaggcggcccggaggaaacaggaacaagaagcagcaaagctggccaagatgaagattccccccagtgagatgttcttgtcagaaaccgacaaatactccaagtttgatgaaaatggtctgcccacacatgacatggagggcaaagagctcagcaaagggcaagccaagaagctgaagaagctcttcgaggctcaggagaagctctacaaggaatatctgcagatggcccagaatggaagcttccagtgagggggcacaggactgactttttaaaccattgtggactagtggctgctgtctgcctcagtgacaatgtcccagcgctcctatcatgtttacagtcacccttgggtcctaaattaagagttgtgttcatgtaggttcgtgtcgtcgttggctctgagacattgataataaatttttctcaacagtgaaacc

SEQ ID NO: 337696 - DNA, 1282 bp, Homo sapiens
ccaggccggtgccctgcggggacgcccagcgcagcccagccccgctcagcccagccctgccctgccctgccctgccctgccctgcgcccggggcgcgcccaccgcgccgcatccatgttcgacacggcagttgcggctggccttcctcatgcactcgtggaaggacaccctggactactccagcaacaccatggagtcagcgcttcaatatgagaagttcttgaatgagtttttcttaaatgtgaaagatatccttcgcgctcctgttgacatcactggtcagtttgagaagtggggagaagaagaagcagaactgaataagaacttttatgacaagaagacagcaattcacaaagccctctgtgacaatgttgacacccgcaccgtcatggaagagatgcgggccttggtcagtcagtgcaacctctatatggcagcccggaaagccgtgaggaagaggcccaaccaggctctgctggagaacatcgccctgtacctcacccatatgctgaagatctttggggccgtagaagaggacagctccctgggattcccggtcggagggcctggaaccagcctcagtctcgaggccacagtcatgccctaccttcaggtgttatcagaattccgagaaggagtgcggaagattgcccgagagcaaaaagtccctgagattctgcagctcagcgatgccctgcgggacaacatcctgcccgagcttggggtgcggtttgaagaccacgaaggactgcccacagtggtgaaactggtagacagaaacaccttattaaaagagagagaagaaaagagacgggttgaagaggagaagaggaagaagaaagaggaggcggcccggaggaaacaggaacaagaagcagcaaagctggccaagatgaagattccccccagtgagatgttcttgtcagaaaccgacaaatactccaagtttgatgaaaatggtctgcccacacatgacatggagggcaaagagctcagcaaagggcaagccaagaagctgaagaagctcttcgaggctcaggagaagctctacaaggaatatctgcagatggcccagaatggaagcttccagtgagggggcacaggactgactttttaaaccattgtggactagtggctgctgtctgcctcagtgacaatgtcccagcgctcctatcatgtttacagtcacccttgggtcctaaattaagagttgtgttcatgtaggttcgtgtcgtcgttggctctgagacattgataataaatttttctcaacagtgaaacc

SEQ ID NO: 337697 - DNA, 2550 bp, Homo sapiens
cggcgtggggcgcgacttccggggcggcggttgcatcagattctaggaagtgtctgtagccgcagctgcgggtccgggattcccagccatggcagattcctccgggcagcagggcaaaggccggcgtgtgcagccccagtggtcccctcctgctgggacccagccatgcagactccacctttacaacagcctcaccaggaacaaggaagtgttcatacctcaagatgggaaaaaggtgacgtggtattgctgtgggccaaccgtctatgacgcatctcacatggggcacgccaggtcctacatctcttttgatatcttgagaagagtgttgaaggattacttcaaatttgatgtcttttattgcatgaacattacggatattgatgacaagatcatcaagagggcccggcagaaccacctgttcgagcagtatcgggagaagaggcctgaagcggcacagctcttggaggatgttcaggccgccctgaagccattttcagtaaaattaaatgagaccacggatcccgataaaaagcagatgctcgaacggattcagcacgcagtgcagcttgccacagagccacttgagaaagctgtgcagtccagactcacgggagaggaagtcaacagctgtgtggaggtgttgctggaagaagccaaggatttgctctctgactggctggattctacacttggctgtgatgtcactgacaattccatcttctccaagctgcccaagttctgggagggggacttccacagagacatggaagctctgaatgttctccctccagatgtcttaacccgggttagtgagtatgtgccagaaattgtgaactttgtccagaagattgtggacaacggttacggctatgtctccaatgggtctgtctactttgatacagcgaagtttgcttctagcgagaagcactcctatgggaagctggtgcctgaggccgttggagatcagaaagcccttcaagaaggggaaggtgacctgagcatctctgcagaccgcctgagtgagaagcgctctcccaacgactttgccttatggaaggcctctaagcccggagaaccgtcctggccgtgcccttggggaaagggtcgtccgggctggcatatcgagtgctcggccatggcaggcaccctcctaggggcttcgatggacattcacggaggtgggttcgacctccggttcccccaccatgacaatgagctggcacagtcggaggcctactttgaaaacgactgctgggtcaggtacttcctgcacacaggccacctgaccattgcaggctgcaaaatgtcaaagtcactaaaaaacttcatcaccattaaagatgccttgaaaaagcactcagcacggcagttgcggctggccttcctcatgcactcgtggaaggacaccctggactactccagcaacaccatggagtcagcgcttcaatatgagaagttcttgaatgagtttttcttaaatgtgaaagatatccttcgcgctcctgttgacatcactggtcagtttgagaagtggggagaagaagaagcagaactgaataagaacttttatgacaagaagacagcaattcacaaagccctctgtgacaatgttgacacccgcaccgtcatggaagagatgcgggccttggtcagtcagtgcaacctctatatggcagcccggaaagccgtgaggaagaggcccaaccaggctctgctggagaacatcgccctgtacctcacccatatgctgaagatctttggggccgtagaagaggacagctccctgggattcccggtcggagggcctggaaccagcctcagtctcgaggccacagtcatgccctaccttcaggtgttatcagaattccgagaaggagtgcggaagattgcccgagagcaaaaagtccctgagattctgcagctcagcgatgccctgcgggacaacatcctgcccgagcttggggtgcggtttgaagaccacgaaggactgcccacagtggtgaaactggtagacagaaacaccttattaaaagagagagaagaaaagagacgggctgatgggagcaagatgcgccagtcttcgtcccatcagggaagtgggcaccccgaggattagggtgagtccgaagtttgggagatttttaagataatatctgagaataggagtgggttcggtggagcaaaaggttcttttctattttcccacgtgttcagtgtaaagccagatgaggagacagattgagtttctggattactatagccataaggactttaaaaattgtttaagtcaatccccctaccttacatcagttttgtagatggggaaaccgaggcccggagtaacaggcaggattagccaatgccagatttttgacagtctaaacagttttctactacctcaccctccctggatatttcagtctcccattattaagaattccctttaggaggtcggtgcggcatggacattaggtagctaaacgtagatgtaggctcacagcgttttccgttagtgctacagctctgtccgggtaggtggagcttcgt

SEQ ID NO: 337698 - DNA, 2105 bp, Homo sapiens
cggcgtggggcgcgacttccggggcggcggttgcatcagattctaggaagtgtctgtagccgcagctgcgggtccgggattcccagccatggcagattcctccgggcagcagggcaaaggccggcgtgtgcagccccagtggtcccctcctgctgggacccagccatgcagactccacctttacaacagcctcaccaggaacaaggaagtgttcatacctcaagatgggaaaaaggtgacgtggtattgctgtgggccaaccgtctatgacgcatctcacatggggcacgccaggtcctacatctcttttgatatcttgagaagagtgttgaaggattacttcaaatttgatgtcttttattgcatgaacattacggatattgatgacaagatcatcaagagggcccggcagaaccacctgttcgagcagtatcgggagaagaggcctgaagcggcacagctcttggaggatgttcaggccgccctgaagccattttcagtaaaattaaatgagaccacggatcccgataaaaagcagatgctcgaacggattcagcacgcagtgcagcttgccacagagccacttgagaaagctgtgcagtccagactcacgggagaggaagtcaacagctgtgtggaggtgttgctggaagaagccaaggatttgctctctgactggctggattctacacttggctgtgatgtcactgacaattccatcttctccaagctgcccaagttctgggagggggacttccacagagacatggaagctctgaatgttctccctccagatgtcttaacccgggttagtgagtatgtgccagaaattgtgaactttgtccagaagattgtggacaacggttacggctatgtctccaatgggtctgtctactttgatacagcgaagtttgcttctagcgagaagcactcctatgggaagctggtgcctgaggccgttggagatcagaaagcccttcaagaaggggaaggtgacctgagcatctctgcagaccgcctgagtgagaagcgctctcccaacgactttgccttatggaaggcctctaagcccggagaaccgtcctggccgtgcccttggggaaagggtcgtccgggctggcatatcgagtgctcggccatggcaggcaccctcctaggggcttcgatggacattcacggaggtgggttcgacctccggttcccccaccatgacaatgagctggcacagtcggaggcctactttgaaaacgactgctgggtcaggtacttcctgcacacaggccacctgaccattgcaggctgcaaaatgtcaaagtcactaaaaaacttcatcaccattaaagatgccttgaaaaagcactcagcacggcagttgcggctggccttcctcatgcactcgtggaaggacaccctggactactccagcaacaccatggagtcagcgcttcaatatgagaagttcttgaatgagtttttcttaaatgtgaaagatatccttcgcgctcctgttgacatcactggtcagtttgagaagtggggagaagaagaagcagaactgaataagaacttttatgacaagaagacagcaattcacaaagccctctgtgacaatgttgacacccgcaccgtcatggaagagatgcgggccttggtcagtcagtgcaacctctatatggcagcccggaaagccgtgaggaagaggcccaaccaggctctgctggagaacatcgccctgtacctcacccatatgctgaagatctttggggccgtagaagaggacagctccctgggattcccggtcggagggcctggaaccagcctcagtctcgaggccacagtcatgccctaccttcaggtgttatcagaattccgagaaggagtgcggaagattgcccgagagcaaaaagtccctgagattctgcagctcagcgatgccctgcgggacaacatcctgcccgagcttggggtgcggtttgaagaccacgaaggactgcccacagtggtgaaatggaggaggaagggtgacatggagaagaggggcagacagagcggctggccgatgcctgcacaccccactgggtgccctctgcagtgatgcccacatg

SEQ ID NO: 337699 - DNA, 805 bp, Homo sapiens
tacccctagcacttcctgtactcctttatatgctgagatctttggggccgtagaagaggacagctccctgggattcccggtcggagggcctggaaccagcctcagtctcgaggccacagtcatgccctaccttcaggtgttatcagaattccgagaaggagtgcggaagattgcccgagagcaaaaagtccctgagattctgcagctcagcgatgccctgcgggacaacatcctgcccgagcttggggtgcggtttgaagaccacgaaggactgcccacagtggtgaaactggtagacagaaacaccttattaaaagagagagaagaaaagagacgggttgaagaggagaagaggaagaagaaagaggaggcggcccggaggaaacaggaacaagaagcagcaaagctggccaagatgaagattccccccagtgagatgttcttgtcagaaaccgacaaatactccaagtttgatgaaaatggtctgcccacacatgacatggagggcaaagagctcagcaaagggcaagccaagaagctgaagaagctcttcgaggctcaggagaagctctacaaggaatatctgcagatggcccagaatggaagcttccagtgagggggcacaggactgactttttaaaccattgtggactagtggctgctgtctgcctcagtgacaatgtcccagcgctcctatcatgtttacagtcacccttgggtcctaaattaagagttgtgttcatgtaggttcgtgtcgtcgttggctctgagacattgataataaatttttctcaacagtgaaacc

SEQ ID NO: 337700 - DNA, 918 bp, Homo sapiens
cggcgtggggcgcgacttccggggcggcggttgcatcagattctaggaagtgtctgtagccgcagctgcgggtccgggattcccagccatggcagattcctccgggcagcagggcaaaggccggcgtgtgcagccccagtggtcccctcctgctgggacccagccatgcagactccacctttacaacagcctcaccaggaacaaggaagtgttcatacctcaagatgggaaaaaggtgacgtggtattgctgtgggccaaccgtctatgacgcatctcacatggggcacgccaggtcctacatctcttttgatatcttgagaagagtgttgaaggattacttcaaatttgatgtcttttattgcatgaacattacggatattgatgacaagatcatcaagagggcccggcagaaccacctgttcgagcagtatcgggagaagaggcctgaagcggcacagctcttggaggatgttcaggccgccctgaagccattttcagtaaaattaaatgagaccacggatcccgataaaaagcagatgctcgaacggattcagcacgcagtgcagcttgccacagagccacttgagaaagctgtgcagtccagactcacgggagaggaagtcaacagctgtgtggagaagccaagaagctgaagaagctcttcgaggctcaggagaagctctacaaggaatatctgcagatggcccagaatggaagcttccagtgagggggcacaggactgactttttaaaccattgtggactagtggctgctgtctgcctcagtgacaatgtcccagcgctcctatcatgtttacagtcacccttgggtcctaaattaagagttgtgttcatgtaggttcgtgtcgtcgttggctctgagacattgataataaatttttctcaacagtgaaacc

SEQ ID NO: 337701 - DNA, 721 bp, Homo sapiens
cggcgtggggcgcgacttccggggcggcggttgcatcagattctaggaagtgtctgtagccgcagctgcgggtccgggattcccagccatggcagattcctccgggcagcagggcaaaggccggcgtgtgcagccccagtggtcccctcctgctgggacccagccatgcagactccacctttacaacagcctcaccaggaacaaggaagtgttcatacctcaagatgggaaaaaggtgacgtggtattgctgtgggccaaccgtctatgacgcatctcacatggggcacgccaggtcctacatctcttttgatatcttgagaagagtgttgaaggattacttcaaatttgatgtcttttattgcatgaacattacggatattgatgacaagatcatcaagagggcccggcagaaccacctgttcgagcagtatcgggagaagaggcctgaagcggcacagctcttggaggatgctcaggagaagctctacaaggaatatctgcagatggcccagaatggaagcttccagtgagggggcacaggactgactttttaaaccattgtggactagtggctgctgtctgcctcagtgacaatgtcccagcgctcctatcatgtttacagtcacccttgggtcctaaattaagagttgtgttcatgtaggttcgtgtcgtcgttggctctgagacattgataataaatttttctcaacagtgaaacc

SEQ ID NO: 337702 - DNA, 320 bp, Homo sapiens
ttctggggcaaaggcaaattctaagaattcattcctggtaggtctttgtgttaaaatactctttaaaaagtggaaggccgggagcgatggaggccgaggcgggtggatggcaaggtcaggaggtcgagaccatcctggctaacacggcgaaacccagtctctactaaaaattcaaaaattagccaggtgtggtggcaggcgcctgtagtcccagctgctcgggaagctgaggcaggagaatggcgtgaacctgggaggcagagcttgcagtgagccaagattgtgccactgcactccagcctgggcgatagagccagact

SEQ ID NO: 337703 - DNA, 370 bp, Homo sapiens
agcaacaacaaagaaggaactactgatacatgtatcaatacggattaatctcaaaaatatcatgctaagggaaaactagacacaaagtatcggtatgcttctatttatttgaaattccagacaggcaaagctaacctaaagtaaaaaaaaaaaaaaaattgaacattggttgtgtcttcaagggatggggaaaggactgacaaggaaggagcatgtaactttttgaggtcatggttgttcgtgttcaataccttcataaggatttgggcaataaatagatgcatttggcaaaacttaaatggtatacttaagatttgtgcatttcaccgtatgtaaagtttactttaaaaactgtaaacagcctggaatt

SEQ ID NO: 337704 - DNA, 176 bp, Homo sapiens
tggttttccccactcacatgctcccagagcatttcatccatccatcaagctcagcaatgtcaaatcatgtatctctcaaaagtctagctgcctcttgaatggagggaatcctggagtaaaacgacagcttttccctctagttgtcttcttgatgcctagcaagatacctagtacag

SEQ ID NO: 337705 - DNA, 128 bp, Homo sapiens
tggatgaagttagtcaggaatggcaagcatagagagaggaggaagaaagaaaaggaagcccacagtgttcgctttggagacaccctttcttccccctgggaagggaactgggacacgaccctgggcag

SEQ ID NO: 337706 - DNA, 547 bp, Homo sapiens
tcattatttactcctcaggctctcacaaaagtcaccgcgtttgtgtaggtaactaaggcctaccgaaaccagtcagccctaagtgcacacaggagaaccatggagttggaggaaaaggatgatctgcaagtatcctgcaaatatctcacccagttattgctgggattccccaggaacattacatgggaacatatcgccatataggctcaatgggtgcagcaagaaataaaagatgagaattattaggatatgtgggatgctctggaagcattctagctgacgtaatagacatttgcggaaaagtcttggggatcctgaattcattaaacagcttcttcttttgccctggttcctcatgttttctagcagcaaaattactctgtccccttggtgccttggaatgctcccagcctaagctcagcccacatccagacaggccaatgctttggtagcaagctgaccacacaaactcttgtaaaccgtgataaagttcctagatattttggctattttagctttttattattgaagaaatacattaattttc

SEQ ID NO: 337707 - DNA, 358 bp, Homo sapiens
tcattatttactcctcaggctctcacaaaagtcaccgcgtttgtgtaggtaactaaggcctaccgaaaccagtcagccctaagtgcacacaggagaaccatggagttggaggaaaagagtatacaggaagcatggtgccagcatgtgccactgttgagggcctcaggaaacttacaatcatggtggaaggtgaaggggaagcaggtgtgtcacactgtgagtgtgacagcaagaaagagaggaaggaggtgccactcacttttaaacaaccagatctcgcatgaactcaggacttaggtatgtctttatcagcagacattagtccatataaaaacagactaatacagtaaattggtac

SEQ ID NO: 337708 - DNA, 369 bp, Homo sapiens
ggggaaatattttttattctgcatatcatagaatagtatgcattgatcataaaattttctgcagtagacttgagttaacttttcacctataaaattacaaccctcactcgtttccaacattagcatgaagaaaatggttactcccaggtttccacatcttactggagaaaaccgcaattaatgtcaccacaaatatccagtttccaacgttagctcagctgccattctgtgtgttcctgttcctcaatcatactcaattcacctgtggttcccgtcctgcctctcaccacagggtcggctgggcccaggatgacaaggggcctccctgcctcttccactgtcaccatcctctgcctcagggctgccatc

SEQ ID NO: 337709 - DNA, 271 bp, Homo sapiens
ctgtagtcccagctacttggtaggctgaggagagaggattgtttgagtccaggaattggaggctgcaataagctatgattgtgccatggtgctctagcctgggcaacagaacaagatgctgtctcttgaaaaaaaaaaaaaagaaaaagaaaagatgaatagtctgtctgaaatggccggcagtcgcagctgctgacctgacctgcatctactgtataagtcaagtagttcaactttttattataatgtcatggcttttctttgcttcttg

SEQ ID NO: 337710 - DNA, 90 bp, Homo sapiens
gggcatggaatccacacctagatactggatcttggtttgaatcctggttttgctattctactttctctgtgtctttaagcaagccactta

SEQ ID NO: 337711 - DNA, 304 bp, Homo sapiens
gcccagctaatttttgtatttttttgtagcgatggggtttcatcatgttgctcaggttgaatcacctaactttttatagacaggctccagaacttctccaggttctggaacctacatttgatttgagggtgagtggcctttgactcttgggagaaagttaatgatgcagaaatgcacttgggagaattgaaaacagaccggaggaacgtgtgtgtggaggctgcgcgtaccctgctatgatgggtgggacgtgctggagggcagcgtgggcggcgggagcacgggtggagggagcagctgctca

SEQ ID NO: 337712 - DNA, 130 bp, Homo sapiens
ctcccctccccacaacaaaatctgtacagccccagaccttttaaaattttgtttctgactcatgttgtgcgtaactttgttcaagagaaagctctagattttttttccctccatttcccaccagggccca

SEQ ID NO: 337713 - DNA, 379 bp, Homo sapiens
gccctccctagcagtggggtcttggagagagaagaaaggtggtttccccaggttaagagagacggcgtcaccctgggccactccagcctcatgctccctgcctggggaccaggtggtggctacaggtgtgcctcggtttcctcccctgggaagtagagcggccacgaggaccaagggtgatgtccgcggagcgtcccagcagagctgggatgctggaagcacctaggggcccactcacctcccgccagaaggcgcctctggtagagggcacttacctcactaggatggagccccagagagcccccgccccgctggaacctccacacctttctgagaggtaggcagggggcaggctgagggtggctcggcacccccccac

SEQ ID NO: 337714 - DNA, 121 bp, Homo sapiens
cacttgtatacactccctagctcctcatgcccacagggtaccaggtgacatttttgaaatgccaatcttacggtatcacctgaacagctctccatcacctaacagataaaaatcaaattct

SEQ ID NO: 337715 - DNA, 875 bp, Homo sapiens
aacccatacacttgattttttaaaaaatactgtcgtgtttttatgagtgtaggataaatccaactgctagtctatctaaaatggactatggtgatctgtggatagggtatagccacgtttctctccgctctctcaggtctttcctctacctctgtctccacctatttgtttcttttgctcattcacttactctaaatacgtcccttccattttctctctttctcaatgttaccttatattctaatgctctcactggtaaatgattaagaaacaaaagattaatcttaaatgattaagaaacaagagagaaccccaccttctggatttgcatcagggcattttgtcatgtagagcacaggcaagtatgcctttaggtcagtgactagtctgtgagcagcatgcggatgtggcttttggtcctgggtggcgttacatcagagcagctttaaactctctttgtcacgagcacatcagcagtacctgcaccccaggaccattcaaagtggccctgcgacttccagctgcaaggatctgtgtcagagagcacttttacttgagaactacacagagcctcactgcctccagcaggctagaagagccaggaaatgaatgcctcaagagctggcctcaactaatgactcctccagggttgggacaccaacacctcagctctctcaccctggggtcagataattcttcctttccttgagtcacttccctacctccctactggtgtttcctgcatctcccaaatgagctgcttgtactcaattccttgttctctaagaattcaggctagacactaatgatttagaaatgctaactgagaaattaaactgtaagtgatattttacagggggatgggcgcagtatgg

SEQ ID NO: 337716 - DNA, 341 bp, Homo sapiens
  misc_feature (311)..(311): n is a, c, g, or t
ctggtgagtgggcttagtaggtggttctcactctgatcttttccttgctcttgcagttcattacggggcaagaatcatctcaacacatccggcagttggtgctggctattggttgggacctcagatggggctgttagctagaacacacctacatgtagtagccttttatgactttgctccagaagtcacatagatagatagcatctgttctattctagtcacaggcctgtacagattcaagggaagagtgtcaacatcacactgtaagaagaatgtggtgtagaatgtcttgttggcagctgccgtcgacncggccgcgaatttagtagtagtagtcgacc

SEQ ID NO: 337717 - DNA, 496 bp, Homo sapiens
agtggtggagcgggtgagctgttgaggacatcttttgaaagtagagccaaaaggacttgctgattgaagagatgtgttgtatgagagaaggagaggcatctggaggctgaagtgattggaatcaagaatagcctcttaatttctgtctgaataacttatcaaagagtagtttcattaactgagttgaagatgagcagttaagggggaagcgacaccatgggctccattttgtacacttattgatctgcttctccatacaaggcactgtgttacacagaagtcataggtatctgttttaaagaacattaagcttttgtcaattgctaagtagaatcaatggtttcactgctgtctggatactactggactaaagtcaaaccaaaacaaaagcaaaaacaaaacagtccatgacagacagatattattagttgtcttcccaatacccagcctcctttcctccttattaaaaatctcttaccaggtgtggtggctcaca

SEQ ID NO: 337718 - DNA, 622 bp, Homo sapiens
acaaaaaaagttactcagcagcactaacaccacattaagactaggactttgcttcctaatgctaaggaggaggaccagtcaagaagaatcttggttaattagatcaatctaattctggcctgataccatgaaatacatacatgctctacggctgtggctcctacagtttgagacttgagagaatacattgcttatagttcaatgagagactgaaaaatgtgagtacccttactttaccacttaggaagttatctggatggtctcatgctagatttacaatcctataccctcaaatgcttgggaggttagattacatgggattaaactcagagggatgctggaagcacaccaaaatcttcactctccttcctgcccaatttggtccactataaataaaacttgacaggctttcttagttcaacttaataatgtgtagcacgagtgccttcagatgcccagtagctaaaccacacatcagctttcttaggaagccttctagcaacaggcagaaaaaagaacaactactgccaagagtgctgtgcacaagagtgctggtggcctcgagtgactcattcaacaaggctccatctttctgtactggaaggtcaaaagtgggagggag

SEQ ID NO: 337719 - DNA, 295 bp, Homo sapiens
tattactgtgaagagtaagatataacttgattcctattcttaaatatattttactcttaaaagaatatgaccatgtgattcaaaaaaaggttaagcctttgttttatgccagcctgtgctataggctctttcacctatgtctccctctctgccagtgaagaatctatatccccaaatctgatttttatacctctatgactttaatgttaccttcttcttatgaattttagcagatgcagtggttacgagaaaaactctggagttaacttcctgggctggaaacccaactcgatca

SEQ ID NO: 337720 - DNA, 632 bp, Homo sapiens
cccccgtggtgctgcaatgtgacgggcaccatgatgaactcttggttttaaaattcaactcctagctctgtctgctgaaagggcctagaaaggacaacacccagcagcagaggtgtattcttggtgcccaggtcgtggtttctacgtgctgttccccatcagccggaagcagggctcctcggagaaatggctgattccagaagtggggcaggaagtgaacacatgagccacagacagtgtgcagtgcccgagagtggcacagacatgaacgaatggcaagaggacccagaagccagcctggagggagtctttctggccatatctgggccaagtgaacatcaaaataaatgataacagtcatgaactctaacccctagaagccacactgacatgaaataaagagaaggccgagtggcaaatgctgaagaaatgatgagttgagaagcctccattttacaatcatcacagccaacactaatgcaggcaagaattccccaaagatgccaagtccactgggtctgcccccgaagatgccaagtccactgggtctgcccccgaagatgccaagaccactgagtctgcctgtggactgacaagatagtctcaaagcacctccccacaggtgagtcatt

SEQ ID NO: 337721 - DNA, 243 bp, Homo sapiens
atgttacactccatactgaacggagctctaacaagatgactcgctccacttcccagctccataccgtccactcgcattttccaagtgaagaatctgtatttaattaattgacacacacacattgggccccctggtaaagaaagaggttttaaatggctcagagacctggcaggatggtggagcctgtgagtcaggagtccttctccagacactcagggccccacccaggaggcaatcacaagg

SEQ ID NO: 337722 - DNA, 373 bp, Homo sapiens
tttgtttttttttatcttagtagcatagaaaatacaggccattaggagatggcgactgccccaagggtacggctgtccttttgtagaatgaagtgccaggcattgcccacatatgacctgccttactccgcctacccccaggggtgagacttctcagggctggccttgctccccaggccctgggagggaccacagaggggctcagcagtgacgagccaggcttccccacccgatccactggggaactcctgagaatctggccttaggcagacccttcctcacaagcccttccttgtttctttcagccggaaatccctgtttgctccactgaacttggggcactcctctgggtcactggtggcccttgggccct

SEQ ID NO: 337723 - DNA, 435 bp, Homo sapiens
tccaaagtttagggatctcttcacgtacttgtatttcattttgtctcctggtgcacgggtctttctcatgtaaaccgaccctcaagggaagcagcccctagcactggaactcacacccagcagcaattaaaccaattgcatcctccaaggtaaaaaacaaacaaacaagccaaaccaaagtggccagcgatttgagatcagtttaagcaagagctaatgttaaatgtgaagccttctattactggatataaaagtgaagaatactgacgaagcccgtttcgtattccttcacggccagattactattatttacttgaagacagcaaaaaggatgcttgcttaagacagaagccaggagtgtggatggagcctacaaaccagtcaattaaaatgggaggtggctgggcatggtggctcgcgcctgtaatcccagca

SEQ ID NO: 337724 - DNA, 474 bp, Homo sapiens
gtgctgggattttaggtatgagttcactgtgtccagctctgttagacattcgatttactactactcacctgagctgtatggaaacgctagcatctttaggtgaaaagaattatgtatattatcacctttctttgaactctccagtctgtatcttaaactgagaaatgatttgaaacctgtctgtatttttttttattcttttcctctttaaactttacagtgagggtattcaaacttaagtatgaaatacttcagacctaacataaatggaaggcattttattgcagtattaaagtgtggagtgaataacttaagtaggctttgtgcaaatcaatgacatttctgcatgctcttgtgtatattcctatctgtgcaattcagtgtgtgacactgtaagtaatcagaggagattttatgcactgaacgtgaaaatcagcctgaaagatttgtagccataccttgcattttttgaaa

SEQ ID NO: 337725 - DNA, 229 bp, Homo sapiens
tctgtaccccttagccacttagtttcatcatcatcatcaaacattttttgggttcctaaatatgtttcttcatgtttaatacttctttattctgcttgttctttcaagtagggaaaggacaaacttaattatttacaaaatgtagacgatggttaaaaaacaggaaaaaaatttaatgaagtgtaattcattctctctttttccttcttttgtactcaggttgtttatt

SEQ ID NO: 337726 - DNA, 212 bp, Homo sapiens
cagatgtcatggcgcttcctattcttggtgcttgaaaacttagtttagttgtgagatcaaggttatctaggccttctaggggtaagaaagaaaactcggaggagagaaaaaaaatctggcgagtcccgaacttgactgagggtcgggtagaagaagtcttgcgtattgaaggtcagtcagtgagtctagtagaaactcttagtcgactctgg

SEQ ID NO: 337727 - DNA, 142 bp, Homo sapiens
ggtcatttgagcccaggagattgagactagcctgggtaacatggtgagaacccgtctctacaaaagataaaaacattagctggatgtggtggcacgtgcctgaagtctcagctctctgagaggctgaggcgagaggattgtt

SEQ ID NO: 337728 - DNA, 395 bp, Homo sapiens
atctgccttctagtccatgtcttcaaacttggctaaacagagttcagtggcagccgggaggctgagtgatgatctcagggaaagaatcctcctatggccttatgtgttcaaatagcagctgtggctgggaggagcagcactgggatgaggagagaaatagctaaggaagtacggctgccatcggtttgggactgggcctgagttttcaccaaggtcacttcctaaaagccttcctgacaagagtgagggcagaagagcaaaaccaggagccactcccataggctgtcgtgagagtggagaagcagctatattagcaccatgtgcacccttgctttctctggcacactctccatctctgctcagattctaatccaagtgcgcatttaccttttctc

SEQ ID NO: 337729 - DNA, 555 bp, Homo sapiens
cctcccaagtagctaggactacatacgtccgccaccatgcccagctaattgttgtatttttagtagagacagggtttcaccgtgttggccaggctggtcttgaactccttacctaaggtgatccacctgccccagcttcccaaagtgctgggattacaggagtgagccatggcacctggcctagggttgttatatgtttgacatccgtcccatttgggaggccttctcatcagtcattttatgcctttaatgccattctaggtaggcaggaaaggggtcagggccagtgggcccatgtagcagatagggaaactgaggcccagagaggacaagccacttcttcaagaggacccaaactggatgccaggcaggccctctgcctctgggattttgcccatatggctcaactggcctaagtctgctggcccaaggaaaaatttcaacccaaccctgccctttcccccattcctctcgtgcaggggagttggcgggcctgcggcagcaaataatagctacgcaggagaaagccagtctagacaaggagctgatggccca

SEQ ID NO: 337730 - DNA, 710 bp, Homo sapiens
gagccaaagacatagcaatggagaacgtgggtggtacagccctccaccctggcgagcagcacattagaatcacgtaggagcttaaaaagtactgactggcctggtctttttcggtgtgaaggtgggatgcaggcttcctggggttatcctctcgtacagccagagttgagaaccatctgagtagcgcttgtcacacttctggccacatcagaatcgtctgagggacttgttcactgcaggttgctgggtcccatctctagcctctgatccagtagcctggggtggggcacaggatgtcctgctgctggggtctgggcagcgctatgagaactgctgacgttggagctcgatcaggtggtccctcactccctgacccagggcatttgctgcttcctgtctctgccattcttttctcaacctggggcacttgcttttctcgctatgctgccctgccctttgctgaggcctgggctatccctggcagggtgcagaaaaaaaatttttaagttacttttctcagcccaaaggagactggaatgcttcacaagggattctacttgacaggcaattggaccacccaaatggcaaactaaaagcatagaagcggacaccagaggctcctggacctgagatgtggccctggaagtgaccagatgtggtctcaagagatgggggcccagggctaggaatgccgccatccggggaggccc

SEQ ID NO: 337731 - DNA, 2031 bp, Homo sapiens
tggctggccccagcaacggctcattctgctcccccgggtcggagccccccggagctgcgcgcgggcttgcagcgcctcgcccgcgctgtcctcccggtgtcccgcttctccgcgccccagccgccggctgccagcttttcggggccccgagtcgcacccagcgaagagagcgggcccgggacaagctcgaactccggccgcctcgcccttccccggctccgctccctctgccccctcggggtcgcgcgcccacgatgctgcagggccctggctcgctgctgctgctcttcctcgcctcgcactgctgcctgggctcggcgcgcgggctcttcctctttggccagcccgacttctcctacaagcgcagcaattgcaagcccatcccggccaacctgcagctgtgccacggcatcgaataccagaacatgcggctgcccaacctgctgggccacgagaccatgaaggaggtgctggagcaggccggcgcttggatcccgctggtcatgaagcagtgccacccggacaccaagaagttcctgtgctcgctcttcgcccccgtctgcctcgatgacctagacgagaccatccagccatgccactcgctctgcgtgcaggtgaaggaccgctgcgccccggtcatgtccgccttcggcttcccctggcccgacatgcttgagtgcgaccgtttcccccaggacaacgacctttgcatccccctcgctagcagcgaccacctcctgccagccaccgaggaagctccaaaggtatgtgaagcctgcaaaaataaaaatgatgatgacaacgacataatggaaacgctttgtaaaaatgattttgcactgaaaataaaagtgaaggagataacctacatcaaccgagataccaaaatcatcctggagaccaagagcaagaccatttacaagctgaacggtgtgtccgaaagggacctgaagaaatcggtgctgtggctcaaagacagcttgcagtgcacctgtgaggagatgaacgacatcaacgcgccctatctggtcatgggacagaaacagggtggggagctggtgatcacctcggtgaagcggtggcagaaggggcagagagagttcaagcgcatctcccgcagcatccgcaagctgcagtgctagtcccggcatcctgatggctccgacaggcctgctccagagcacggctgaccatttctgctccgggatctcagctcccgttccccaagcacactcctagctgctccagtctcagcctgggcagcttccccctgccttttgcacgtttgcatccccagcatttcctgagttataaggccacaggagtggatagctgttttcacctaaaggaaaagcccacccgaatcttgtagaaatattcaaactaataaaatcatgaatatttttatgaagtttaaaaatagctcactttaaagctagttttgaataggtgcaactgtgacttgggtctggttggttgttgtttgttgttttgagtcagctgattttcacttcccactgaggttgtcataacatgcaaattgcttcaattttctctgtggcccaaacttgtgggtcacaaaccctgttgagataaagctggctgttatctcaacatcttcatcagctccagactgagactcagtgtctaagtcttacaacaattcatcattttataccttcaatgggaacttaaactgttacatgtatcacattccagctacaatacttccatttattagaagcacattaaccatttctatagcatgatttcttcaagtaaaaggcaaaagatataaattttataattgacttgagtactttaagccttgtttaaaacatttcttacttaacttttgcaaattaaacccattgtagcttacctgtaatatacatagtagtttacctttaaaagttgtaaaaatattgctttaaccaacactgtaaatatttcagataaacattatattcttgtatataaactttacatcctgttttacctattctttgtcttctgtcttgtcttcttagt

SEQ ID NO: 337732 - DNA, 325 bp, Homo sapiens
gcggccgcctactactactactactgctcgaattcaagcttataacgatgtacggcgacatgatttcttcaagtaaaaggcaaaagatataaattttataattgacttgagtactttaagccttgtttaaaacatttcttacttaacttttgcaaattaaacccattgtagcttacctgtaatatacatagtagtttacctttaaaagttgtaaaaatattgctttaaccaacactgtaaatatttcagataaacattatattcttgtatataaactttacatcctgttttacctattctttgtcttctgtcttgtcttcttagt

SEQ ID NO: 337733 - DNA, 1794 bp, Homo sapiens
gctcgctcttcgcccccgtctgcctcgatgacctagacgagaccatccagccatgccactcgcactgctgcctgggctcggcgcgcgggctcttcctctttggccagcccgacttctcctacaagcgcagcaattgcaagcccatcccggccaacctgcagctgtgccacggcatcgaataccagaacatgcggctgcccaacctgctgggccacgagaccatgaaggaggtgctggagcaggccggcgcttggatcccgctggtcatgaagcagtgccacccggacaccaagaagttcctgtgctcgctcttcgcccccgtctgcctcgatgacctagacgagaccatccagccatgccactcgctctgcgtgcaggtgaaggaccgctgcgccccggtcatgtccgccttcggcttcccctggcccgacatgcttgagtgcgaccgtttcccccaggacaacgacctttgcatccccctcgctagcagcgaccacctcctgccagccaccgaggaagctccaaaggtatgtgaagcctgcaaaaataaaaatgatgatgacaacgacataatggaaacgctttgtaaaaatgattttgcactgaaaataaaagtgaaggagataacctacatcaaccgagataccaaaatcatcctggagaccaagagcaagaccatttacaagctgaacggtgtgtccgaaagggacctgaagaaatcggtgctgtggctcaaagacagcttgcagtgcacctgtgaggagatgaacgacatcaacgcgccctatctggtcatgggacagaaacagggtggggagctggtgatcacctcggtgaagcggtggcagaaggggcagagagagttcaagcgcatctcccgcagcatccgcaagctgcagtgctagtcccggcatcctgatggctccgacaggcctgctccagagcacggctgaccatttctgctccgggatctcagctcccgttccccaagcacactcctagctgctccagtctcagcctgggcagcttccccctgccttttgcacgtttgcatccccagcatttcctgagttataaggccacaggagtggatagctgttttcacctaaaggaaaagcccacccgaatcttgtagaaatattcaaactaataaaatcatgaatatttttatgaagtttaaaaatagctcactttaaagctagttttgaataggtgcaactgtgacttgggtctggttggttgttgtttgttgttttgagtcagctgattttcacttcccactgaggttgtcataacatgcaaattgcttcaattttctctgtggcccaaacttgtgggtcacaaaccctgttgagataaagctggctgttatctcaacatcttcatcagctccagactgagactcagtgtctaagtcttacaacaattcatcattttataccttcaatgggaacttaaactgttacatgtatcacattccagctacaatacttccatttattagaagcacattaaccatttctatagcatgatttcttcaagtaaaaggcaaaagatataaattttataattgacttgagtactttaagccttgtttaaaacatttcttacttaacttttgcaaattaaacccattgtagcttacctgtaatatacatagtagtttacctttaaaagttgtaaaaatattgctttaaccaacactgtaaatatttcagataaacattatattcttgtatataaactttacatcctgttttacctattctttgtcttctgtcttgtcttcttagt

SEQ ID NO: 337734 - DNA, 1925 bp, Homo sapiens
tggctggccccagcaacggctcattctgctcccccgggtcggagccccccggagctgcgcgcgggcttgcagcgcctcgcccgcgctgtcctcccggtgtcccgcttctccgcgccccagccgccggctgccagcttttcggggccccgagtcgcacccagcgaagagagcgggcccgggacaagctcgaactccggccgcctcgcccttccccggctccgtcttcctctttggccagcccgacttctcctacaagcgcagcaattgcaagcccatcccggccaacctgcagctgtgccacggcatcgaataccagaacatgcggctgcccaacctgctgggccacgagaccatgaaggaggtgctggagcaggccggcgcttggatcccgctggtcatgaagcagtgccacccggacaccaagaagttcctgtgctcgctcttcgcccccgtctgcctcgatgacctagacgagaccatccagccatgccactcgctctgcgtgcaggtgaaggaccgctgcgccccggtcatgtccgccttcggcttcccctggcccgacatgcttgagtgcgaccgtttcccccaggacaacgacctttgcatccccctcgctagcagcgaccacctcctgccagccaccgaggaagctccaaaggtatgtgaagcctgcaaaaataaaaatgatgatgacaacgacataatggaaacgctttgtaaaaatgattttgcactgaaaataaaagtgaaggagataacctacatcaaccgagataccaaaatcatcctggagaccaagagcaagaccatttacaagctgaacggtgtgtccgaaagggacctgaagaaatcggtgctgtggctcaaagacagcttgcagtgcacctgtgaggagatgaacgacatcaacgcgccctatctggtcatgggacagaaacagggtggggagctggtgatcacctcggtgaagcggtggcagaaggggcagagagagttcaagcgcatctcccgcagcatccgcaagctgcagtgctagtcccggcatcctgatggctccgacaggcctgctccagagcacggctgaccatttctgctccgggatctcagctcccgttccccaagcacactcctagctgctccagtctcagcctgggcagcttccccctgccttttgcacgtttgcatccccagcatttcctgagttataaggccacaggagtggatagctgttttcacctaaaggaaaagcccacccgaatcttgtagaaatattcaaactaataaaatcatgaatatttttatgaagtttaaaaatagctcactttaaagctagttttgaataggtgcaactgtgacttgggtctggttggttgttgtttgttgttttgagtcagctgattttcacttcccactgaggttgtcataacatgcaaattgcttcaattttctctgtggcccaaacttgtgggtcacaaaccctgttgagataaagctggctgttatctcaacatcttcatcagctccagactgagactcagtgtctaagtcttacaacaattcatcattttataccttcaatgggaacttaaactgttacatgtatcacattccagctacaatacttccatttattagaagcacattaaccatttctatagcatgatttcttcaagtaaaaggcaaaagatataaattttataattgacttgagtactttaagccttgtttaaaacatttcttacttaacttttgcaaattaaacccattgtagcttacctgtaatatacatagtagtttacctttaaaagttgtaaaaatattgctttaaccaacactgtaaatatttcagataaacattatattcttgtatataaactttacatcctgttttacctattctttgtcttctgtcttgtcttcttagt

SEQ ID NO: 337735 - DNA, 1994 bp, Homo sapiens
tggctggccccagcaacggctcattctgctcccccgggtcggagccccccggagctgcgcgcgggcttgcagcgcctcgcccgcgctgtcctcccggtgtcccgcttctccgcgccccagccgccggctgccagcttttcggggccccgagtcgcacccagcgaagagagcgggcccgggacaagctcgaactccggccgcctcgcccttccccggctccgctccctctgccccctcggggtcgcgcgcccacgatgctgcagggccctggctcgctgctgctgctcttcctcgcctcgcactgctgcctgggctcggcgcgcgggctcttcctctttggccagcccgacttctcctacaagcgcagcaattgcaagcccatcccggccaacctgcagctgtgccacggcatcgaataccagaacatgcggctgcccaacctgctgggccacgagaccatgaaggaggtgctgagtgccacccggacaccaagaagttcctgtgctcgctcttcgcccccgtctgcctcgatgacctagacgagaccatccagccatgccactcgctctgcgtgcaggtgaaggaccgctgcgccccggtcatgtccgccttcggcttcccctggcccgacatgcttgagtgcgaccgtttcccccaggacaacgacctttgcatccccctcgctagcagcgaccacctcctgccagccaccgaggaagctccaaaggtatgtgaagcctgcaaaaataaaaatgatgatgacaacgacataatggaaacgctttgtaaaaatgattttgcactgaaaataaaagtgaaggagataacctacatcaaccgagataccaaaatcatcctggagaccaagagcaagaccatttacaagctgaacggtgtgtccgaaagggacctgaagaaatcggtgctgtggctcaaagacagcttgcagtgcacctgtgaggagatgaacgacatcaacgcgccctatctggtcatgggacagaaacagggtggggagctggtgatcacctcggtgaagcggtggcagaaggggcagagagagttcaagcgcatctcccgcagcatccgcaagctgcagtgctagtcccggcatcctgatggctccgacaggcctgctccagagcacggctgaccatttctgctccgggatctcagctcccgttccccaagcacactcctagctgctccagtctcagcctgggcagcttccccctgccttttgcacgtttgcatccccagcatttcctgagttataaggccacaggagtggatagctgttttcacctaaaggaaaagcccacccgaatcttgtagaaatattcaaactaataaaatcatgaatatttttatgaagtttaaaaatagctcactttaaagctagttttgaataggtgcaactgtgacttgggtctggttggttgttgtttgttgttttgagtcagctgattttcacttcccactgaggttgtcataacatgcaaattgcttcaattttctctgtggcccaaacttgtgggtcacaaaccctgttgagataaagctggctgttatctcaacatcttcatcagctccagactgagactcagtgtctaagtcttacaacaattcatcattttataccttcaatgggaacttaaactgttacatgtatcacattccagctacaatacttccatttattagaagcacattaaccatttctatagcatgatttcttcaagtaaaaggcaaaagatataaattttataattgacttgagtactttaagccttgtttaaaacatttcttacttaacttttgcaaattaaacccattgtagcttacctgtaatatacatagtagtttacctttaaaagttgtaaaaatattgctttaaccaacactgtaaatatttcagataaacattatattcttgtatataaactttacatcctgttttacctattctttgtcttctgtcttgtcttcttagt

SEQ ID NO: 337736 - DNA, 1860 bp, Homo sapiens
tggctggccccagcaacggctcattctgctcccccgggtcggagccccccggagctgcgcgcgggcttgcagcgcctcgcccgcgctgtcctcccggtgtcccgcttctccgcgccccagccgccggctgccagcttttcggggccccgagtcgcacccagcgaagagagcgggcccgggacaagctcgaactccggccgcctcgcccttccccggctccgctccctctgccccctcggggtcgcgcgcccacgatgctgcagggccctggctcgctgctgctgctcttcctcgcctcgcactgctgcctgggctcggcgcgcgggctcttcctctttggccagcccgacttctcctacaagcgcagcaattgcaagcccatcccggccaacctgcagctgtgccacggcatcgaataccagaacatgcggctgcccaacctgctgggccacgagaccatgaaggaggtgctggagcaggccggcgcttggatcccgctggtcatgaagcagtgccacccggacaccaagaagttcctgtgctcgctcttcgcccccgtctgcctcgatgacctagacgagaccatccagccatgccactcgctctgcgtgcaggtgaaggaccgctgcgccccggtcatgtccgccttcggcttcccctggcccgacatgcttgagtgcgaccgtttcccccaggacaacgacctttgcatccccctcgctagcagcgaccacctcctgccagccaccgaggaagctccaaaggtatgtgaagcctgcaaaaataaaaatgatgatgacaacgacagcttgcagtgcacctgtgaggagatgaacgacatcaacgcgccctatctggtcatgggacagaaacagggtggggagctggtgatcacctcggtgaagcggtggcagaaggggcagagagagttcaagcgcatctcccgcagcatccgcaagctgcagtgctagtcccggcatcctgatggctccgacaggcctgctccagagcacggctgaccatttctgctccgggatctcagctcccgttccccaagcacactcctagctgctccagtctcagcctgggcagcttccccctgccttttgcacgtttgcatccccagcatttcctgagttataaggccacaggagtggatagctgttttcacctaaaggaaaagcccacccgaatcttgtagaaatattcaaactaataaaatcatgaatatttttatgaagtttaaaaatagctcactttaaagctagttttgaataggtgcaactgtgacttgggtctggttggttgttgtttgttgttttgagtcagctgattttcacttcccactgaggttgtcataacatgcaaattgcttcaattttctctgtggcccaaacttgtgggtcacaaaccctgttgagataaagctggctgttatctcaacatcttcatcagctccagactgagactcagtgtctaagtcttacaacaattcatcattttataccttcaatgggaacttaaactgttacatgtatcacattccagctacaatacttccatttattagaagcacattaaccatttctatagcatgatttcttcaagtaaaaggcaaaagatataaattttataattgacttgagtactttaagccttgtttaaaacatttcttacttaacttttgcaaattaaacccattgtagcttacctgtaatatacatagtagtttacctttaaaagttgtaaaaatattgctttaaccaacactgtaaatatttcagataaacattatattcttgtatataaactttacatcctgttttacctattctttgtcttctgtcttgtcttcttagt

SEQ ID NO: 337737 - DNA, 1416 bp, Homo sapiens
tggctggccccagcaacggctcattctgctcccccgggtcggagccccccggagctgcgcgcgggcttgcagcgcctcgcccgcgctgtcctcccggtgtcccgcttctccgcgccccagccgccggctgccagcttttcggggccccgagtcgcacccagcgaagagagcgggcccgggacaagctcgaactccggccgcctcgcccttccccggctccgctccctctgccccctcggggtcgcgcgcccacgatgctgcagggccctggctcgctgctgctgctcttcctcgcctcgcactgctgcctgggctcggcgcgcgggctcttcctctttggccagcccgacttctcctacaagcgcagcaattgcaagcccatcccggccaacctgcagctgtgccacggcatcgaataccagaacatgcggctgcccaacctgctgggccacgagaccatgaaggaggtgctggagcaggccggcgcttggatcccgctggtcatgaagcagtgccacccggacaccaagaagttcctgtgctcgctcttcgcccccgtctgcctcgatgacctagacgagaccatccagccatgccactcgctctgcgtgcaggtgaaggaccgctgcgccccggtcatgtccgccttcggcttcccctggcccgacatgcttgagtgcgaccgtttcccccaggacaacgacctttgcatccccctcgctagcagcgaccacctcctgccagccaccgaggaagctccaaaggtatgtgaagcctgcaaaaataaaaatgatgatgacaacgacataatggaaacgctttgtaaaaatgattttgcactgaaaataaaagtgaaggagataacctacatcaaccgagataccaaaatcatcctggagaccaagagcaagaccatttacaagctgaacggtgtgtccgaaagggacctgaagaaatcggtgctgtggctcaaagacagcttgcagtgcacctgtgaggagatgaacgacatcaacgcgccctatctggtcatgggacagaaacagggtggggagctggtgatcacctcggtgaagcggtggcagaaggggcagagagagttcaagcgcatctcccgcagcatccgcaagctgcagtgctagtcccggcatcctgatggctccgacaggcctgctccagagcacggctgaccatttctgctccgggatctcagctcccgttccccaagcacactcctagctgctccagtctcagcctgggcagcttccccctgccttttgcacgtttgcatccccagcatttcctgagttataaggccacaggagtggatagctgttttcacctaaaggaaaagcccacccgaatcttgtagaaatattcaaactaataaaatcatgaatatttttatgaagttta

SEQ ID NO: 337738 - DNA, 1245 bp, Homo sapiens
tggctggccccagcaacggctcattctgctcccccgggtcggagccccccggagctgcgcgcgggcttgcagcgcctcgcccgcgctgtcctcccggtgtcccgcttctccgcgccccagccgccggctgccagcttttcggggccccgagtcgcacccagcgaagagagcgggcccgggacaagctcgaactccggccgcctcgcccttccccggctccgctccctctgccccctcggggtcgcgcgcccacgatgctgcagggccctggctcgctgctgctgctcttcctcgcctcgcactgctgcctgggctcggcgcgcgggctcttcctctttggccagcccgacttctcctacaagcgcagcaattgcaagcccatcccggccaacctgcagctgtgccacggcatcgaataccagaacatgcggctgcccaacctgctgggccacgagaccatgaaggaggtgctggagcaggccggcgcttggatcccgctggtcatgaagcagtgccacccggacaccaagaagttcctgtgctcgctcttcgcccccgtctgcctcgatgacctagacgagaccatccagccatgccactcgctctgcgtgcaggtgaaggaccgctgcgccccggtcatgtccgccttcggcttcccctggcccgacatgcttgagtgcgaccgtttcccccaggacaacgacctttgcatccccctcgctagcagcgaccacctcctgccagccaccgaggaagctccaaaggtatgtgaagcctgcaaaaataaaaatgatgatgacaacgacagcttgcagtgcacctgtgaggagatgaacgacatcaacgcgccctatctggtcatgggacagaaacagggtggggagctggtgatcacctcggtgaagcggtggcagaaggggcagagagagttcaagcgcatctcccgcagcatccgcaagctgcagtgctagtcccggcatcctgatggctccgacaggcctgctccagagcacggctgaccatttctgctccgggatctcagctcccgttccccaagcacactcctagctgctccagtctcagcctgggcagcttccccctgccttttgcacgtttgcatccccagcatttcctgagttataaggccacaggagtggatagctgttttcacctaaaggaaaagcccacccgaatcttgtagaaatattcaaactaataaaatcatgaatatttttatgaagttta

SEQ ID NO: 337739 - DNA, 1956 bp, Homo sapiens
tggctggccccagcaacggctcattctgctcccccgggtcggagccccccggagctgcgcgcgggcttgcagcgcctcgcccgcgctgtcctcccggtgtcccgcttctccgcgccccagccgccggctgccagcttttcggggccccgagtcgcacccagcgaagagagcgggcccgggacaagctcgaactccggccgcctcgcccttccccggctccgctccctctgccccctcggggtcgcgcgcccacgatgctgcagggccctggctcgctgctgctgctcttcctcgcctcgcactgctgcctgggctcggcgcgcgggctcttcctctttggccagcccgacttctcctacaagcgcagcaattgcaagcccatcccggccaacctgcagctgtgccacggcatcgaataccagaacatgcggctgcccaacctgctgggccacgagaccatgaaggaggtgctggagcaggccggcgcttggatcccgctggtcatgaagcagtgccacccggacaccaagaagttcctgtgctcgctcttcgcccccgtctgcctcgatgacctagacgagaccatccagccatgccactcgctctgcgtgcaggtgaaggaccgctgcgccccggtcatgtccgccttcggcttcccctggcccgacatgcttgagtgcgaccgtttcccccaggacaacgacctttgcatccccctcgctagcagcgaccacctcctgccagccaccgaggaagctccaaaggtatgtgaagcctgcaaaaataaaaatgatgatgacaacgacataatggaaacgctttgtaaaaatgattttgcactgaaaataaaagtgaaggagataacctacatcaaccgagataccaaaatcatcctggagaccaagagcaagaccatttacaagctgaacggtgtgtccgaaagggacctgaagaaatcggtgctgtggctcaaagacagcttgcagtgcacctgtgaggagatgaacgacatcaacgcgccctatctggtcatgggacagaaacagggtggggagctgcagtgctagtcccggcatcctgatggctccgacaggcctgctccagagcacggctgaccatttctgctccgggatctcagctcccgttccccaagcacactcctagctgctccagtctcagcctgggcagcttccccctgccttttgcacgtttgcatccccagcatttcctgagttataaggccacaggagtggatagctgttttcacctaaaggaaaagcccacccgaatcttgtagaaatattcaaactaataaaatcatgaatatttttatgaagtttaaaaatagctcactttaaagctagttttgaataggtgcaactgtgacttgggtctggttggttgttgtttgttgttttgagtcagctgattttcacttcccactgaggttgtcataacatgcaaattgcttcaattttctctgtggcccaaacttgtgggtcacaaaccctgttgagataaagctggctgttatctcaacatcttcatcagctccagactgagactcagtgtctaagtcttacaacaattcatcattttataccttcaatgggaacttaaactgttacatgtatcacattccagctacaatacttccatttattagaagcacattaaccatttctatagcatgatttcttcaagtaaaaggcaaaagatataaattttataattgacttgagtactttaagccttgtttaaaacatttcttacttaacttttgcaaattaaacccattgtagcttacctgtaatatacatagtagtttacctttaaaagttgtaaaaatattgctttaaccaacactgtaaatatttcagataaacattatattcttgtatataaactttacatcctgttttacctattctttgtcttctgtcttgtcttcttagt

SEQ ID NO: 337740 - DNA, 1341 bp, Homo sapiens
tggctggccccagcaacggctcattctgctcccccgggtcggagccccccggagctgcgcgcgggcttgcagcgcctcgcccgcgctgtcctcccggtgtcccgcttctccgcgccccagccgccggctgccagcttttcggggccccgagtcgcacccagcgaagagagcgggcccgggacaagctcgaactccggccgcctcgcccttccccggctccgctccctctgccccctcggggtcgcgcgcccacgatgctgcagggccctggctcgctgctgctgctcttcctcgcctcgcactgctgcctgggctcggcgcgcgggctcttcctctttggccagcccgacttctcctacaagcgcagcaattgcaagcccatcccggccaacctgcagctgtgccacggcatcgaataccagaacatgcggctgcccaacctgctgggccacgagaccatgaaggaggtgctggagcaggccggcgcttggatcccgctggtcatgaagcagtgccacccggacaccaagaagttcctgtgctcgctcttcgcccccgtctgcctcgatgacctagacgagaccatccagccatgccactcgctctgcgtgcaggtgaaggaccgctgcgccccggtcatgtccgccttcggcttcccctggcccgacatgcttgagtgcgaccgtttcccccaggacaacgacctttgcatccccctcgctagcagcgaccacctcctgccagccaccgaggaagctccaaaggtatgtgaagcctgcaaaaataaaaatgatgatgacaacgacataatggaaacgctttgtaaaaatgattttgcactgaaaataaaagtgaaggagataacctacatcaaccgagataccaaaatcatcctggagaccaagagcaagaccatttacaagctgaacggtgtgtccgaaagggacctgaagaaatcggtgctgtggctcaaagacagcttgcagtgcacctgtgaggagatgaacgacatcaacgcgccctatctggtcatgggacagaaacagggtggggagctgcagtgctagtcccggcatcctgatggctccgacaggcctgctccagagcacggctgaccatttctgctccgggatctcagctcccgttccccaagcacactcctagctgctccagtctcagcctgggcagcttccccctgccttttgcacgtttgcatccccagcatttcctgagttataaggccacaggagtggatagctgttttcacctaaaggaaaagcccacccgaatcttgtagaaatattcaaactaataaaatcatgaatatttttatgaagttta

SEQ ID NO: 337741 - DNA, 640 bp, Homo sapiens
tggctggccccagcaacggctcattctgctcccccgggtcggagccccccggagctgcgcgcgggcttgcagcgcctcgcccgcgctgtcctcccggtgtcccgcttctccgcgccccagccgccggctgccagcttttcggggccccgagtcgcacccagcgaagagagcgggcccgggacaagctcgaactccggccgcctcgcccttccccggctccgctccctctgccccctcggggtcgcgcgcccacgatgctgcagggccctggctcgctgctgctgctcttcctcgcctcgcactgctgcctgggctcggcgcgcgggctcttcctctttggccagcccgacttctcctacaagcgcagcaattgcaagcccatcccggccaacctgcagctgtgccacggcatcgaataccagaacatgcggctgcccaacctgctgggccacgagaccatgaaggaggtgctggagcaggccggcgcttggatcccgctggtcatgaagcagtgccacccggacaccaagaagttcctgtgctcgctcttcgcccccgtctgcctcgatgacctagacgagaccatccagcagcccaggaggtcgacgcggccgcgaatttagtagtagtaggcggccgc

SEQ ID NO: 337742 - DNA, 170 bp, Homo sapiens
ccaaacgatgcccgatgtccaacgaacgaatgatctagcctcggcctacttctcaggacttagctttgtccctgcccgcgacttcccgctgggaacgtcgtccccgccaccaccggctctgcttaggttcgaactctgggccactcttcctactccctctggtttccagc

SEQ ID NO: 337743 - DNA, 264 bp, Homo sapiens
ctgaaagtctgattagaaaaatgttgtatcttctctatctattctctatttttttttttttgagacaacccaggctggagtgtagtgatgtgatcataactcaccgtggccttaacctcccaggctcagacaaccctctcacctcagcctcctgaatggctaggactacagtcatgcatgcaccaccatgcccagctaagttagtttgtttttctagaggcagggtctcactatgttgcccagacagatggggattctcccacc

SEQ ID NO: 337744 - DNA, 591 bp, Homo sapiens
gaagatggtaggcagtcacctacacaaatctctggggaactcatctgccacacacaggttcgcacctcctcattttgcacacatttctcacctcctcctcattcatccccctccgcaagtgagaatcactgcatataacaaaagatatttctcagagtggtttattacaaatgtagatgaggtgaaagcttaaaccaccaagtacttaaaattctcacaactgactacagcctcctgcgtagatgcttggtccttcctgagggatttctcattaatggaaaggatttcaaaagagaaaataaattattcctgtacataaaggagggtagataaaaagaaagggaggggagcaaaggaaagagagagggaagggctgtcaattttccatcagtggatgatttttcccaggagaattcacactgtttacaaatcaggatcatgttctttcaccctataatctgttccctcttagcagtcatcagagcaggcaccatcatctctctactgctccagctctcaactttcaatccatgcttgatgtctcttcttccctcaaacttcacttctactccatcagcaagtactcagatg

SEQ ID NO: 337745 - DNA, 507 bp, Homo sapiens
ctggggagcacattttgtttccatgcatgctaatgatttgagaatgccgcctggagatttgcactgactgtcttggaaaaatgtttatagtgtttcgggggtttcaaaactgacaggcagtttgtggacctgagtggtgtttaatcccccatttcccccacctgagtggtaaggggagaaacaacttggggtgcaaggagagcgctcctgtgctggagctcggccgatgctgggcagcaccaggaggattttgcgggcttcctcgtgaaagcaggaagactcagccaaggttagtccgtctgtcggtccctcaggcactttctcctggagataagaagggaagactccttttttctgagagatcttcctaatttgtttgttttgttgtagctgcctgtgtatggctgcgtctccccaggtacagcatgccgagtttggccacacagctatccaggtactaccatgtttccagtacaattctacattatccctctgctggtgtcgtgg

SEQ ID NO: 337746 - DNA, 3098 bp, Homo sapiens
caatccctgagtatctcgggaaggaggtgtccggagccgcggacctagagatcccagaagccacagcgcagcggcccggcccgccactatttccaggctctgcggggcaggggtgggcccagactccacttcccggcgggtagtgcgaccctaggggcgggacttcatgtcccagcaggctccgggcggcgtgcgccgcggtgcctagtgtgggatgtaagcgcgccgccgcccaccgcccgccgccatggggctgaaggccgcccagaagacgctgttcccgctgcgctccatcgacgacgtggtgcgcctgtttgctgccgagctgggccgagaggagccggacctggtgctcctttccttggtgctgggcttcgtggagcattttctggctgtcaaccgcgtcatccctaccaacgttcccgagctcaccttccagcccagccccgcccccgacccgcctggcggcctcacctactttcccgtggccgacctgtctatcatcgccgccctctatgcccgcttcaccgcccagatccgaggcgccgtcgacctgtccctctatcctcgagaagggggtgtctccagccgtgagctggtgaagaaggtctccgatgtcatatggaacagcctcagccgctcctacttcaaggatcgggcccacatccagtccctcttcagcttcatcacaggcaccaaattggacagctccggtgtggcctttgctgtggttggggcctgccaggccctgggtctccgggatgtccacctcgccctgtctgaggatcatgcctgggtagtgtttgggcccaatggggagcagacagctgaggtcacctggcacggcaagggcaacgaggaccgcaggggccagacagtcaatgccggtgtggctgagcgggtattgttccctccccccagccttgtccccttcatactgtagtagcccaagccacccaagggactccattttcttgggccacacccctttcttcccatcaccacccacataggaagggaagacagaagagccccttttcctggctgtcattccctgaagcaggcacagggtgggccatcatgagacataatgatctcatccccccctaagagctggctgtacctgaaaggatcatacatgcgctgtgaccgcaagatggaggtggcgttcatggtgtgtgccatcaacccttccattgacctgcacaccgactcgctggagcttctgcagctgcagcagaagctgctctggctgctctatgacctgggacatctggaaaggtaccccatggccttagggaacctggcagatctagaggagctggagcccacccctggccggccagacccactcaccctctaccacaagggcattgcctcagccaagacctactatcgggatgaacacatctacccctacatgtacctggctggctaccactgtcgcaaccgcaatgtgcgggaagccctgcaggcctgggcggacacggccactgtcatccaggactacaactactgccgggaagacgaggagatctacaaggagttctttgaagtagccaatgatgtcatccccaacctgctgaaggaggcagccagcttgctggaggcgggcgaggagcggccgggggagcaaagccagggcacccagagccaaggttccgccctccaggaccctgagtgcttcgcccacctgctgcgattctacgacggcatctgcaaatgggaggagggcagtcccacgcctgtgctgcacgtgggctgggccacctttcttgtgcagtccctaggccgttttgagggacaggtgcggcagaaggtgcgcatagtgagccgagaggccgaggcggccgaggccgaggagccgtggggcgaggaagcccgggaaggccggcggcggggcccacggcgggagtccaagccagaggagcccccgccgcccaagaagccagcactggacaagggcctgggcaccggccagggtgcagtgtcaggacccccccggaagcctcctgggactgtcgctggcacagcccgaggccctgaaggtggcagcacggctcaggtgccagcacccgcagcatcaccaccgccggagggtccagtgctcactttccagagtgagaagatgaagggcatgaaggagctgctggtggccaccaagatcaactcgagcgccatcaagctgcaactcacggcacagtcgcaagtgcagatgaagaagcagaaagtgtccacccctagtgactacactctgtctttcctcaagcggcagcgcaaaggcctctgaactactggggacttcggaccgcttgtggggacccaggctccgcccttagtcccccaactctgagcccatgttctgcccccagcccaaaggggacaggcctcacctctacccaaaccctaggttcccggtcccgagtacagtctgtatcaaacccacgattttctccagctcagaacccagggctctgccccagtcgttagaatataggtctcttctcccagaatcccagccggccaatggaaacctcacgctgggtcctaattaccagtctttaaaggcccagcccctagaaacccaagctcctcctcggaaccgctcacctagagccagaccaacgttactcagggctcctcccagcttgtaggagctgaggtttcacccttaacccaaggagcacaggtcccacctccagcccgggagcctaggaccactcagcccctaggagtatatttccgcacttcagaattccatatcttgcgaatccaagctccctgccccaaataacttcagtcctgctccagaatttggaaatcctagtttcctctccttcgtatcccgagtctgggacacaaaactccgcccccagcctatgagcatcctgagccccgccctcttcctgacgaaactggccccggatcagagcaggacctcccttccgaccctctgggaacctcccagaggtccagcccatctcggagcatcccggaggaaatctgcagagggttaggagtgggtgacaagagcctgatctcttcctgttttgtacatagatttatttttcagttccaagaaagatgaatacattttg

SEQ ID NO: 337747 - DNA, 3213 bp, Homo sapiens
  misc_feature (234)..(234): n is a, c, g, or t
  misc_feature (260)..(260): n is a, c, g, or t
  misc_feature (264)..(264): n is a, c, g, or t
  misc_feature (294)..(294): n is a, c, g, or t
cctgggcaataagagctactccagcctgggcaataagagctgttgcttcagagaagggttcctggcatagccaatgatgaggctcccaaacacagttccaatcccagcccctagaaacccaagctcctcctcggaaccgctgacctagagccagaccaacgttactcagggctcctcccagcttgtaggagctgaggtctcacccttaaccacaaggagcacaggtcccacctncagcccgggagcctaggaccactcancccntaggagtatatttccgcacttcagaattcnatatcttgcgatccaagctccgtgccccaaataacttcagtcctgctccagaatttggaaatcctagattcctctccttcgtatcccgagtctgggacacagaactccgcccccagtctatgagcggccattggggctcctcattggggtgcttggggcgcaccccatcgggtaccgggcgtcccggaattgtgggggacaaaaaggctctgcagtctcggctgaggggtctcaccgacaaaagaggggaagccggccgccgcccaccgcccgccgccatggggctgaaggccgcccagaagacgctgttcccgctgcgctccatcgacgacgtggtgcgcctgtttgctgccgagctgggccgagaggagccggacctggtgctcctttccttggtgctgggcttcgtggagcattttctggctgtcaaccgcgtcatccctaccaacgttcccgagctcaccttccagcccagccccgcccccgacccgcctggcggcctcacctactttcccgtggccgacctgtctatcatcgccgccctctatgcccgcttcaccgcccagatccgaggcgccgtcgacctgtccctctatcctcgagaagggggtgtctccagccgtgagctggtgaagaaggtctccgatgtcatatggaacagcctcagccgctcctacttcaaggatcgggcccacatccagtccctcttcagcttcatcacaggcaccaaattggacagctccggtgtggcctttgctgtggttggggcctgccaggccctgggtctccgggatgtccacctcgccctgtctgaggatcatgcctgggtagtgtttgggcccaatggggagcagacagctgaggtcacctggcacggcaagggcaacgaggaccgcaggggccagacagtcaatgccggtgtggctgagcggagctggctgtacctgaaaggatcatacatgcgctgtgaccgcaagatggaggtggcgttcatggtgtgtgccatcaacccttccattgacctgcacaccgactcgctggagcttctgcagctgcagcagaagctgctctggctgctctatgacctgggacatctggaaaggtaccccatggccttagggaacctggcagatctagaggagctggagcccacccctggccggccagacccactcaccctctaccacaagggcattgcctcagccaagacctactatcgggatgaacacatctacccctacatgtacctggctggctaccactgtcgcaaccgcaatgtgcgggaagccctgcaggcctgggcggacacggccactgtcatccaggactacaactactgccgggaagacgaggagatctacaaggagttctttgaagtagccaatgatgtcatccccaacctgctgaaggaggcagccagcttgctggaggcgggcgaggagcggccgggggagcaaagccagggcacccagagccaaggttccgccctccaggaccctgagtgcttcgcccacctgctgcgattctacgacggcatctgcaaatgggaggagggcagtcccacgcctgtgctgcacgtgggctgggccacctttcttgtgcagtccctaggccgttttgagggacaggtgcggcagaaggtgcgcatagtgagccgagaggccgaggcggccgaggccgaggagccgtggggcgaggaagcccgggaaggccggcggcggggcccacggcgggagtccaagccagaggagcccccgccgcccaagaagccagcactggacaagggcctgggcaccggccagggtgcagtgtcaggacccccccggaagcctcctgggactgtcgctggcacagcccgaggccctgaaggtggcagcacggctcaggtgccagcacccgcagcatcaccaccgccggagggtccagtgctcactttccagagtgagaagatgaagggcatgaaggagctgctggtggccaccaagatcaactcgagcgccatcaagctgcaactcacggcacagtcgcaagtgcagatgaagaagcagaaagtgtccacccctagtgactacactctgtctttcctcaagcggcagcgcaaaggcctctgaactactggggacttcggaccgcttgtggggacccaggctccgcccttagtcccccaactctgagcccatgttctgcccccagcccaaaggggacaggcctcacctctacccaaaccctaggttcccggtcccgagtacagtctgtatcaaacccacgattttctccagctcagaacccagggctctgccccagtcgttagaatataggtctcttctcccagaatcccagccggccaatggaaacctcacgctgggtcctaattaccagtctttaaaggcccagcccctagaaacccaagctcctcctcggaaccgctcacctagagccagaccaacgttactcagggctcctcccagcttgtaggagctgaggtttcacccttaacccaaggagcacaggtcccacctccagcccgggagcctaggaccactcagcccctaggagtatatttccgcacttcagaattccatatcttgcgaatccaagctccctgccccaaataacttcagtcctgctccagaatttggaaatcctagtttcctctccttcgtatcccgagtctgggacacaaaactccgcccccagcctatgagcatcctgagccccgccctcttcctgacgaaactggccccggatcagagcaggacctcccttccgaccctctgggaacctcccagaggtccagcccatctcggagcatcccggaggaaatctgcagagggttaggagtgggtgacaagagcctgatctcttcctgttttgtacatagatttatttttcagttccaagaaagatgaatacattttg

SEQ ID NO: 337748 - DNA, 3559 bp, Homo sapiens
caatccctgagtatctcgggaaggaggtgtccggagccgcggacctagagatcccagaagccacagcgcagcggcccggcccgccactatttccaggctctgcggggcaggggtgggcccagactccacttcccggcgggtagtgcgaccctaggggcgggacttcatgtcccagcaggctccgggcggcgtgcgccgcggtgcctagtgtgggatgtaagcgcgccgccgcccaccgcccgccgccatggggctgaaggccgcccagaagacgctgttcccgctgcgctccatcgacgacgtggtgcgcctgtttgctgccgagctgggccgagaggagccggacctggtgctcctttccttggtgctgggcttcgtggagcattttctggctgtcaaccgcgtcatccctaccaacgttcccgagctcaccttccagcccagccccgcccccgacccgcctggcggcctcacctactttcccgtggccgacctgtctatcatcgccgccctctatgcccgcttcaccgcccagatccgaggcgccgtcgacctgtccctctatcctcgagaagggggtgtctccagccgtgagctggtgaagaaggtctccgatgtcatatggaacagcctcagccgctcctacttcaaggatcgggcccacatccagtccctcttcagcttcatcacaggcaccaaattggacagctccggtgtggcctttgctgtggttggggcctgccaggccctgggtctccgggatgtccacctcgccctgtctgaggatcatgcctgggtagtgtttgggcccaatggggagcagacagctgaggtcacctggcacggcaagggcaacgaggaccgcaggggccagacagtcaatgccggtgtggctgagcgggtattgttccctccccccagccttgtccccttcatactgtagtagcccaagccacccaagggactccattttcttgggccacacccctttcttcccatcaccacccacataggaagggaagacagaagagccccttttcctggctgtcattccctgaagcaggcacagggtgggccatcatgagacataatgatctcatccccccctaagagctggctgtacctgaaaggatcatacatgcgctgtgaccgcaagatggaggtggcgttcatggtgtgtgccatcaacccttccattgacctgcacaccgactcgctggagcttctgcagctgcagcagaagctgctctggctgctctatgacctgggacatctggaaaggtaccccatggccttagggaacctggcagatctagaggagctggagcccacccctggccggccagacccactcaccctctaccacaagggcattgcctcagccaagacctactatcgggatgaacacatctacccctacatgtacctggctggctaccactgtcgcaaccgcaatgtgcgggaagccctgcaggcctgggcggacacggccactgtcatccaggagtgaggatccccctactagggcctgcagcctgtcctttcttcccctccatcagtttccaaccaccctcgtccaggactgaggcctggctcccacgccccatcccctttccatccagtccctaggcagcaaggccaccattacccaggaggtagggaccctgattaaggtgtcacatctttccctccctcccctctcctcctaattttttttttctcagaacagtctcaaatctccaatgtttaaccaccatcatccagcagtgggacttccaccctcggccccatgcccccctcctcattcttgctttcttcctctgggctgacccagacagcatcattttgcagtgaggaccccacctactcccccagcccctgggggctccatcccccgccaggtccctggggctacccccgatggtgagaccccttcagaccctacagagaccccactgctctcacagctacaactactgccgggaagacgaggagatctacaaggagttctttgaagtagccaatgatgtcatccccaacctgctgaaggaggcagccagcttgctggaggcgggcgaggagcggccgggggagcaaagccagggcacccagagccaaggttccgccctccaggaccctgagtgcttcgcccacctgctgcgattctacgacggcatctgcaaatgggaggagggcagtcccacgcctgtgctgcacgtgggctgggccacctttcttgtgcagtccctaggccgttttgagggacaggtgcggcagaaggtgcgcatagtgagccgagaggccgaggcggccgaggccgaggagccgtggggcgaggaagcccgggaaggccggcggcggggcccacggcgggagtccaagccagaggagcccccgccgcccaagaagccagcactggacaagggcctgggcaccggccagggtgcagtgtcaggacccccccggaagcctcctgggactgtcgctggcacagcccgaggccctgaaggtggcagcacggctcaggtgccagcacccgcagcatcaccaccgccggagggtccagtgctcactttccagagtgagaagatgaagggcatgaaggagctgctggtggccaccaagatcaactcgagcgccatcaagctgcaactcacggcacagtcgcaagtgcagatgaagaagcagaaagtgtccacccctagtgactacactctgtctttcctcaagcggcagcgcaaaggcctctgaactactggggacttcggaccgcttgtggggacccaggctccgcccttagtcccccaactctgagcccatgttctgcccccagcccaaaggggacaggcctcacctctacccaaaccctaggttcccggtcccgagtacagtctgtatcaaacccacgattttctccagctcagaacccagggctctgccccagtcgttagaatataggtctcttctcccagaatcccagccggccaatggaaacctcacgctgggtcctaattaccagtctttaaaggcccagcccctagaaacccaagctcctcctcggaaccgctcacctagagccagaccaacgttactcagggctcctcccagcttgtaggagctgaggtttcacccttaacccaaggagcacaggtcccacctccagcccgggagcctaggaccactcagcccctaggagtatatttccgcacttcagaattccatatcttgcgaatccaagctccctgccccaaataacttcagtcctgctccagaatttggaaatcctagtttcctctccttcgtatcccgagtctgggacacaaaactccgcccccagcctatgagcatcctgagccccgccctcttcctgacgaaactggccccggatcagagcaggacctcccttccgaccctctgggaacctcccagaggtccagcccatctcggagcatcccggaggaaatctgcagagggttaggagtgggtgacaagagcctgatctcttcctgttttgtacatagatttatttttcagttccaagaaagatgaatacattttg

SEQ ID NO: 337749 - DNA, 2495 bp, Homo sapiens
gccattgggctgggcttgaaagtctttggtgatgtgtagaagagtgtctgagaaagagaagggccctgagctcggagggcaggccccacccctgcagtctgccccaggcctcagccagcagtcctgtagacccagggaggagaccaggtagaagggctggcagcgagtggaggtgggagtggagatggagaggactccctgggatcttcctgtggccccttctgggtgtgccctggtggggcatttgtgccagcagggcagctggggctgcctccctgaggatcctctgcctcacctccatccagggcattgcctcagccaagacctactatcgggatgaacacatctacccctacatgtacctggctggctaccactgtcgcaaccgcaatgtgcgggaagccctgcaggcctgggcggacacggccactgtcatccaggagtgaggatccccctactagggcctgcagcctgtcctttcttcccctccatcagtttccaaccaccctcgtccaggactgaggcctggctcccacgccccatcccctttccatccagtccctaggcagcaaggccaccattacccaggaggtagggaccctgattaaggtgtcacatctttccctccctcccctctcctcctaattttttttttctcagaacagtctcaaatctccaatgtttaaccaccatcatccagcagtgggacttccaccctcggccccatgcccccctcctcattcttgctttcttcctctgggctgacccagacagcatcattttgcagtgaggaccccacctactcccccagcccctgggggctccatcccccgccaggtccctggggctacccccgatggtgagaccccttcagaccctacagagaccccactgctctcacagctacaactactgccgggaagacgaggagatctacaaggagttctttgaagtagccaatgatgtcatccccaacctgctgaaggaggcagccagcttgctggaggcgggcgaggagcggccgggggagcaaagccagggcacccagagccaaggttccgccctccaggaccctgagtgcttcgcccacctgctgcgattctacgacggcatctgcaaatgggaggagggcagtcccacgcctgtgctgcacgtgggctgggccacctttcttgtgcagtccctaggccgttttgagggacaggtgcggcagaaggtgcgcatagtgagccgagaggccgaggcggccgaggccgaggagccgtggggcgaggaagcccgggaaggccggcggcggggcccacggcgggagtccaagccagaggagcccccgccgcccaagaagccagcactggacaagggcctgggcaccggccagggtgcagtgtcaggacccccccggaagcctcctgggactgtcgctggcacagcccgaggccctgaaggtggcagcacggctcaggtgccagcacccgcagcatcaccaccgccggagggtccagtgctcactttccagagtgagaagatgaagggcatgaaggagctgctggtggccaccaagatcaactcgagcgccatcaagctgcaactcacggcacagtcgcaagtgcagatgaagaagcagaaagtgtccacccctagtgactacactctgtctttcctcaagcggcagcgcaaaggcctctgaactactggggacttcggaccgcttgtggggacccaggctccgcccttagtcccccaactctgagcccatgttctgcccccagcccaaaggggacaggcctcacctctacccaaaccctaggttcccggtcccgagtacagtctgtatcaaacccacgattttctccagctcagaacccagggctctgccccagtcgttagaatataggtctcttctcccagaatcccagccggccaatggaaacctcacgctgggtcctaattaccagtctttaaaggcccagcccctagaaacccaagctcctcctcggaaccgctcacctagagccagaccaacgttactcagggctcctcccagcttgtaggagctgaggtttcacccttaacccaaggagcacaggtcccacctccagcccgggagcctaggaccactcagcccctaggagtatatttccgcacttcagaattccatatcttgcgaatccaagctccctgccccaaataacttcagtcctgctccagaatttggaaatcctagtttcctctccttcgtatcccgagtctgggacacaaaactccgcccccagcctatgagcatcctgagccccgccctcttcctgacgaaactggccccggatcagagcaggacctcccttccgaccctctgggaacctcccagaggtccagcccatctcggagcatcccggaggaaatctgcagagggttaggagtgggtgacaagagcctgatctcttcctgttttgtacatagatttatttttcagttccaagaaagatgaatacattttg

SEQ ID NO: 337750 - DNA, 1078 bp, Homo sapiens
  misc_feature (912)..(912): n is a, c, g, or t
  misc_feature (925)..(925): n is a, c, g, or t
  misc_feature (947)..(947): n is a, c, g, or t
caatccctgagtatctcgggaaggaggtgtccggagccgcggacctagagatcccagaagccacagcgcagcggcccggcccgccactatttccaggctctgcggggcaggggtgggcccagactccacttcccggcgggtagtgcgaccctaggggcgggacttcatgtcccagcaggctccgggcggcgtgcgccgcggtgcctagtgtgggatgtaagcgcgccgccgcccaccgcccgccgccatggggctgaaggccgcccagaagacgctgttcccgctgcgctccatcgacgacgtggtgcgcctgtttgctgccgagctgggccgagaggagccggacctggtgctcctttccttggtgctgggcttcgtggagcattttctggctgtcaaccgcgtcatccctaccaacgttcccgagctcaccttccagcccagccccgcccccgacccgcctggcggcctcacctactttcccgtggccgacctgtctatcatcgccgccctctatgcccgcttcaccgcccagatccgaggcgccgtcgacctgtccctctatcctcgagaagggggtgtctccagccgtgagctggtgaagaaggtctccgatgtcatatggaacagcctcagccgctcctacttcaaggatcgggcccacatccagtccctcttcagcttcatcacaggcaccaaattggacagctccggtgtggcctttgctgtggttggggcctgccaggccctgggtctccgggatgtccacctcgccctgtctgaggatcatgcctgggtagtgtttgggcccaatggggagcagacagctgaggtcacctggcacggcaagggcaacgaggaccgcaggggccagacagtcaatgccggtgtggctgagcggagctgggtgtnctgaagggtcatnatgcgctgtgaccgagaggagnggggtccaggggtgtgcaaaacctcatgaacgggaacgatcgttgagcttggatggcaaaatgtcggtgccataccggcttgacgcccggctggacgggattagagtggcccgggaacctacccaaggtgc

SEQ ID NO: 337751 - DNA, 380 bp, Homo sapiens
agggggtgtctccagccgtgagctggtgaagaaggtctccgatgtcatatggaacagcctcagccgctcctacttcaaggatcgggcccacatccagtccctcttcagcttcatcacagggagcccagtaggtgggaatcttatccatgacccacttcttcaaaaccctccatggtttacagaacccttttaagaactgtaagccttgtgaggttcggcaggtgttattttcctctttgcagttgggaaactgaagcccagagaggggaaatgatatgccaaagtcacacacggcatggcagggctggaagtgaagcctgatcacttggctccaaatcatcaacctcacctctgccccctcagcacccccacccttgcca

SEQ ID NO: 337752 - DNA, 466 bp, Homo sapiens
aatcagttcagtcagggctgtctgaggggtgtccagggttccccagcctgggagtggcaggggctgcatttgtcccctcagccctgccttttctgccactgcttactgtccttcctggagtataacagaggtcaaatgtggtaggagcactgaagagggggtgttcacttggtgggtgtaggtggggaggagggccattgggctgggcttgaaagtctttggtgatgtgtagaagagtgtctgagaaagagaagggccctgagctcggagggcaggccccacccctgcagtctgccccaggcctcagccagcagtcctgtagacccagggaggagaccaggtagaagggctggcagcgagtggaggtgggagtggagatggagaggactccctgggatcttcctgtggccccttctgggtgtgccctggtggggcatttgtgccagcagggcagctggggctgcct

SEQ ID NO: 337753 - DNA, 2888 bp, Homo sapiens
caatccctgagtatctcgggaaggaggtgtccggagccgcggacctagagatcccagaagccacagcgcagcggcccggcccgccactatttccaggctctgcggggcaggggtgggcccagactccacttcccggcgggtagtgcgaccctaggggcgggacttcatgtcccagcaggctccgggcggcgtgcgccgcggtgcctagtgtgggatgtaagcgcgccgccgcccaccgcccgccgccatggggctgaaggccgcccagaagacgctgttcccgctgcgctccatcgacgacgtggtgcgcctgtttgctgccgagctgggccgagaggagccggacctggtgctcctttccttggtgctgggcttcgtggagcattttctggctgtcaaccgcgtcatccctaccaacgttcccgagctcaccttccagcccagccccgcccccgacccgcctggcggcctcacctactttcccgtggccgacctgtctatcatcgccgccctctatgcccgcttcaccgcccagatccgaggcgccgtcgacctgtccctctatcctcgagaagggggtgtctccagccgtgagctggtgaagaaggtctccgatgtcatatggaacagcctcagccgctcctacttcaaggatcgggcccacatccagtccctcttcagcttcatcacaggcaccaaattggacagctccggtgtggcctttgctgtggttggggcctgccaggccctgggtctccgggatgtccacctcgccctgtctgaggatcatgcctgggtagtgtttgggcccaatggggagcagacagctgaggtcacctggcacggcaagggcaacgaggaccgcaggggccagacagtcaatgccggtgtggctgagcggagctggctgtacctgaaaggatcatacatgcgctgtgaccgcaagatggaggtggcgttcatggtgtgtgccatcaacccttccattgacctgcacaccgactcgctggagcttctgcagctgcagcagaagctgctctggctgctctatgacctgggacatctggaaaggtaccccatggccttagggaacctggcagatctagaggagctggagcccacccctggccggccagacccactcaccctctaccacaagggcattgcctcagccaagacctactatcgggatgaacacatctacccctacatgtacctggctggctaccactgtcgcaaccgcaatgtgcgggaagccctgcaggcctgggcggacacggccactgtcatccaggactacaactactgccgggaagacgaggagatctacaaggagttctttgaagtagccaatgatgtcatccccaacctgctgaaggaggcagccagcttgctggaggcgggcgaggagcggccgggggagcaaagccagggcacccagagccaaggttccgccctccaggaccctgagtgcttcgcccacctgctgcgattctacgacggcatctgcaaatgggaggagggcagtcccacgcctgtgctgcacgtgggctgggccacctttcttgtgcagtccctaggccgttttgagggacaggtgcggcagaaggtgcgcatagtgagccgagaggccgaggcggccgaggccgaggagccgtggggcgaggaagcccgggaaggccggcggcggggcccacggcgggagtccaagccagaggagcccccgccgcccaagaagccagcactggacaagggcctgggcaccggccagggtgcagtgtcaggacccccccggaagcctcctgggactgtcgctggcacagcccgaggccctgaaggtggcagcacggctcaggtgccagcacccgcagcatcaccaccgccggagggtccagtgctcactttccagagtgagaagatgaagggcatgaaggagctgctggtggccaccaagatcaactcgagcgccatcaagctgcaactcacggcacagtcgcaagtgcagatgaagaagcagaaagtgtccacccctagtgactacactctgtctttcctcaagcggcagcgcaaaggcctctgaactactggggacttcggaccgcttgtggggacccaggctccgcccttagtcccccaactctgagcccatgttctgcccccagcccaaaggggacaggcctcacctctacccaaaccctaggttcccggtcccgagtacagtctgtatcaaacccacgattttctccagctcagaacccagggctctgccccagtcgttagaatataggtctcttctcccagaatcccagccggccaatggaaacctcacgctgggtcctaattaccagtctttaaaggcccagcccctagaaacccaagctcctcctcggaaccgctcacctagagccagaccaacgttactcagggctcctcccagcttgtaggagctgaggtttcacccttaacccaaggagcacaggtcccacctccagcccgggagcctaggaccactcagcccctaggagtatatttccgcacttcagaattccatatcttgcgaatccaagctccctgccccaaataacttcagtcctgctccagaatttggaaatcctagtttcctctccttcgtatcccgagtctgggacacaaaactccgcccccagcctatgagcatcctgagccccgccctcttcctgacgaaactggccccggatcagagcaggacctcccttccgaccctctgggaacctcccagaggtccagcccatctcggagcatcccggaggaaatctgcagagggttaggagtgggtgacaagagcctgatctcttcctgttttgtacatagatttatttttcagttccaagaaagatgaatacattttg

SEQ ID NO: 337754 - DNA, 3138 bp, Homo sapiens
caatccctgagtatctcgggaaggaggtgtccggagccgcggacctagagatcccagaagccacagcgcagcggcccggcccgccactatttccaggctctgcggggcaggggtgggcccagactccacttcccggcgggtagtgcgaccctaggggcgggacttcatgtcccagcaggctccgggcggcgtgcgccgcggtgcctagtgtgggatgtaagcgcggaggtgggcgagggggaccgaggccaggactctccttggggtttgggggcttgacctgggtgcgctttctggacagactttacagccccgggggcacagtcgtagagagggggcggggcggccattggggctcctcattggggtgcttggggcgcaccccatcgggtaccgggcgtcccggaattgtgggggacaaaaaggctctgcagtctcggctgaggggtctcaccgacaaaagaggggaagccggccgccgcccaccgcccgccgccatggggctgaaggccgcccagaagacgctgttcccgctgcgctccatcgacgacgtggtgcgcctgtttgctgccgagctgggccgagaggagccggacctggtgctcctttccttggtgctgggcttcgtggagcattttctggctgtcaaccgcgtcatccctaccaacgttcccgagctcaccttccagcccagccccgcccccgacccgcctggcggcctcacctactttcccgtggccgacctgtctatcatcgccgccctctatgcccgcttcaccgcccagatccgaggcgccgtcgacctgtccctctatcctcgagaagggggtgtctccagccgtgagctggtgaagaaggtctccgatgtcatatggaacagcctcagccgctcctacttcaaggatcgggcccacatccagtccctcttcagcttcatcacaggcaccaaattggacagctccggtgtggcctttgctgtggttggggcctgccaggccctgggtctccgggatgtccacctcgccctgtctgaggatcatgcctgggtagtgtttgggcccaatggggagcagacagctgaggtcacctggcacggcaagggcaacgaggaccgcaggggccagacagtcaatgccggtgtggctgagcggagctggctgtacctgaaaggatcatacatgcgctgtgaccgcaagatggaggtggcgttcatggtgtgtgccatcaacccttccattgacctgcacaccgactcgctggagcttctgcagctgcagcagaagctgctctggctgctctatgacctgggacatctggaaaggtaccccatggccttagggaacctggcagatctagaggagctggagcccacccctggccggccagacccactcaccctctaccacaagggcattgcctcagccaagacctactatcgggatgaacacatctacccctacatgtacctggctggctaccactgtcgcaaccgcaatgtgcgggaagccctgcaggcctgggcggacacggccactgtcatccaggactacaactactgccgggaagacgaggagatctacaaggagttctttgaagtagccaatgatgtcatccccaacctgctgaaggaggcagccagcttgctggaggcgggcgaggagcggccgggggagcaaagccagggcacccagagccaaggttccgccctccaggaccctgagtgcttcgcccacctgctgcgattctacgacggcatctgcaaatgggaggagggcagtcccacgcctgtgctgcacgtgggctgggccacctttcttgtgcagtccctaggccgttttgagggacaggtgcggcagaaggtgcgcatagtgagccgagaggccgaggcggccgaggccgaggagccgtggggcgaggaagcccgggaaggccggcggcggggcccacggcgggagtccaagccagaggagcccccgccgcccaagaagccagcactggacaagggcctgggcaccggccagggtgcagtgtcaggacccccccggaagcctcctgggactgtcgctggcacagcccgaggccctgaaggtggcagcacggctcaggtgccagcacccgcagcatcaccaccgccggagggtccagtgctcactttccagagtgagaagatgaagggcatgaaggagctgctggtggccaccaagatcaactcgagcgccatcaagctgcaactcacggcacagtcgcaagtgcagatgaagaagcagaaagtgtccacccctagtgactacactctgtctttcctcaagcggcagcgcaaaggcctctgaactactggggacttcggaccgcttgtggggacccaggctccgcccttagtcccccaactctgagcccatgttctgcccccagcccaaaggggacaggcctcacctctacccaaaccctaggttcccggtcccgagtacagtctgtatcaaacccacgattttctccagctcagaacccagggctctgccccagtcgttagaatataggtctcttctcccagaatcccagccggccaatggaaacctcacgctgggtcctaattaccagtctttaaaggcccagcccctagaaacccaagctcctcctcggaaccgctcacctagagccagaccaacgttactcagggctcctcccagcttgtaggagctgaggtttcacccttaacccaaggagcacaggtcccacctccagcccgggagcctaggaccactcagcccctaggagtatatttccgcacttcagaattccatatcttgcgaatccaagctccctgccccaaataacttcagtcctgctccagaatttggaaatcctagtttcctctccttcgtatcccgagtctgggacacaaaactccgcccccagcctatgagcatcctgagccccgccctcttcctgacgaaactggccccggatcagagcaggacctcccttccgaccctctgggaacctcccagaggtccagcccatctcggagcatcccggaggaaatctgcagagggttaggagtgggtgacaagagcctgatctcttcctgttttgtacatagatttatttttcagttccaagaaagatgaatacattttg

SEQ ID NO: 337755 - DNA, 3145 bp, Homo sapiens
tatatttatgtatatgcacatacacacaaaattaggcgggagtggtggcgcacgcctgtgatcacagctactcgggaggctgaggcacgagaatcgcttgagcccgtgaagtcgaggctgcagtgagcccagatcgagccactgcattccagcctgggcgaaagagaaagaccgtgtctcaaaacaaacaaacaaaagctactcttagcacgtgttagagtatctcgcgggcggaagtgggaaacgagtgctgcacacagagtaggcatctttatatgttaacagacactgatacccagctaaagcggctgaacacatttactctctggcagtgtttaaaagtatctgtttttctcatattgttttattttaattttttctggatcaagcaacctgatctttttcctcataacttgccgaccgacccgtgacagcaaaaccggcagaagctcggcgacctcccaccccgagtctgcaggtagccgccgcccaccgcccgccgccatggggctgaaggccgcccagaagacgctgttcccgctgcgctccatcgacgacgtggtgcgcctgtttgctgccgagctgggccgagaggagccggacctggtgctcctttccttggtgctgggcttcgtggagcattttctggctgtcaaccgcgtcatccctaccaacgttcccgagctcaccttccagcccagccccgcccccgacccgcctggcggcctcacctactttcccgtggccgacctgtctatcatcgccgccctctatgcccgcttcaccgcccagatccgaggcgccgtcgacctgtccctctatcctcgagaagggggtgtctccagccgtgagctggtgaagaaggtctccgatgtcatatggaacagcctcagccgctcctacttcaaggatcgggcccacatccagtccctcttcagcttcatcacaggcaccaaattggacagctccggtgtggcctttgctgtggttggggcctgccaggccctgggtctccgggatgtccacctcgccctgtctgaggatcatgcctgggtagtgtttgggcccaatggggagcagacagctgaggtcacctggcacggcaagggcaacgaggaccgcaggggccagacagtcaatgccggtgtggctgagcggagctggctgtacctgaaaggatcatacatgcgctgtgaccgcaagatggaggtggcgttcatggtgtgtgccatcaacccttccattgacctgcacaccgactcgctggagcttctgcagctgcagcagaagctgctctggctgctctatgacctgggacatctggaaaggtaccccatggccttagggaacctggcagatctagaggagctggagcccacccctggccggccagacccactcaccctctaccacaagggcattgcctcagccaagacctactatcgggatgaacacatctacccctacatgtacctggctggctaccactgtcgcaaccgcaatgtgcgggaagccctgcaggcctgggcggacacggccactgtcatccaggactacaactactgccgggaagacgaggagatctacaaggagttctttgaagtagccaatgatgtcatccccaacctgctgaaggaggcagccagcttgctggaggcgggcgaggagcggccgggggagcaaagccagggcacccagagccaaggttccgccctccaggaccctgagtgcttcgcccacctgctgcgattctacgacggcatctgcaaatgggaggagggcagtcccacgcctgtgctgcacgtgggctgggccacctttcttgtgcagtccctaggccgttttgagggacaggtgcggcagaaggtgcgcatagtgagccgagaggccgaggcggccgaggccgaggagccgtggggcgaggaagcccgggaaggccggcggcggggcccacggcgggagtccaagccagaggagcccccgccgcccaagaagccagcactggacaagggcctgggcaccggccagggtgcagtgtcaggacccccccggaagcctcctgggactgtcgctggcacagcccgaggccctgaaggtggcagcacggctcaggtgccagcacccgcagcatcaccaccgccggagggtccagtgctcactttccagagtgagaagatgaagggcatgaaggagctgctggtggccaccaagatcaactcgagcgccatcaagctgcaactcacggcacagtcgcaagtgcagatgaagaagcagaaagtgtccacccctagtgactacactctgtctttcctcaagcggcagcgcaaaggcctctgaactactggggacttcggaccgcttgtggggacccaggctccgcccttagtcccccaactctgagcccatgttctgcccccagcccaaaggggacaggcctcacctctacccaaaccctaggttcccggtcccgagtacagtctgtatcaaacccacgattttctccagctcagaacccagggctctgccccagtcgttagaatataggtctcttctcccagaatcccagccggccaatggaaacctcacgctgggtcctaattaccagtctttaaaggcccagcccctagaaacccaagctcctcctcggaaccgctcacctagagccagaccaacgttactcagggctcctcccagcttgtaggagctgaggtttcacccttaacccaaggagcacaggtcccacctccagcccgggagcctaggaccactcagcccctaggagtatatttccgcacttcagaattccatatcttgcgaatccaagctccctgccccaaataacttcagtcctgctccagaatttggaaatcctagtttcctctccttcgtatcccgagtctgggacacaaaactccgcccccagcctatgagcatcctgagccccgccctcttcctgacgaaactggccccggatcagagcaggacctcccttccgaccctctgggaacctcccagaggtccagcccatctcggagcatcccggaggaaatctgcagagggttaggagtgggtgacaagagcctgatctcttcctgttttgtacatagatttatttttcagttccaagaaagatgaatacattttg

SEQ ID NO: 337756 - DNA, 3017 bp, Homo sapiens
tatatttatgtatatgcacatacacacaaaattaggcgggagtggtggcgcacgcctgtgatcacagctactcgggaggctgaggcacgagaatcgcttgagcccgtgaagtcgaggctgcagtgagcccagatcgagccactgcattccagcctgggcgaaagagaaagaccgtgtctcaaaacaaacaaacaaaagctactcttagcacgtgttagagtatctcgcgggcggaagtgggaaacgagtgctgcacacagacaacctgatctttttcctcataacttgccgaccgacccgtgacagcaaaaccggcagaagctcggcgacctcccaccccgagtctgcaggtagccgccgcccaccgcccgccgccatggggctgaaggccgcccagaagacgctgttcccgctgcgctccatcgacgacgtggtgcgcctgtttgctgccgagctgggccgagaggagccggacctggtgctcctttccttggtgctgggcttcgtggagcattttctggctgtcaaccgcgtcatccctaccaacgttcccgagctcaccttccagcccagccccgcccccgacccgcctggcggcctcacctactttcccgtggccgacctgtctatcatcgccgccctctatgcccgcttcaccgcccagatccgaggcgccgtcgacctgtccctctatcctcgagaagggggtgtctccagccgtgagctggtgaagaaggtctccgatgtcatatggaacagcctcagccgctcctacttcaaggatcgggcccacatccagtccctcttcagcttcatcacaggcaccaaattggacagctccggtgtggcctttgctgtggttggggcctgccaggccctgggtctccgggatgtccacctcgccctgtctgaggatcatgcctgggtagtgtttgggcccaatggggagcagacagctgaggtcacctggcacggcaagggcaacgaggaccgcaggggccagacagtcaatgccggtgtggctgagcggagctggctgtacctgaaaggatcatacatgcgctgtgaccgcaagatggaggtggcgttcatggtgtgtgccatcaacccttccattgacctgcacaccgactcgctggagcttctgcagctgcagcagaagctgctctggctgctctatgacctgggacatctggaaaggtaccccatggccttagggaacctggcagatctagaggagctggagcccacccctggccggccagacccactcaccctctaccacaagggcattgcctcagccaagacctactatcgggatgaacacatctacccctacatgtacctggctggctaccactgtcgcaaccgcaatgtgcgggaagccctgcaggcctgggcggacacggccactgtcatccaggactacaactactgccgggaagacgaggagatctacaaggagttctttgaagtagccaatgatgtcatccccaacctgctgaaggaggcagccagcttgctggaggcgggcgaggagcggccgggggagcaaagccagggcacccagagccaaggttccgccctccaggaccctgagtgcttcgcccacctgctgcgattctacgacggcatctgcaaatgggaggagggcagtcccacgcctgtgctgcacgtgggctgggccacctttcttgtgcagtccctaggccgttttgagggacaggtgcggcagaaggtgcgcatagtgagccgagaggccgaggcggccgaggccgaggagccgtggggcgaggaagcccgggaaggccggcggcggggcccacggcgggagtccaagccagaggagcccccgccgcccaagaagccagcactggacaagggcctgggcaccggccagggtgcagtgtcaggacccccccggaagcctcctgggactgtcgctggcacagcccgaggccctgaaggtggcagcacggctcaggtgccagcacccgcagcatcaccaccgccggagggtccagtgctcactttccagagtgagaagatgaagggcatgaaggagctgctggtggccaccaagatcaactcgagcgccatcaagctgcaactcacggcacagtcgcaagtgcagatgaagaagcagaaagtgtccacccctagtgactacactctgtctttcctcaagcggcagcgcaaaggcctctgaactactggggacttcggaccgcttgtggggacccaggctccgcccttagtcccccaactctgagcccatgttctgcccccagcccaaaggggacaggcctcacctctacccaaaccctaggttcccggtcccgagtacagtctgtatcaaacccacgattttctccagctcagaacccagggctctgccccagtcgttagaatataggtctcttctcccagaatcccagccggccaatggaaacctcacgctgggtcctaattaccagtctttaaaggcccagcccctagaaacccaagctcctcctcggaaccgctcacctagagccagaccaacgttactcagggctcctcccagcttgtaggagctgaggtttcacccttaacccaaggagcacaggtcccacctccagcccgggagcctaggaccactcagcccctaggagtatatttccgcacttcagaattccatatcttgcgaatccaagctccctgccccaaataacttcagtcctgctccagaatttggaaatcctagtttcctctccttcgtatcccgagtctgggacacaaaactccgcccccagcctatgagcatcctgagccccgccctcttcctgacgaaactggccccggatcagagcaggacctcccttccgaccctctgggaacctcccagaggtccagcccatctcggagcatcccggaggaaatctgcagagggttaggagtgggtgacaagagcctgatctcttcctgttttgtacatagatttatttttcagttccaagaaagatgaatacattttg

SEQ ID NO: 337757 - DNA, 3442 bp, Homo sapiens
caatccctgagtatctcgggaaggaggtgtccggagccgcggacctagagatcccagaagccacagcgcagcggcccggcccgccactatttccaggctctgcggggcaggggtgggcccagactccacttcccggcgggtagtgcgaccctaggggcgggacttcatgtcccagcaggctccgggcggcgtgcgccgcggtgcctagtgtgggatgtaagcgcgccgccgcccaccgcccgccgccatggggctgaaggccgcccagaagacgctgttcccgctgcgctccatcgacgacgtggtgcgcctgtttgctgccgagctgggccgagaggagccggacctggtgctcctttccttggtgctgggcttcgtggagcattttctggctgtcaaccgcgtcatccctaccaacgttcccgagctcaccttccagcccagccccgcccccgacccgcctggcggcctcacctactttcccgtggccgacctgtctatcatcgccgccctctatgcccgcttcaccgcccagatccgaggcgccgtcgacctgtccctctatcctcgagaagggggtgtctccagccgtgagctggtgaagaaggtctccgatgtcatatggaacagcctcagccgctcctacttcaaggatcgggcccacatccagtccctcttcagcttcatcacaggcaccaaattggacagctccggtgtggcctttgctgtggttggggcctgccaggccctgggtctccgggatgtccacctcgccctgtctgaggatcatgcctgggtagtgtttgggcccaatggggagcagacagctgaggtcacctggcacggcaagggcaacgaggaccgcaggggccagacagtcaatgccggtgtggctgagcgggtattgttccctccccccagccttgtccccttcatactgtagtagcccaagccacccaagggactccattttcttgggccacacccctttcttcccatcaccacccacataggaagggaagacagaagagccccttttcctggctgtcattccctgaagcaggcacagggtgggccatcatgagacataatgatctcatccccccctaagagctggctgtacctgaaaggatcatacatgcgctgtgaccgcaagatggaggtggcgttcatggtgtgtgccatcaacccttccattgacctgcacaccgactcgctggagcttctgcagctgcagcagaagctgctctggctgctctatgacctgggacatctggaaaggtaccccatggccttagggaacctggcagatctagaggagctggagcccacccctggccggccagacccactcaccctctaccacaagggcattgcctcagccaagacctactatcgggatgaacacatctacccctacatgtacctggctggctaccactgtcgcaaccgcaatgtgcgggaagccctgcaggcctgggcggacacggccactgtcatccaggagtgaggatccccctactagggcctgcagcctgtcctttcttcccctccatcagtttccaaccaccctcgtccaggactgaggcctggctcccacgccccatcccctttccatccagtccctaggcagcaaggccaccattacccaggaggtagggaccctgattaaggtgtcacatctttccctccctcccctctcctcctaattttttttttctcagaacagtctcaaatctccaatgtttaaccaccatcatccagcagtgggacttccaccctcggccccatgcccccctcctcattcttgctttcttcctctgggctgacccagacagcatcattttgcactacaactactgccgggaagacgaggagatctacaaggagttctttgaagtagccaatgatgtcatccccaacctgctgaaggaggcagccagcttgctggaggcgggcgaggagcggccgggggagcaaagccagggcacccagagccaaggttccgccctccaggaccctgagtgcttcgcccacctgctgcgattctacgacggcatctgcaaatgggaggagggcagtcccacgcctgtgctgcacgtgggctgggccacctttcttgtgcagtccctaggccgttttgagggacaggtgcggcagaaggtgcgcatagtgagccgagaggccgaggcggccgaggccgaggagccgtggggcgaggaagcccgggaaggccggcggcggggcccacggcgggagtccaagccagaggagcccccgccgcccaagaagccagcactggacaagggcctgggcaccggccagggtgcagtgtcaggacccccccggaagcctcctgggactgtcgctggcacagcccgaggccctgaaggtggcagcacggctcaggtgccagcacccgcagcatcaccaccgccggagggtccagtgctcactttccagagtgagaagatgaagggcatgaaggagctgctggtggccaccaagatcaactcgagcgccatcaagctgcaactcacggcacagtcgcaagtgcagatgaagaagcagaaagtgtccacccctagtgactacactctgtctttcctcaagcggcagcgcaaaggcctctgaactactggggacttcggaccgcttgtggggacccaggctccgcccttagtcccccaactctgagcccatgttctgcccccagcccaaaggggacaggcctcacctctacccaaaccctaggttcccggtcccgagtacagtctgtatcaaacccacgattttctccagctcagaacccagggctctgccccagtcgttagaatataggtctcttctcccagaatcccagccggccaatggaaacctcacgctgggtcctaattaccagtctttaaaggcccagcccctagaaacccaagctcctcctcggaaccgctcacctagagccagaccaacgttactcagggctcctcccagcttgtaggagctgaggtttcacccttaacccaaggagcacaggtcccacctccagcccgggagcctaggaccactcagcccctaggagtatatttccgcacttcagaattccatatcttgcgaatccaagctccctgccccaaataacttcagtcctgctccagaatttggaaatcctagtttcctctccttcgtatcccgagtctgggacacaaaactccgcccccagcctatgagcatcctgagccccgccctcttcctgacgaaactggccccggatcagagcaggacctcccttccgaccctctgggaacctcccagaggtccagcccatctcggagcatcccggaggaaatctgcagagggttaggagtgggtgacaagagcctgatctcttcctgttttgtacatagatttatttttcagttccaagaaagatgaatacattttg

SEQ ID NO: 337758 - DNA, 1328 bp, Homo sapiens
  misc_feature (1162)..(1162): n is a, c, g, or t
  misc_feature (1175)..(1175): n is a, c, g, or t
  misc_feature (1197)..(1197): n is a, c, g, or t
caatccctgagtatctcgggaaggaggtgtccggagccgcggacctagagatcccagaagccacagcgcagcggcccggcccgccactatttccaggctctgcggggcaggggtgggcccagactccacttcccggcgggtagtgcgaccctaggggcgggacttcatgtcccagcaggctccgggcggcgtgcgccgcggtgcctagtgtgggatgtaagcgcggaggtgggcgagggggaccgaggccaggactctccttggggtttgggggcttgacctgggtgcgctttctggacagactttacagccccgggggcacagtcgtagagagggggcggggcggccattggggctcctcattggggtgcttggggcgcaccccatcgggtaccgggcgtcccggaattgtgggggacaaaaaggctctgcagtctcggctgaggggtctcaccgacaaaagaggggaagccggccgccgcccaccgcccgccgccatggggctgaaggccgcccagaagacgctgttcccgctgcgctccatcgacgacgtggtgcgcctgtttgctgccgagctgggccgagaggagccggacctggtgctcctttccttggtgctgggcttcgtggagcattttctggctgtcaaccgcgtcatccctaccaacgttcccgagctcaccttccagcccagccccgcccccgacccgcctggcggcctcacctactttcccgtggccgacctgtctatcatcgccgccctctatgcccgcttcaccgcccagatccgaggcgccgtcgacctgtccctctatcctcgagaagggggtgtctccagccgtgagctggtgaagaaggtctccgatgtcatatggaacagcctcagccgctcctacttcaaggatcgggcccacatccagtccctcttcagcttcatcacaggcaccaaattggacagctccggtgtggcctttgctgtggttggggcctgccaggccctgggtctccgggatgtccacctcgccctgtctgaggatcatgcctgggtagtgtttgggcccaatggggagcagacagctgaggtcacctggcacggcaagggcaacgaggaccgcaggggccagacagtcaatgccggtgtggctgagcggagctgggtgtnctgaagggtcatnatgcgctgtgaccgagaggagnggggtccaggggtgtgcaaaacctcatgaacgggaacgatcgttgagcttggatggcaaaatgtcggtgccataccggcttgacgcccggctggacgggattagagtggcccgggaacctacccaaggtgc

SEQ ID NO: 337759 - DNA, 3919 bp, Homo sapiens
agctcagtgcccagcatgtctgtggtgagtgtgtagttcaggaagtgaactggcaaaactgagtatcaccctctcttcctgggttcttgccactcccctgaaaaccagggtagcattgtcacatcagatagctccgctacgtgtgcgctgaccatgctgagatgggcactgtggactcagcctctggtcattgctggaaccagcggcctccatgtgaggtacaggggaacgcactgctagcagatggttgggatgtggacactcgtcctgccctcttggcttggtgctgtgccatcgcacagtcattcgctgtttagcatgcatgggagagagtgaagcacaagggcccaggcccctgggagtgcctgccctcaatttggaagagcccttgggcacagcataggcgcctggcagaattggactgggccatgatccagggcattgggacctcacctaggagttggggttctggtcagaagccctgtggagacagggtctcccctgtgggcaccaaactgacctcaaactgctggttctttggccctggggacagggctggttgaagtactctcccggcagctgtcacctgcagggagaggtgggggtaggggtgctgtgtttcttagctgttcctcgttgcagtgttaaatccctgcaggttccttattctcagcttgtgttgtgagtttcagtgttgggggctaatgtgggtttgcgtttttggtcttggttttcccagtggccagtccatcagccactgcactgggggccaggtagaggccaactgcaccctgcctgccagagtagaaatactggtaggccccaggctctgctgccccttccatgtccttgtgtaagcatccatggacaaagctgactcacggggtgtgcacagctgcagggaggccaggaaacaggggttttattctagagggccttgtgctcagtgacagaccagagtcccatcactgagagagcagggctggggcagcacaaaggactggagagcatttgccatgatgccatgtgcacagccagtgcaagtccttcattgtagctgtggtcagaggtcatgagacactgccttcagcagccctgggagtccacctggtgtgtggttagagctgtgcatctgcagatttcagaaggacttacgtttggtgaggtgctttgaagtaacacttcacaaataccaagaagcaagaaatacacaaataagcaggtaatggttctttggtgtttacattagctagtgggcaacggttctttggtgttcacattagctatagtcccagaactcagtccatgaggtggaatcacaaaaatggaattcatttctggctgtcagtacacaaactgatttaagatatcaccttgaattttaagctgacaaacagtgatctaaactgaatttcactgattgccccacctgaaagtcagacctgatagataatgccctcccttaactcaaggccagcagcagatgtgttagaggggacccttgtgcctcgcagccctcatctcctaatggctgtggggtcactgtgtcgagttgtaatgcctaatgagctcctctaaaaacatcctgaaacttgtgtaaaaaaaacagcagactcccagtggaactcgccttcagatgcagcccagaataagagttctagaatgtgtgtgccatccttttgtctcaatctgcatgattgcaagtctcttcaacatgattgggtgcgtggagtgtctcggtcatgtgtcttcccctctgagcatgccttttgattcgcacctgtgtcacaattgtgccagcctgtgagatgtgtctgcctgtcaccagtatcggcacatttagttttccctttacgtgagttttggtaaaatagtgacaaaatgtaatgcagtgctcagtcacagaaaaatgtcaggcctacagaaatggagcatttggctggcgggtagcgtgatgaccataggctttatttggctggtgtggtaaacaagcagcagcttgtgcaggtgagaataaatggccatattgcatttcattttaaggactcccttaaaatgaaaatcttcgtgtgggacatgaacacaggctttcacgaaattgatcatctacactatatgtatgactgttgaaaggctgttgttcctcagaaattcttaaaatgttatgtaatgtacatgagtcccttcaggaagtcatcagctttgttcagtttcctcagattagatagtaaaactgagattatgaactataaagatgtgtgtaatttatctgtcagtgaacttgactttaataaaagctttttgaaaaagaactctgggtggggtgcattggctcacacacatagtcccaactactgtggaggtcagggcaggaggatcactggagcccaagagttcaagatcagcctgggcaggatagcgagaccctgtctatagaaaatattaaaaatcagctaggcatggtggcttgcccttgcattccctgccacttgggaggctgaggtgggaggttcgcttgagcccaggagctcaaggctgcaatgggctgtgatcgaaccactgaattccaacctgggtgacagagtgaggccctgtctcaaaaagagaactctcgatgtcactggctttccatgtaagcagagcacatcatgtgagccccattcgtggatgtcagtcagcagaacagaatcttggacctggagcttgtttgtcctgtgctagaggttggaggtgtctctgtctttctgttggttcctgtcagttcaggtcacttagagattctgttacatacaccagctctgacaggttgggggagatgatcaaccttccgcctgcgcctgttcccttccctgactcatgccaaagtatccctgagatctgcaagggaccgaggacagtactggctggtggtctgggtacaggccacagaggcatctggaccccatgtgcatctggaccagtttggttggatccattcatggacacaaaacggatgtgaactcacagagctacattttctccctgcccctgttcaggcacagtgaggtgtcggggaatgtagctgccagagttgactgtcccgttctttggtgtaatgcctgaaggccacctttaccattggtctgtggtcctcactgaagaaagaaacattcttcctaaaagactttttttcctcagagttggagcccacagcgtggtcaggaaagagaagtagccactggtggctcctggcatcctcctgctgggcagccccttctcaaagtgtgaggggtccccttgtgtacaagcaggaaggctctgagaaagtcaggtttgctcctaccacaggataattccgatgaacctgaaaagcgggttttggcttgtgtgcagggactctggtggaagaaagggtgacagcacctggcctgggcatgacacaagttaggacccgtaccaagaggccctggaattgagggtgggggttgctgtggactctttctccctcttaggaaactctattgggtctccatctgtcacagaagcagtaaatgatgtaggggctgccaggtatagggtcctgtggggatgctggaacatgccgaggcaggacgtgccagccaccctctgcccatatgtgcagcagggccacagatgtgcttgtcggtaggagagaccaagctgtctgtgtgccgatgtcttgacacctgagacttcaggttcacccatcctggttctgccattccattgcagggtggcttccctcctttggggactcttaacgctttggtctgttaaaaaaaaaaaaaaaaaatccgggcgtggtggctcactcctgtaatcccagcactttgggaggccgaggtgggctgatcatctgaggtcaggggttcgaggccagccctgaccaacatggtgaaaccccgtctctactaaaaat

SEQ ID NO: 337760 - DNA, 1757 bp, Homo sapiens
gggctagtacgaggctggtttagtgggaaaaccaacgcctggctcggagcagcagcctctgaggtgtccctggccagtgtccttccacctgtccacaagcatggggaacatcttcgccaacctcttcaagggcctttttggcaaaaaagaaatgcgcatcctcatggtgggcctggatgctgcagggaagaccacgatcctctacaagcttaagctgggtgagatcgtgaccaccattcccaccataggcttcaacgtggaaaccgtggagtacaagaacatcagcttcactgtgtgggacgtgggtggccaggacaagatccggcccctgtggcgccactacttccagaacacacaaggcctgatcttcgtggtggacagcaatgacagagagcgtgtgaacgaggcccgtgaggagctcatgaggatgctggccgaggacgagctccgggatgctgtcctcctggtgttcgccaacaagcaggacctccccaacgccatgaatgcggccgagatcacagacaagctggggctgcactcactacgccacaggaactggtacattcaggccacctgcgccaccagcggcgacgggctctatgaaggactggactggctgtccaatcagctccggaaccagaagtgaacgcgacccccctccctctcactcctcttgccctctgctttactctcatgtggcaaacgtgcggctcgtggtgtgagtgccagaagctgcctccgtggtttggtcaccgtgtgcatcgcaccgtgctgtaaatgtggcagacgcagcctgcggccaggctttttatttaatgtaaatagtttttgtttccaatgaggcagtttctggtactcctatgcaatattactcagctttttttattgtaaaaagaaaaatcaactcactgttcagtgctgagaggggatgtaggcccatgggcacctggcctccaggagtcgctgtgttgggagagccggccacgcccttggctttagagctgtgttgaaatccattttggtggttggtttttaacccaaactcagtgcattttttaaaatagttaagaatccaagtcgagaacacttgaacacacagaagggagaccccgcctagcatagatttgcagttacggcctggatgccagtcgccagcccagctgttcccctcgggaacatgaggtggtggtggcgcagcagactgcgatcaattctgcatggtcacagtagagatccccgcaactcgcttgtccttgggtcaccctgcattccatagccatgtgcttgtccctgtgctcccacggttcccaggggccaggctgggagcccacagccaccccactatgccgcaggccgccctacccaccttcaggcagcctatgggacgcagggccccatctgtccctcggtcgccgtgtggccagagtgggtccgtcgtccccaacactcgtgctcgctcagacactttggcaggatgtctggggcctcaccagcaggagcgcgtgcaagccgggcaggcggtccacctagacccacagcccctcgggagcaccccacctctgtgtgtgatgtagctttctctccctcagcctgcaagggtccgatttgccatcgaaaaagacaacctctacttttttcttttgtattttgataaacactgaagctggagctgttaaatttatcttggggaaacctcagaactggtctatttggtgtcgtggaacctcttactgctttcaatacacgattagtaatca

SEQ ID NO: 337761 - DNA, 689 bp, Homo sapiens
gcgcttaggcgtgtcgtacgtgtgcctctgtggtgtagcaagtagagcgctcaggcgtctcttctgtgtcttacggatgcgatggctagactcgctgcgcccgctgcttacggggatagcgtccttcaacgcctccgggctgatctctgtgagtcgaccgtgcatgaccatgagagcgtgtgactgagcgccgtatacactctgatggactgctgagccagcccagcgagctccgggatgctgtcctcctggtgttcgccaacaagcaggacctccccaacgccatgaatgcggccgagatcacagacacactttggcaggatgtctggggcctcaccagcaggagcgcgtgcaagccgggcaggcggtccacctagacccacagcccctcgggagcaccccacctctgtgtgtgatgtagctttctctccctcagcctgcaagggtccgatttgccatcgaaaaagacaacctctacttttttcttttgtattttgataaacactgaagctggagctgttaaatttatcttggggaaacctcagaactggtctatttggtgtcgtggaacctcttactgctttcaatacacgattagtaatcaactgttttgtatacttgttttcagttttcatttcgacaaacaagcactgtaattatagctattagaataaaatctcttaactatt

SEQ ID NO: 337762 - DNA, 1067 bp, Homo sapiens
  misc_feature (833)..(833): n is a, c, g, or t
  misc_feature (845)..(845): n is a, c, g, or t
  misc_feature (851)..(851): n is a, c, g, or t
  misc_feature (861)..(862): n is a, c, g, or t
aaaaacaaatagctagtcagcctggtgtaaatcggacgaggagaaacaagcactggctcggagcagcagcctctgaggtgtccctggccagtgtccttccacctgtccacaagcatggggaacatcttcgccaacctcttcaagggcctttttggcaaaaaagaaatgcgcatcctcatggtgggcctggatgctgcagggaagaccacgatcctctacaagcttaagctgggtgagatcgtgaccaccattcccaccataggcttcaacgtggaaaccgtggagtacaagaacatcagcttcactgtgtgggacgtgggtggccaggacaagatccggcccctgtggcgccactacttccagaacacacaaggcctgatcttcgtggtggacagcaatgacagagagcgtgtgaacgaggcccgtgaggagctcatgaggatgctggccgaggacgagctccgggatgctgtcctcctggtgttcgccaacaagcaggacctccccaacgccatgaatgcggccgagatcacagacaagctggggctgcactcactacgccacaggaactggtacattcaggccacctgcgccaccagcggcgacgggctctatgaaggactggactggctgtccaatcagctccggaaccagaagtgaacgcgacccccctccctctcactcctcttgccctctgctttactctcatgtggcaaacgtgcggctcgtggtgtgagtgccagaagctgcctccgtggtttggtcaccgtgtgcatcgcaccgtgctgtaaatgtggcagacgcagcctgcggccgggtttattatgtaatantttgttccatgngcagtncggtaccatnnaattattacttggtggtaagaaatcagcagtactcaaaggattagcagtacacgatacgacctgttgaagcgcacctgactaacagtgaccttgggtgttaccaccggctaagaactaaccggacagaacagaccataagagagtgcactcccagagagaaaaataacttctcttcctccttaccctcctctcccaaatcaagaa

SEQ ID NO: 337763 - DNA, 1891 bp, Homo sapiens
tccgccccttacccggcgtgccccgcgcccggaggcgctgacgtggccgccgtcagagccgccatcttgtgggagcaaaaccaacgcctggctcggagcagcagcctctgaggtgtccctggccagtgtccttccacctgtccacaagcatggggaacatcttcgccaacctcttcaagggcctttttggcaaaaaagaaatgcgcatcctcatggtgggcctggatgctgcagggaagaccacgatcctctacaagcttaagctgggtgagatcgtgaccaccattcccaccataggcttcaacgtggaaaccgtggagtacaagaacatcagcttcactgtgtgggacgtgggtggccaggacaagatccggcccctgtggcgccactacttccagaacacacaaggcctgatcttcgtggtggacagcaatgacagagagcgtgtgaacgaggcccgtgaggagctcatgaggatgctggccgaggacgagctccgggatgctgtcctcctggtgttcgccaacaagcaggacctccccaacgccatgaatgcggccgagatcacagacaagctggggctgcactcactacgccacaggaactggtacattcaggccacctgcgccaccagcggcgacgggctctatgaaggactggactggctgtccaatcagctccggaaccagaagtgaacgcgacccccctccctctcactcctcttgccctctgctttactctcatgtggcaaacgtgcggctcgtggtgtgagtgccagaagctgcctccgtggtttggtcaccgtgtgcatcgcaccgtgctgtaaatgtggcagacgcagcctgcggccaggctttttatttaatgtaaatagtttttgtttccaatgaggcagtttctggtactcctatgcaatattactcagctttttttattgtaaaaagaaaaatcaactcactgttcagtgctgagaggggatgtaggcccatgggcacctggcctccaggagtcgctgtgttgggagagccggccacgcccttggctttagagctgtgttgaaatccattttggtggttggtttttaacccaaactcagtgcattttttaaaatagttaagaatccaagtcgagaacacttgaacacacagaagggagaccccgcctagcatagatttgcagttacggcctggatgccagtcgccagcccagctgttcccctcgggaacatgaggtggtggtggcgcagcagactgcgatcaattctgcatggtcacagtagagatccccgcaactcgcttgtccttgggtcaccctgcattccatagccatgtgcttgtccctgtgctcccacggttcccaggggccaggctgggagcccacagccaccccactatgccgcaggccgccctacccaccttcaggcagcctatgggacgcagggccccatctgtccctcggtcgccgtgtggccagagtgggtccgtcgtccccaacactcgtgctcgctcagacactttggcaggatgtctggggcctcaccagcaggagcgcgtgcaagccgggcaggcggtccacctagacccacagcccctcgggagcaccccacctctgtgtgtgatgtagctttctctccctcagcctgcaagggtccgatttgccatcgaaaaagacaacctctacttttttcttttgtattttgataaacactgaagctggagctgttaaatttatcttggggaaacctcagaactggtctatttggtgtcgtggaacctcttactgctttcaatacacgattagtaatcaactgttttgtatacttgttttcagttttcatttcgacaaacaagcactgtaattatagctattagaataaaatctcttaactatt

SEQ ID NO: 337764 - DNA, 1875 bp, Homo sapiens
aggcctgcgaggcgaattcgacacgaggaccaacgcctggctcggagcagcagcctctgaggtgtccctggccagtgtccttccacctgtccacaagcatggggaacatcttcgccaacctcttcaagggcctttttggcaaaaaagaaatgcgcatcctcatggtgggcctggatgctgcagggaagaccacgatcctctacaagcttaagctgggtgagatcgtgaccaccattcccaccataggcttcaacgtggaaaccgtggagtacaagaacatcagcttcactgtgtgggacgtgggtggccaggacaagatccggcccctgtggcgccactacttccagaacacacaaggcctgatcttcgtggtggacagcaatgacagagagcgtgtgaacgaggcccgtgaggagctcatgaggatgctggccgaggacgagctccgggatgctgtcctcctggtgttcgccaacaagcaggacctccccaacgccatgaatgcggccgagatcacagacaagctggggctgcactcactacgccacaggaactggtacattcaggccacctgcgccaccagcggcgacgggctctatgaaggactggactggctgtccaatcagctccggaaccagaagtgaacgcgacccccctccctctcactcctcttgccctctgctttactctcatgtggcaaacgtgcggctcgtggtgtgagtgccagaagctgcctccgtggtttggtcaccgtgtgcatcgcaccgtgctgtaaatgtggcagacgcagcctgcggccaggctttttatttaatgtaaatagtttttgtttccaatgaggcagtttctggtactcctatgcaatattactcagctttttttattgtaaaaagaaaaatcaactcactgttcagtgctgagaggggatgtaggcccatgggcacctggcctccaggagtcgctgtgttgggagagccggccacgcccttggctttagagctgtgttgaaatccattttggtggttggtttttaacccaaactcagtgcattttttaaaatagttaagaatccaagtcgagaacacttgaacacacagaagggagaccccgcctagcatagatttgcagttacggcctggatgccagtcgccagcccagctgttcccctcgggaacatgaggtggtggtggcgcagcagactgcgatcaattctgcatggtcacagtagagatccccgcaactcgcttgtccttgggtcaccctgcattccatagccatgtgcttgtccctgtgctcccacggttcccaggggccaggctgggagcccacagccaccccactatgccgcaggccgccctacccaccttcaggcagcctatgggacgcagggccccatctgtccctcggtcgccgtgtggccagagtgggtccgtcgtccccaacactcgtgctcgctcagacactttggcaggatgtctggggcctcaccagcaggagcgcgtgcaagccgggcaggcggtccacctagacccacagcccctcgggagcaccccacctctgtgtgtgatgtagctttctctccctcagcctgcaagggtccgatttgccatcgaaaaagacaacctctacttttttcttttgtattttgataaacactgaagctggagctgttaaatttatcttggggaaacctcagaactggtctatttggtgtcgtggaacctcttactgctttcaatacacgattagtaatcaactgttttgtatacttgttttcagttttcatttcgacaaacaagcactgtaattatagctattagaataaaatctcttaactattagccagtagaaaaagggggcgacttaaagtattcc

SEQ ID NO: 337765 - DNA, 1868 bp, Homo sapiens
ccacaccacacaacaccgatgatgcagagtgcgggccgggttcattcagtgcgagggcgacacgctggctcggagcagcagcctctgaggtgtccctggccagtgtccttccacctgtccacaagcatggggaacatcttcgccaacctcttcaagggcctttttggcaaaaaagaaatgcgcatcctcatggtgggcctggatgctgcagggaagaccacgatcctctacaagcttaagctgggtgagatcgtgaccaccattcccaccataggcttcaacgtggaaaccgtggagtacaagaacatcagcttcactgtgtgggacgtgggtggccaggacaagatccggcccctgtggcgccactacttccagaacacacaaggcctgatcttcgtggtggacagcaatgacagagagcgtgtgaacgaggcccgtgaggagctcatgaggatgctggccgaggacgagctccgggatgctgtcctcctggtgttcgccaacaagcaggacctccccaacgccatgaatgcggccgagatcacagacaagctggggctgcactcactacgccacaggaactggtacattcaggccacctgcgccaccagcggcgacgggctctatgaaggactggactggctgtccaatcagctccggaaccagaagtgaacgcgacccccctccctctcactcctcttgccctctgctttactctcatgtggcaaacgtgcggctcgtggtgtgagtgccagaagctgcctccgtggtttggtcaccgtgtgcatcgcaccgtgctgtaaatgtggcagacgcagcctgcggccaggctttttatttaatgtaaatagtttttgtttccaatgaggcagtttctggtactcctatgcaatattactcagctttttttattgtaaaaagaaaaatcaactcactgttcagtgctgagaggggatgtaggcccatgggcacctggcctccaggagtcgctgtgttgggagagccggccacgcccttggctttagagctgtgttgaaatccattttggtggttggtttttaacccaaactcagtgcattttttaaaatagttaagaatccaagtcgagaacacttgaacacacagaagggagaccccgcctagcatagatttgcagttacggcctggatgccagtcgccagcccagctgttcccctcgggaacatgaggtggtggtggcgcagcagactgcgatcaattctgcatggtcacagtagagatccccgcaactcgcttgtccttgggtcaccctgcattccatagccatgtgcttgtccctgtgctcccacggttcccaggggccaggctgggagcccacagccaccccactatgccgcaggccgccctacccaccttcaggcagcctatgggacgcagggccccatctgtccctcggtcgccgtgtggccagagtgggtccgtcgtccccaacactcgtgctcgctcagacactttggcaggatgtctggggcctcaccagcaggagcgcgtgcaagccgggcaggcggtccacctagacccacagcccctcgggagcaccccacctctgtgtgtgatgtagctttctctccctcagcctgcaagggtccgatttgccatcgaaaaagacaacctctacttttttcttttgtattttgataaacactgaagctggagctgttaaatttatcttggggaaacctcagaactggtctatttggtgtcgtggaacctcttactgctttcaatacacgattagtaatcaactgttttgtatacttgttttcagttttcatttcgacaaacaagcactgtaattatagctattagaataaaatctcttaactatt

SEQ ID NO: 337766 - DNA, 2213 bp, Homo sapiens
aggcctgcgaggcgaattcgacacgaggaccaacgcctggctcggagcagcagcctctgaggtgtccctggccagtgtccttccacctgtccacaagcatggggaacatcttcgccaacctcttcaagggcctttttggcaaaaaagaaatgcgcatcctcatggtgggcctggatgctgcagggaagaccacgatcctctacaagcttaagctgggtgagatcgtgaccaccattcccaccataggcttcaacgtggaaaccgtggagtacaagaacatcagcttcactgtgtgggacgtgggtggccaggacaagatccggcccctgtggcgccactacttccagaacacacaaggcctgatcttcgtggtggacagcaatgacagagagcgtgtgaacgaggcccgtgaggagctcatgaggatgctggccgaggacgagctccgggatgctgtcctcctggtgttcgccaacaagcaggacctccccaacgccatgaatgcggccgagatcacagacaagctggggctgcactcactacgccacaggaactggtacattcaggccacctgcgccaccagcggcgacgggctctatgaaggactggactggctgtccaatcagctccggaaccagaagtgaacgcgacccccctccctctcactcctcttgccctctgctttactctcatgtggcaaacgtgcggctcgtggtgtgagtgccagaagctgcctccgtggtttggtcaccgtgtgcatcgcaccgtgctgtaaatgtggcagacgcagcctgcggccaggctttttatttaatgtaaatagtttttgtttccaatgaggcagtttctggtactcctatgcaatattactcagctttttttattgtaaaaagaaaaatcaactcactgttcagtgctgagaggggatgtaggcccatgggcacctggcctccaggagtcgctgtgttgggagagccggccacgcccttggctttagagctgtgttgaaatccattttggtggttggtttttaacccaaactcagtgcattttttaaaatagttaagaatccaagtcgagaacacttgaacacacagaagggagaccccgcctagcatagatttgcagttacggcctggatgccagtcgccagcccagctgttcccctcgggaacatgaggtggtggtggcgcagcagactgcgatcaattctgcatggtcacagtagagatccccgcaactcgcttgtccttgggtcaccctgcattccatagccatgtgcttgtccctgtgctcccacggttcccaggggccaggctgggagcccacagccaccccactatgccgcaggccgccctacccaccttcaggcagcctatgggacgcagggccccatctgtccctcggtcgccgtgtggccagagtgggtccgtcgtccccaacactcgtgctcgctcagacactttggcaggatgtctggggcctcaccagcaggagcgcgtgcaagccgggcaggcggtccacctagacccacagcccctcgggagcaccccacctctgtgtgtgatgtagctttctctccctcagcctgcaagggtccgatttgccatcgaaaaagacaacctctacttttttcttttgtattttgataaacactgaagctggagctgttaaatttatcttggggaaacctcagaactggtctatttggtgtcgtggaacctcttactgctttcaatacacgattagtaatcaactgttttgtatacttgttttcagttttcatttcgacaaacaagcactgtaattatagctattagaataaaatctcttaactattaaaaaagaaaaaaagaagaaaaaaaaaaaaaaagagaaaaaaaataaaagaaagaagaagacgaacaaaagaaagcagaacaacagaacgcgcggccgccgcggcgccgcgcgcgcgcggatccaggcacaagagcgtccattcaacagcaccctcatcaggtgcggagcaggcgagcgggggcccccgaatagcgacacggagaaatacccggttgagcagaacaacgggtgagttcacgcgcagagaaaccgcgcaagtgagaaggaagcagggggtagggaaggaggatcgacatcagcacacacagaaacgcaacgcagaggcggtcggtgggacagcgccacgacgcggcgtggcgccaaaaaaacag

SEQ ID NO: 337767 - DNA, 1887 bp, Homo sapiens
aggcctgcgaggcgaattcgacacgaggaccaacgcctggctcggagcagcagcctctgaggtgtccctggccagtgtccttccacctgtccacaagcatggggaacatcttcgccaacctcttcaagggcctttttggcaaaaaagaaatgcgcatcctcatggtgggcctggatgctgcagggaagaccacgatcctctacaagcttaagctgggtgagatcgtgaccaccattcccaccataggcttcaacgtggaaaccgtggagtacaagaacatcagcttcactgtgtgggacgtgggtggccaggacaagatccggcccctgtggcgccactacttccagaacacacaaggcctgatcttcgtggtggacagcaatgacagagagcgtgtgaacgaggcccgtgaggagctcatgaggatgctggccgaggacgagctccgggatgctgtcctcctggtgttcgccaacaagcaggacctccccaacgccatgaatgcggccgagatcacagacaagctggggctgcactcactacgccacaggaactggtacattcaggccacctgcgccaccagcggcgacgggctctatgaaggactggactggctgtccaatcagctccggaaccagaagtgaacgcgacccccctccctctcactcctcttgccctctgctttactctcatgtggcaaacgtgcggctcgtggtgtgagtgccagaagctgcctccgtggtttggtcaccgtgtgcatcgcaccgtgctgtaaatgtggcagacgcagcctgcggccaggctttttatttaatgtaaatagtttttgtttccaatgaggcagtttctggtactcctatgcaatattactcagctttttttattgtaaaaagaaaaatcaactcactgttcagtgctgagaggggatgtaggcccatgggcacctggcctccaggagtcgctgtgttgggagagccggccacgcccttggctttagagctgtgttgaaatccattttggtggttggtttttaacccaaactcagtgcattttttaaaatagttaagaatccaagtcgagaacacttgaacacacagaagggagaccccgcctagcatagatttgcagttacggcctggatgccagtcgccagcccagctgttcccctcgggaacatgaggtggtggtggcgcagcagactgcgatcaattctgcatggtcacagtagagatccccgcaactcgcttgtccttgggtcaccctgcattccatagccatgtgcttgtccctgtgctcccacggttcccaggggccaggctgggagcccacagccaccccactatgccgcaggccgccctacccaccttcaggcagcctatgggacgcagggccccatctgtccctcggtcgccgtgtggccagagtgggtccgtcgtccccaacactcgtgctcgctcagacactttggcaggatgtctggggcctcaccagcaggagcgcgtgcaagccgggcaggcggtccacctagacccacagcccctcgggagcaccccacctctgtgtgtgatgtagctttctctccctcagcctgcaagggtccgatttgccatcgaaaaagacaacctctacttttttcttttgtattttgataaacactgaagctggagctgttaaatttatcttggggaaacctcagaactggtctatttggtgtcgtggaacctcttactgctttcaatacacgattagtaatcaactgttttgtatacttgttttcagttttcatttcgacaaacaagcactgtaattatagctattagaataaaatctcttaactattcagacagtgaggaaatgctacggggtcagaggcatgtgtttttcgat

SEQ ID NO: 337768 - DNA, 1840 bp, Homo sapiens
aggcctgcgaggcgaattcgacacgaggaccaacgcctggctcggagcagcagcctctgaggtgtccctggccagtgtccttccacctgtccacaagcatggggaacatcttcgccaacctcttcaagggcctttttggcaaaaaagaaatgcgcatcctcatggtgggcctggatgctgcagggaagaccacgatcctctacaagcttaagctgggtgagatcgtgaccaccattcccaccataggcttcaacgtggaaaccgtggagtacaagaacatcagcttcactgtgtgggacgtgggtggccaggacaagatccggcccctgtggcgccactacttccagaacacacaaggcctgatcttcgtggtggacagcaatgacagagagcgtgtgaacgaggcccgtgaggagctcatgaggatgctggccgaggacgagctccgggatgctgtcctcctggtgttcgccaacaagcaggacctccccaacgccatgaatgcggccgagatcacagacaagctggggctgcactcactacgccacaggaactggtacattcaggccacctgcgccaccagcggcgacgggctctatgaaggactggactggctgtccaatcagctccggaaccagaagtgaacgcgacccccctccctctcactcctcttgccctctgctttactctcatgtggcaaacgtgcggctcgtggtgtgagtgccagaagctgcctccgtggtttggtcaccgtgtgcatcgcaccgtgctgtaaatgtggcagacgcagcctgcggccaggctttttatttaatgtaaatagtttttgtttccaatgaggcagtttctggtactcctatgcaatattactcagctttttttattgtaaaaagaaaaatcaactcactgttcagtgctgagaggggatgtaggcccatgggcacctggcctccaggagtcgctgtgttgggagagccggccacgcccttggctttagagctgtgttgaaatccattttggtggttggtttttaacccaaactcagtgcattttttaaaatagttaagaatccaagtcgagaacacttgaacacacagaagggagaccccgcctagcatagatttgcagttacggcctggatgccagtcgccagcccagctgttcccctcgggaacatgaggtggtggtggcgcagcagactgcgatcaattctgcatggtcacagtagagatccccgcaactcgcttgtccttgggtcaccctgcattccatagccatgtgcttgtccctgtgctcccacggttcccaggggccaggctgggagcccacagccaccccactatgccgcaggccgccctacccaccttcaggcagcctatgggacgcagggccccatctgtccctcggtcgccgtgtggccagagtgggtccgtcgtccccaacactcgtgctcgctcagacactttggcaggatgtctggggcctcaccagcaggagcgcgtgcaagccgggcaggcggtccacctagacccacagcccctcgggagcaccccacctctgtgtgtgatgtagctttctctccctcagcctgcaagggtccgatttgccatcgaaaaagacaacctctacttttttcttttgtattttgataaacactgaagctggagctgttaaatttatcttggggaaacctcagaactggtctatttggtgtcgtggaacctcttactgctttcaatacacgattagtaatcaactgttttgtatacttgttttcagttttcatttcgacaaacaagcatcaactaggtctagatcattatcattttgtcctttcttt

SEQ ID NO: 337769 - DNA, 1952 bp, Homo sapiens
aggcggaccaacatcgacggacgcatcaaagcagtgtgtagagggaaatttatagcactaaatgcccacaagagaaagcaggaaagatccaaaattgacaccctaacatcacaattaaaagaactagaaaagcaagagcaaacacattcaaaagctagcagaaggcaagaaataactaaaatcagagcagaactgaaggaaatagagacacaaaaaaccccaacttcgacactcttcaagggcctttttggcaaaaaagaaatgcgcatcctcatggtgggcctggatgctgcagggaagaccacgatcctctacaagcttaagctgggtgagatcgtgaccaccattcccaccataggcttcaacgtggaaaccgtggagtacaagaacatcagcttcactgtgtgggacgtgggtggccaggacaagatccggcccctgtggcgccactacttccagaacacacaaggcctgatcttcgtggtggacagcaatgacagagagcgtgtgaacgaggcccgtgaggagctcatgaggatgctggccgaggacgagctccgggatgctgtcctcctggtgttcgccaacaagcaggacctccccaacgccatgaatgcggccgagatcacagacaagctggggctgcactcactacgccacaggaactggtacattcaggccacctgcgccaccagcggcgacgggctctatgaaggactggactggctgtccaatcagctccggaaccagaagtgaacgcgacccccctccctctcactcctcttgccctctgctttactctcatgtggcaaacgtgcggctcgtggtgtgagtgccagaagctgcctccgtggtttggtcaccgtgtgcatcgcaccgtgctgtaaatgtggcagacgcagcctgcggccaggctttttatttaatgtaaatagtttttgtttccaatgaggcagtttctggtactcctatgcaatattactcagctttttttattgtaaaaagaaaaatcaactcactgttcagtgctgagaggggatgtaggcccatgggcacctggcctccaggagtcgctgtgttgggagagccggccacgcccttggctttagagctgtgttgaaatccattttggtggttggtttttaacccaaactcagtgcattttttaaaatagttaagaatccaagtcgagaacacttgaacacacagaagggagaccccgcctagcatagatttgcagttacggcctggatgccagtcgccagcccagctgttcccctcgggaacatgaggtggtggtggcgcagcagactgcgatcaattctgcatggtcacagtagagatccccgcaactcgcttgtccttgggtcaccctgcattccatagccatgtgcttgtccctgtgctcccacggttcccaggggccaggctgggagcccacagccaccccactatgccgcaggccgccctacccaccttcaggcagcctatgggacgcagggccccatctgtccctcggtcgccgtgtggccagagtgggtccgtcgtccccaacactcgtgctcgctcagacactttggcaggatgtctggggcctcaccagcaggagcgcgtgcaagccgggcaggcggtccacctagacccacagcccctcgggagcaccccacctctgtgtgtgatgtagctttctctccctcagcctgcaagggtccgatttgccatcgaaaaagacaacctctacttttttcttttgtattttgataaacactgaagctggagctgttaaatttatcttggggaaacctcagaactggtctatttggtgtcgtggaacctcttactgctttcaatacacgattagtaatcaactgttttgtatacttgttttcagttttcatttcgacaaacaagcactgtaattatagctattagaataaaatctcttaactatt

SEQ ID NO: 337770 - DNA, 2476 bp, Homo sapiens
aggcctgcgaggcgaattcgacacgaggaccaacgcctggctcggagcagcagcctctgaggtgtccctggccagtgtccttccacctgtccacaagcatggggaacatcttcgccaacctcttcaagggcctttttggcaaaaaagaaatgcgcatcctcatggtgggcctggatgctgcagggaagaccacgatcctctacaagcttaagctgggtgagatcgtgaccaccattcccaccataggcttcaacgtggaaaccgtggagtacaagaacatcagcttcactgtgtgggacgtgggtggccaggacaagatccggcccctgtggcgccactacttccagaacacacaaggcctgatcttcgtggtggacagcaatgacagagagcgtgtgaacgaggcccgtgaggagctcatgaggatgctggccgaggacgagctccgggatgctgtcctcctggtgttcgccaacaagcaggacctccccaacgccatgaatgcggccgagatcacagacaagctggggctgcactcactacgccacaggaactggtacattcaggccacctgcgccaccagcggcgacgggctctatgaaggactggactggctgtccaatcagctccggaaccagaagtgaacgcgacccccctccctctcactcctcttgccctctgctttactctcatgtggcaaacgtgcggctcgtggtgtgagtgccagaagctgcctccgtggtttggtcaccgtgtgcatcgcaccgtgctgtaaatgtggcagacgcagcctgcggccaggctttttatttaatgtaaatagtttttgtttccaatgaggcagtttctggtactcctatgcaatattactcagctttttttattgtaaaaagaaaaatcaactcactgttcagtgctgagaggggatgtaggcccatgggcacctggcctccaggagtcgctgtgttgggagagccggccacgcccttggctttagagctgtgttgaaatccattttggtggttggtttttaacccaaactcagtgcattttttaaaatagttaagaatccaagtcgagaacacttgaacacacagaagggagaccccgcctagcatagatttgcagttacggcctggatgccagtcgccagcccagctgttcccctcgggaacatgaggtggtggtggcgcagcagactgcgatcaattctgcatggtcacagtagagatccccgcaactcgcttgtccttgggtcaccctgcattccatagccatgtgcttgtccctgtgctcccacggttcccaggggccaggctgggagcccacagccaccccactatgccgcaggccgccctacccaccttcaggcagcctatgggacgcagggccccatctgtccctcggtcgccgtgtggccagagtgggtccgtcgtccccaacactcgtgctcgctcagacactttggcaggatgtctggggcctcaccagcaggagcgcgtgcaagccgggcaggcggtccacctagacccacagcccctcgggagcaccccacctctgtgtgtgatgtagctttctctccctcagcctgcaagggtccgatttgccatcgaaaaagacaacctctacttttttcttttgtattttgataaacactgaagctggagctgttaaatttatcaaaaaagaaaaaaagaagaaaaaaaaaaaaaaagggggggggggctaaaaaattttccccgggggggcccaaagttatatagcgcgcgtgtatccccaggtttttttgttgtctacaaaggggggctcccatatatataggaggaaggcgtcggatattatatataagcgcaaggagaaagggcgcggggaggttttaaaaaggtgtcggggagcgggggagaaaacgggagaagcgtggggagatctcttgtgggggagagagaggagccctatatatcttctgcggggaggggggggggaccatatatttggggagacaaattttactctataagagagaagattttaaagaggcttcaaagggggagaaatattataaaatttttaaaggggtggtatatgggtgtggtgtaaacccataagaggcgggaattatgtgggtgggagcggattggaagaaattttggggaataagcggagagttgtgtgaattatgtgaaacatcttttttattaccggggagcctttttttttattaaaaataaacaggggcgcagcggcgcaccaccgccacgcccgcgccgaacccgccacgccgcggcggccacgaaccagagcagagtgagcggccacagcgccggagccgccgagaaagacaccagacggacgaagcacaagaacacaaaacgcagaagagcaagacagtgcggagaagggacaacgaaggacacgagaacaacagaacaaaaccgcacaccacaacaaacaccaccccaagcacgacaacccagcc

SEQ ID NO: 337771 - DNA, 1814 bp, Homo sapiens
tgtagcatgcacttcgtgctcacacgcatgagctccggtgatgcctgacgtatttgtcaacccactgctaggagccatattgggctggagagaaacactgagcactcactcatcgtattatttatggactgctcgagggccaaaggaggatgatcaactagacttaaagacggtaaggtgtgattatcattatgagcgagtaccctaccatatgggttgaaccgctgcaaaagcgcgttgagtcctggacacatcagcttcactgtgtgggacgtgggtggccaggacaagatccggcccctgtggcgccactacttccagaacacacaaggcctgatcttcgtggtggacagcaatgacagagagcgtgtgaacgaggcccgtgaggagctcatgaggatgctggccgaggacgagctccgggatgctgtcctcctggtgttcgccaacaagcaggacctccccaacgccatgaatgcggccgagatcacagacaagctggggctgcactcactacgccacaggaactggtacattcaggccacctgcgccaccagcggcgacgggctctatgaaggactggactggctgtccaatcagctccggaaccagaagtgaacgcgacccccctccctctcactcctcttgccctctgctttactctcatgtggcaaacgtgcggctcgtggtgtgagtgccagaagctgcctccgtggtttggtcaccgtgtgcatcgcaccgtgctgtaaatgtggcagacgcagcctgcggccaggctttttatttaatgtaaatagtttttgtttccaatgaggcagtttctggtactcctatgcaatattactcagctttttttattgtaaaaagaaaaatcaactcactgttcagtgctgagaggggatgtaggcccatgggcacctggcctccaggagtcgctgtgttgggagagccggccacgcccttggctttagagctgtgttgaaatccattttggtggttggtttttaacccaaactcagtgcattttttaaaatagttaagaatccaagtcgagaacacttgaacacacagaagggagaccccgcctagcatagatttgcagttacggcctggatgccagtcgccagcccagctgttcccctcgggaacatgaggtggtggtggcgcagcagactgcgatcaattctgcatggtcacagtagagatccccgcaactcgcttgtccttgggtcaccctgcattccatagccatgtgcttgtccctgtgctcccacggttcccaggggccaggctgggagcccacagccaccccactatgccgcaggccgccctacccaccttcaggcagcctatgggacgcagggccccatctgtccctcggtcgccgtgtggccagagtgggtccgtcgtccccaacactcgtgctcgctcagacactttggcaggatgtctggggcctcaccagcaggagcgcgtgcaagccgggcaggcggtccacctagacccacagcccctcgggagcaccccacctctgtgtgtgatgtagctttctctccctcagcctgcaagggtccgatttgccatcgaaaaagacaacctctacttttttcttttgtattttgataaacactgaagctggagctgttaaatttatcttggggaaacctcagaactggtctatttggtgtcgtggaacctcttactgctttcaatacacgattagtaatcaactgttttgtatacttgttttcagttttcatttcgacaaacaagcactgtaattatagctattagaataaaatctcttaactatt

SEQ ID NO: 337772 - DNA, 1790 bp, Homo sapiens
aggcctgcgaggcgaattcgacacgaggaccaacgcctggctcggagcagcagcctctgaggtgtccctggccagtgtccttccacctgtccacaagcatggggaacatcttcgccaacctcttcaagggcctttttggcaaaaaagaaatgcgcatcctcatggtgggcctggatgctgcagggaagaccacgatcctctacaagcttaagctgggtgagatcgtgaccaccattcccaccataggcttcaacgtggaaaccgtggagtacaagaacatcagcttcactgtgtgggacgtgggtggccaggacaagatccggcccctgtggcgccactacttccagaacacacaaggcctgatcttcgtggtggacagcaatgacagagagcgtgtgaacgaggcccgtgaggagctcatgaggatgctggccgaggacgagctccgggatgctgtcctcctggtgttcgccaacaagcaggacctccccaacgccatgaatgcggccgagatcacagacaagctggggctgcactcactacgccacaggaactggtacattcaggccacctgcgccaccagcggcgacgggctctatgaaggactggactggctgtccaatcagctccggaaccagaagtgaacgcgacccccctccctctcactcctcttgccctctgctttactctcatgtggcaaacgtgcggctcgtggtgtgagtgccagaagctgcctccgtggtttggtcaccgtgtgcatcgcaccgtgctgtaaatgtggcagacgcagcctgcggccaggctttttatttaatgtaaatagtttttgtttccaatgaggcagtttctggtactcctatgcaatattactcagctttttttattgttgggcacctggcctccaggagtcgctgtgttgggagagccggccacgcccttggctttagagctgtgttgaaatccattttggtggttggtttttaacccaaactcagtgcattttttaaaatagttaagaatccaagtcgagaacacttgaacacacagaagggagaccccgcctagcatagatttgcagttacggcctggatgccagtcgccagcccagctgttcccctcgggaacatgaggtggtggtggcgcagcagactgcgatcaattctgcatggtcacagtagagatccccgcaactcgcttgtccttgggtcaccctgcattccatagccatgtgcttgtccctgtgctcccacggttcccaggggccaggctgggagcccacagccaccccactatgccgcaggccgccctacccaccttcaggcagcctatgggacgcagggccccatctgtccctcggtcgccgtgtggccagagtgggtccgtcgtccccaacactcgtgctcgctcagacactttggcaggatgtctggggcctcaccagcaggagcgcgtgcaagccgggcaggcggtccacctagacccacagcccctcgggagcaccccacctctgtgtgtgatgtagctttctctccctcagcctgcaagggtccgatttgccatcgaaaaagacaacctctacttttttcttttgtattttgataaacactgaagctggagctgttaaatttatcttggggaaacctcagaactggtctatttggtgtcgtggaacctcttactgctttcaatacacgattagtaatcaactgttttgtatacttgttttcagttttcatttcgacaaacaagcactgtaattatagctattagaataaaatctcttaactatt

SEQ ID NO: 337773 - DNA, 1604 bp, Homo sapiens
aggcctgcgaggcgaattcgacacgaggaccaacgcctggctcggagcagcagcctctgaggtgtccctggccagtgtccttccacctgtccacaagcatggggaacatcttcgccaacctcttcaagggcctttttggcaaaaaagaaatgcgcatcctcatggtgggcctggatgctgcagggaagaccacgatcctctacaagcttaagctgggtgagatcgtgaccaccattcccaccataggcttcaacgtggaaaccgtggagtacaagaacatcagcttcactgtgtgggacgtgggtggccaggacaagatccggcccctgtggcgccactacttccagaacacacaaggcctgatcttcgtggtggacagcaatgacagagagcgtgtgaacgaggcccgtgaggagctcatgaggatgctggccgaggacgagctccgggatgctgtcctcctggtgttcgccaacaagcaggacctccccaacgccatgaatgcggccgagatcacagacaagctggggctgcactcactacgccacaggaactggtacattcaggccacctgcgccaccagcggcgacgggctctatgaaggactggactggctgtccaatcagctccggaaccagaagtgaacgcgacccccctccctctcactcctcttgccctctgctttactctcatgtggcaaacgtgcggctcgtggtgtgagtgccagaagctgcctccgtggtttggtcaccgtgtgcatcgcaccgtgctgtaaatgtggcagacgcagcctgcggccaggctttttatttaatgtaaatagtttttgtttccaatgaggcagtttctggtactcctatgcaatattactcagctttttttattgtaaaaagaaaaatcaactcactgttcagtgctgagaggggatgtaggcccatgggcacctggcctccaggagtcgctgtgttgggagagccggccacgcccttggctttagagctgtgttgaaatccattttggtggttggtttttaacccaaactcagtgcattttttaaaatagttaagaatccaagtcgagaacacttgaacacacagaagggagaccccgcctagcatagatttgcagttacggcctggatgccagtcgccagcccagctgttcccctcgggaacatgaggtggtggtggcgcagcagactgcgatcaattctgcatggtcacagtagagatccccgcaactcgcttgtccttgggtcaccctgcattccatagccatgtgcttgtccctgtgctcccacggttcccaggggaccccacctctgtgtgtgatgtagctttctctccctcagcctgcaagggtccgatttgccatcgaaaaagacaacctctacttttttcttttgtattttgataaacactgaagctggagctgttaaatttatcttggggaaacctcagaactggtctatttggtgtcgtggaacctcttactgctttcaatacacgattagtaatcaactgttttgtatacttgttttcagttttcatttcgacaaacaagcactgtaattatagctattagaataaaatctcttaactatt

SEQ ID NO: 337774 - DNA, 1549 bp, Homo sapiens
aggcctgcgaggcgaattcgacacgaggaccaacgcctggctcggagcagcagcctctgaggtgtccctggccagtgtccttccacctgtccacaagcatggggaacatcttcgccaacctcttcaagggcctttttggcaaaaaagaaatgcgcatcctcatggtgggcctggatgctgcagggaagaccacgatcctctacaagcttaagctgggtgagatcgtgaccaccattcccaccataggcttcaacgtggaaaccgtggagtacaagaccacctgcgccaccagcggcgacgggctctatgaaggactggactggctgtccaatcagctccggaaccagaagtgaacgcgacccccctccctctcactcctcttgccctctgctttactctcatgtggcaaacgtgcggctcgtggtgtgagtgccagaagctgcctccgtggtttggtcaccgtgtgcatcgcaccgtgctgtaaatgtggcagacgcagcctgcggccaggctttttatttaatgtaaatagtttttgtttccaatgaggcagtttctggtactcctatgcaatattactcagctttttttattgtaaaaagaaaaatcaactcactgttcagtgctgagaggggatgtaggcccatgggcacctggcctccaggagtcgctgtgttgggagagccggccacgcccttggctttagagctgtgttgaaatccattttggtggttggtttttaacccaaactcagtgcattttttaaaatagttaagaatccaagtcgagaacacttgaacacacagaagggagaccccgcctagcatagatttgcagttacggcctggatgccagtcgccagcccagctgttcccctcgggaacatgaggtggtggtggcgcagcagactgcgatcaattctgcatggtcacagtagagatccccgcaactcgcttgtccttgggtcaccctgcattccatagccatgtgcttgtccctgtgctcccacggttcccaggggccaggctgggagcccacagccaccccactatgccgcaggccgccctacccaccttcaggcagcctatgggacgcagggccccatctgtccctcggtcgccgtgtggccagagtgggtccgtcgtccccaacactcgtgctcgctcagacactttggcaggatgtctggggcctcaccagcaggagcgcgtgcaagccgggcaggcggtccacctagacccacagcccctcgggagcaccccacctctgtgtgtgatgtagctttctctccctcagcctgcaagggtccgatttgccatcgaaaaagacaacctctacttttttcttttgtattttgataaacactgaagctggagctgttaaatttatcttggggaaacctcagaactggtctatttggtgtcgtggaacctcttactgctttcaatacacgattagtaatcaactgttttgtatacttgttttcagttttcatttcgacaaacaagcactgtaattatagctattagaataaaatctcttaactatt

SEQ ID NO: 337775 - DNA, 1076 bp, Homo sapiens
aggcctgcgaggcgaattcgacacgaggaccaacgcctggctcggagcagcagcctctgaggtgtccctggccagtgtccttccacctgtccacaagcatggggaacatcttcgccaacctcttcaagggcctttttggcaaaaaagaaatgcgcatcctcatggtgggcctggatgctgcagggaagaccacgatcctctacaagcttaagctgggtgagatcgtgaccaccattcccaccataggcttcaacgtggaaaccgtggagtacaagaacatcagcttcactgtgtgggacgtgggtggccaggacaagatccggcccctgtggcgccactacttccagaacacacaaggcctgatcttcgtggtggacagcaatgacagagagcgtgtgaacgaggcccgtgaggagctcatgaggatgctggccgaggacgagctccgggatgctgtcctcctggtgttcgccaacaagcaggacctccccaacgccatgaatgcggccgagatcacagacaagctggggctgcactcactacgccacaggaactggtacattcaggccacctgcgccaccagcggcgacgggctctatgaaggactggactggctgtccaatcagctccggaaccagaagtgaacgcgacccccctccctctcactcctcttgccctctgctttactctcatgtggcaaacgtgcggctcgtggtgtgagtgccagaagctgcctccgtggtttggtcaccgtgtgcatcgcaccgtgctgtaaatgtggcagacgcagcctgcggccaggctttttatttaatgtaaatagtttttgtttccaatgaggcagtttctggtactcctatgcaatattactcagctttttttattgtaaaaagaaaaatcaactcactgttcagtgctgagaggggatgtaggcccatgggcacctggcctccaggagtcgctgtgttgggagagccggccacgcccttggctttagagctgtgttgaaatccattttggtggttggtttttaacccaaactcagtgcattttttcacagtgcaccacgacacagt

SEQ ID NO: 337776 - DNA, 978 bp, Homo sapiens
aggcctgcgaggcgaattcgacacgaggaccaacgcctggctcggagcagcagcctctgaggtgtccctggccagtgtccttccacctgtccacaagcatggggaacatcttcgccaacctcttcaagggcctttttggcaaaaaagaaatgcgcatcctcatggtgggcctggatgctgcagggaagaccacgatcctctacaagcttaagctgggtgagatcgtgaccaccattcccaccataggcttcaacgtggaaaccgtggagtacaagaacatcagcttcactgtgtgggacgtgggtggccaggacaagatccggcccctgtggcgccactacttccagaacacacaaggcctgatcttcgtggtggacagcaatgacagagagcgtgtgaacgaggcccgtgaggagctcatgaggatgctggccgaggacgagctccgggatgctgtcctcctggtgttcgccaacaagcaggacctccccaacgccatgaatgcggccgagatcacagacaagctggggctgcactcactacgccacaggaactggtacattcaggccacctgcgccaccagcggcgacgggctctatgaaggactggactggctgtccaatcagctccggaaccagaagtgaacgcgacccccctccctctcactcctcttgccctctgctttactctcatgtggcaaacgtgcggctcgtggtgtgagtgccagaagctgcctccgtggtttggtcaccgtgtgcatcgcaccgtgctgtaaatgtggcagacgcagcctgcggccaggctttttatttaatgtaaatagtttttgtttccaatgaggcagtttctggtactcctatgcaatattactcagctttttttattgtgcaagaaatcactcctggtcaggtgaagggtttacgcccaggccctggccccagatccgtttggaaaacggcaccctggtatagtgtaacc

SEQ ID NO: 337777 - DNA, 1242 bp, Homo sapiens
aggcctgcgaggcgaattcgacacgaggaccaacgcctggctcggagcagcagcctctgaggtgtccctggccagtgtccttccacctgtccacaagcatggggaacatcttcgccaacctcttcaagggcctttttggcaaaaaagaaatgcgcatcctcatggtgggcctggatgctgcagggaagaccacgatcctctacaagcttaagctgggtgagatcgtgaccaccattcccaccataggcttcaacgtggaaaccgtggagtacaagaacatcagcttcactgtgtgggacgtgggtggccaggacaagatccggcccctgtggcgccactacttccagaacacacaaggcctgatcttcgtggtggacagcaatgacagagagcgtgtgaacgaggcccgtgaggagctcatgaggatgctggccgaggacgagctccgggatgctgtcctcctggtgttcgccaacaagcaggacctccccaacgccatgaatgcggccgagatcacagacaagctggggctgcactcactacgccacaggaactggtacattcaggccacctgcgccaccagcggcgacgggctctatgaaggactggactggctgtccaatcagctccggaaccagaagtgaacgcgacccccctccctctcactcctcttgccctctgctttactctcatgtggcaaacgtgcggctcgtggtgtgagtgccagaagctgcctccgtggtttggtcaccgtgtgcatcgcaccgtgctgtaaatgtggcagacgcagcctgcggccccaggctgggagcccacagccaccccactatgccgcaggccgccctacccaccttcaggcagcctatgggacgcagggccccatctgtccctcggtcgccgtgtggccagagtgggtccgtcgtccccaacactcgtgctcgctcagacactttggcaggatgtctggggcctcaccagcaggagcgcgtgcaagccgggcaggcggtccacctagacccacagcccctcgggagcaccccacctctgtgtgtgatgtagctttctctccctcagcctgcaagggtccgatttgccatcgaaaaagacaacctctacttttttcttttgtattttgataaacactgaagctggagctgttaaatttatcttggggaaacctcagaactggtctatttggtgtcgtggaacctcttactgctttcaatacacgattagtaatca

SEQ ID NO: 337778 - DNA, 1051 bp, Homo sapiens
  misc_feature (817)..(817): n is a, c, g, or t
  misc_feature (829)..(829): n is a, c, g, or t
  misc_feature (835)..(835): n is a, c, g, or t
  misc_feature (845)..(846): n is a, c, g, or t
aggcctgcgaggcgaattcgacacgaggaccaacgcctggctcggagcagcagcctctgaggtgtccctggccagtgtccttccacctgtccacaagcatggggaacatcttcgccaacctcttcaagggcctttttggcaaaaaagaaatgcgcatcctcatggtgggcctggatgctgcagggaagaccacgatcctctacaagcttaagctgggtgagatcgtgaccaccattcccaccataggcttcaacgtggaaaccgtggagtacaagaacatcagcttcactgtgtgggacgtgggtggccaggacaagatccggcccctgtggcgccactacttccagaacacacaaggcctgatcttcgtggtggacagcaatgacagagagcgtgtgaacgaggcccgtgaggagctcatgaggatgctggccgaggacgagctccgggatgctgtcctcctggtgttcgccaacaagcaggacctccccaacgccatgaatgcggccgagatcacagacaagctggggctgcactcactacgccacaggaactggtacattcaggccacctgcgccaccagcggcgacgggctctatgaaggactggactggctgtccaatcagctccggaaccagaagtgaacgcgacccccctccctctcactcctcttgccctctgctttactctcatgtggcaaacgtgcggctcgtggtgtgagtgccagaagctgcctccgtggtttggtcaccgtgtgcatcgcaccgtgctgtaaatgtggcagacgcagcctgcggccgggtttattatgtaatantttgttccatgngcagtncggtaccatnnaattattacttggtggtaagaaatcagcagtactcaaaggattagcagtacacgatacgacctgttgaagcgcacctgactaacagtgaccttgggtgttaccaccggctaagaactaaccggacagaacagaccataagagagtgcactcccagagagaaaaataacttctcttcctccttaccctcctctcccaaatcaagaa

SEQ ID NO: 337779 - DNA, 855 bp, Homo sapiens
aggcctgcgaggcgaattcgacacgaggaccaacgcctggctcggagcagcagcctctgaggtgtccctggccagtgtccttccacctgtccacaagcatggggaacatcttcgccaacctcttcaagggcctttttggcaaaaaagaaatgcgcatcctcatggtgggcctggatgctgcagggaagaccacgatcctctacaagcttaagctgggtgagatcgtgaccaccattcccaccataggcttcaacgtggaaaccgtggagtacaagaacatcagcttcactgtgtgggacgtgggtggccaggacaagatccggcccctgtggcgccactacttccagaacacacaaggcctgatcttcgtggtggacagcaatgacagagagcgtgtgaacgaggcccgtgaggagctcatgaggatgctggccgaggacgagctccgggatgctgtcctcctggtgttcgccaacaagcaggacctccccaacgccatgaatgcggccgagatcacagacaagctggggctgcactcactacgccacaggaactggtacattcaggccacctgcgccaccagcggcgacgggctccctcagcctgcaagggtccgatttgccatcgaaaaagacaacctctacttttttcttttgtattttgataaacactgaagctggagctgttaaatttatcttggggaaacctcagaactggtctatttggtgtcgtggaacctcttactgctttcaatacacgattagtaatcaactgttttgtatacttgttttcagttttcatttcgacaaacaagcactgtaattatagctattagaataaaatctcttaactatt

SEQ ID NO: 337780 - DNA, 535 bp, Homo sapiens
aggcctgcgaggcgaattcgacacgaggaccaacgcctggctcggagcagcagcctctgaggtgtccctggccagtgtccttccacctgtccacaagcatggggaacatcttcgccaacctcttcaagggcctttttggcaaaaaagaaatgcgcatcctcatggtgggcctggatgctgcagggaagaccacgatcctctacaagcttaagctgggtgagatcgtgaccaccattcccaccataggcttcaacgtggaaaccgtggagtacaagaacatcagcttcactgtgtgggacgtgggtggccaggacaagatccggcccctgtggcgccactacttccagaacacacaaggcctgatcttcgtggtggacagcaatgacagagagcgtgtgaacgaggcccgtgaggagctcatgaggatgctggccgaggacgagctccgggatgctgtcctcctggtgttcgccaacaagcagacctccccaacgccatgaatgcctccgtcgaagttgcggatcctctaagtagc

SEQ ID NO: 337781 - DNA, 688 bp, Homo sapiens
ggtggtggcgcagcagactgcgatcaattctgcatggtcacagtagagatccccgcaactcgcttgtccttgggtcaccctgcattccatagccatgtgcttgtccctgtgctcccacggttcccaggggccaggctgggagcccacagccaccccactatgccgcaggccgccctacccaccttcaggcagcctatgggacgcagggccccatctgtccctcggtcgccgtgtggccagagtgggtccgtcgtccccaacactcgtgctcgctcagacactttggcaggatgtctggggcctcaccagcaggagcgcgtgcaagccgggcaggcggtccacctagacccacagcccctcgggagcaccccacctctgtgtgtgatgtagctttctctccctcagcctgcaagggtccgatttgccatcgaaaaagacaacctctacttttttcttttgtattttgataaacactgaagctggagctgttaaatttatcttggggaaacctcagaactggtctatttggtgtcgtggaacctcttactgctttcaatacacgattagtaatcaactgttttgtatacttgttttcagttttcatttcgacaaacaagcactgtaattatagctattagaataaaatctcttaactattttcaccggctctccagtgcttccacacagg

SEQ ID NO: 337782 - DNA, 1842 bp, Homo sapiens
gggctagtacgaggctggtttagtgggaaaaccaacgcctggctcggagcagcagcctctgaggtgtccctggccagtgtccttccacctgtccacaagcatggggaacatcttcgccaacctcttcaagggcctttttggcaaaaaagaaatgcgcatcctcatggtgggcctggatgctgcagggaagaccacgatcctctacaagcttaagctgggtgagatcgtgaccaccattcccaccataggcttcaacgtggaaaccgtggagtacaagaacatcagcttcactgtgtgggacgtgggtggccaggacaagatccggcccctgtggcgccactacttccagaacacacaaggcctgatcttcgtggtggacagcaatgacagagagcgtgtgaacgaggcccgtgaggagctcatgaggatgctggccgaggacgagctccgggatgctgtcctcctggtgttcgccaacaagcaggacctccccaacgccatgaatgcggccgagatcacagacaagctggggctgcactcactacgccacaggaactggtacattcaggccacctgcgccaccagcggcgacgggctctatgaaggactggactggctgtccaatcagctccggaaccagaagtgaacgcgacccccctccctctcactcctcttgccctctgctttactctcatgtggcaaacgtgcggctcgtggtgtgagtgccagaagctgcctccgtggtttggtcaccgtgtgcatcgcaccgtgctgtaaatgtggcagacgcagcctgcggccaggctttttatttaatgtaaatagtttttgtttccaatgaggcagtttctggtactcctatgcaatattactcagctttttttattgtaaaaagaaaaatcaactcactgttcagtgctgagaggggatgtaggcccatgggcacctggcctccaggagtcgctgtgttgggagagccggccacgcccttggctttagagctgtgttgaaatccattttggtggttggtttttaacccaaactcagtgcattttttaaaatagttaagaatccaagtcgagaacacttgaacacacagaagggagaccccgcctagcatagatttgcagttacggcctggatgccagtcgccagcccagctgttcccctcgggaacatgaggtggtggtggcgcagcagactgcgatcaattctgcatggtcacagtagagatccccgcaactcgcttgtccttgggtcaccctgcattccatagccatgtgcttgtccctgtgctcccacggttcccaggggccaggctgggagcccacagccaccccactatgccgcaggccgccctacccaccttcaggcagcctatgggacgcagggccccatctgtccctcggtcgccgtgtggccagagtgggtccgtcgtccccaacactcgtgctcgctcagacactttggcaggatgtctggggcctcaccagcaggagcgcgtgcaagccgggcaggcggtccacctagacccacagcccctcgggagcaccccacctctgtgtgtgatgtagctttctctccctcagcctgcaagggtccgatttgccatcgaaaaagacaacctctacttttttcttttgtattttgataaacactgaagctggagctgttaaatttatcttggggaaacctcagaactggtctatttggtgtcgtggaacctcttactgctttcaatacacgattagtaatcaactgttttgtatacttgttttcagttttcatttcgacaaacaagcactgtaattatagctattagaataaaatctcttaactatt

SEQ ID NO: 337783 - DNA, 1029 bp, Homo sapiens
tccgccccttacccggcgtgccccgcgcccggaggcgctgacgtggccgccgtcagagccgccatcttgtgggagcaaaaccaacgcctggctcggagcagcagcctctgaggtgtccctggccagtgtccttccacctgtccacaagcatggggaacatcttcgccaacctcttcaagggcctttttggcaaaaaagaaatgcgcatcctcatggtgggcctggatgctgcagggaagaccacgatcctctacaagcttaagctgggtgagatcgtgaccaccattcccaccataggcttcaacgtggaaaccgtggagtacaagaacatcagcttcactgtgtgggacgtgggtggccaggacaagatccggcccctgtggcgccactacttccagaacacacaaggcctgatcttcgtggtggacagcaatgacagagagcgtgtgaacgaggcccgtgaggagctcatgaggatgctggccgaggacgagctccgggatgctgtcctcctggtgttcgccaacaagcaggacctccccaacgccatgaatgcggccgagatcacagacaagctggggctgcactcactacgccacaggaactggtacattcaggccacctgcgccaccagcggcgacgggctctatgaaggactggactggctgtccaatcagctccggaaccagaagtgaacgcgacccccctccctctcactcctcttgccctctgctttactctcatgtggcaaacgtgcggctcgtggtgtgagtgccagaagctgcctccgtggtttggtcaccgtgtgcatcgcaccgtgctgtaaatgtggcagacgcagcctgcggccaggctttttatttaatgtaaatagtttttgtttccaatgaggcagtttctggtactcctatgcaatattactcagctttttttattgtgcaagaaatcactcctggtcaggtgaagggtttacgcccaggccctggccccagatccgtttggaaaacggcaccctggtatagtgtaacc

SEQ ID NO: 337784 - DNA, 636 bp, Homo sapiens
agtggctgtgacggtgagtgccacacagagctgcccacactggtggagggaaggcagggagataccaggaccatccggaaggggctgagtgtcatttgacaggtgccatgtgagcagagatgtgaaggagtggcccgggacaatcagggcagaatccctgaggtgtccctggccagtgtccttccacctgtccacaagcatggggaacatcttcgccaacctcttcaagggcctttttggcaaaaaagaaatgcgcatcctcatggtgggcctggatgctgcagggaagaccacgatcctctacaagcttaagctgggtgagatcgtgaccaccattcccaccataggcttcaacgtggaaaccgtggagtacaagaacatcagcttcactgtgtgggacgtgggtggccaggacaagatccggcccctgtggcgccactacttccagaacacacaaggcctgatcttcgtggtggacagcaatgacagagagcgtgtgaacgaggcccgtgaggagctcatgaggatgctggccgaggacgagctccgggatgctgtcctcctggtgttcgccaacaagcagacctccccaacgccatgaatgcctccgtcgaagttgcggatcctctaagtagc

SEQ ID NO: 337785 - DNA, 1840 bp, Homo sapiens
aggcctgcgaggcgaattcgacacgaggaccaacgcctggctcggagcagcagcctctgaggtgtccctggccagtgtccttccacctgtccacaagcatggggaacatcttcgccaacctcttcaagggcctttttggcaaaaaagaaatgcgcatcctcatggtgggcctggatgctgcagggaagaccacgatcctctacaagcttaagctgggtgagatcgtgaccaccattcccaccataggcttcaacgtggaaaccgtggagtacaagaacatcagcttcactgtgtgggacgtgggtggccaggacaagatccggcccctgtggcgccactacttccagaacacacaaggcctgatcttcgtggtggacagcaatgacagagagcgtgtgaacgaggcccgtgaggagctcatgaggatgctggccgaggacgagctccgggatgctgtcctcctggtgttcgccaacaagcaggacctccccaacgccatgaatgcggccgagatcacagacaagctggggctgcactcactacgccacaggaactggtacattcaggccacctgcgccaccagcggcgacgggctctatgaaggactggactggctgtccaatcagctccggaaccagaagtgaacgcgacccccctccctctcactcctcttgccctctgctttactctcatgtggcaaacgtgcggctcgtggtgtgagtgccagaagctgcctccgtggtttggtcaccgtgtgcatcgcaccgtgctgtaaatgtggcagacgcagcctgcggccaggctttttatttaatgtaaatagtttttgtttccaatgaggcagtttctggtactcctatgcaatattactcagctttttttattgtaaaaagaaaaatcaactcactgttcagtgctgagaggggatgtaggcccatgggcacctggcctccaggagtcgctgtgttgggagagccggccacgcccttggctttagagctgtgttgaaatccattttggtggttggtttttaacccaaactcagtgcattttttaaaatagttaagaatccaagtcgagaacacttgaacacacagaagggagaccccgcctagcatagatttgcagttacggcctggatgccagtcgccagcccagctgttcccctcgggaacatgaggtggtggtggcgcagcagactgcgatcaattctgcatggtcacagtagagatccccgcaactcgcttgtccttgggtcaccctgcattccatagccatgtgcttgtccctgtgctcccacggttcccaggggccaggctgggagcccacagccaccccactatgccgcaggccgccctacccaccttcaggcagcctatgggacgcagggccccatctgtccctcggtcgccgtgtggccagagtgggtccgtcgtccccaacactcgtgctcgctcagacactttggcaggatgtctggggcctcaccagcaggagcgcgtgcaagccgggcaggcggtccacctagacccacagcccctcgggagcaccccacctctgtgtgtgatgtagctttctctccctcagcctgcaagggtccgatttgccatcgaaaaagacaacctctacttttttcttttgtattttgataaacactgaagctggagctgttaaatttatcttggggaaacctcagaactggtctatttggtgtcgtggaacctcttactgctttcaatacacgattagtaatcaactgttttgtatacttgttttcagttttcatttcgacaaacaagcactgtaattatagctattagaataaaatctcttaactatt

SEQ ID NO: 337786 - DNA, 1896 bp, Homo sapiens
aggcctgcgaggcgaattcgacacgaggaccaacgcctggctcggagcagcagcctctgaggtgtccctggccagtgtccttccacctgtccacaagcatggggaacatcttcgccaacctcttcaagggcctttttggcaaaaaagaaatgcgcatcctcatggtgggcctggatgctgcagggaagaccacgatcctctacaagcttaagctgggtgagatcgtgaccaccattcccaccataggcttcaacgtggaaaccgtggagtacaagaacatcagcttcactgtgtgggacgtgggtggccaggacaagatccggcccctgtggcgccactacttccagaacacacaaggcctgatcttcgtggtggacagcaatgacagagagcgtgtgaacgaggcccgtgaggagctcatgaggatgctggccgaggacgagctccgggatgctgtcctcctggtgttcgccaacaagcaggacctccccaacgccatgaatgcggccgagatcacagacaagctggggctgcactcactacgccacaggaactggtacattcaggccacctgcgccaccagcggcgacgggctctatgaaggactggactggctgtccaatcagctccggaaccagaagtgaacgcgacccccctccctctcactcctcttgccctctgctttactctcatgtggcaaacgtgcggctcgtggtgtgagtgccagaagctgcctccgtggtttggtcaccgtgtgcatcgcaccgtgctgtaaatgtggcagacgcagcctgcggccaggctttttatttaatgtaaatagtttttgtttccaatgaggcagtttctggtactcctatgcaatattactcagctttttttattgtaaaaagaaaaatcaactcactgttcagtgctgagaggggatgtaggcccatgggcacctggcctccaggagtcgctgtgttgggagagccggccacgcccttggctttagagctgtgttgaaatccattttggtggttggtttttaacccaaactcagtgcattttttaaaatagttaagaatccaagtcgagaacacttgaacacacagaagggagaccccgcctagcatagatttgcagttacggcctggatgccagtcgccagcccagctgttcccctcgggaacatgaggtggtggtggcgcagcagactgcgatcaattctgcatggtcacagtagagatccccgcaactcgcttgtccttgggtcaccctgcattccatagccatgtgcttgtccctgtgctcccacggttcccaggggccaggctgggagcccacagccaccccactatgccgcaggccgccctacccaccttcaggcagcctatgggacgcagggccccatctgtccctcggtcgccgtgtggccagagtgggtccgtcgtccccaacactcgtgctcgctcagacactttggcaggatgtctggggcctcaccagcaggagcgcgtgcaagccgggcaggcggtccacctagacccacagcccctcgggagcaccccacctctgtgtgtgatgtagctttctctccctcagcctgcaagggtccgatttgccatcgaaaaagacaacctctacttttttcttttgtattttgataaacactgaagctggagctgttaaatttatcttggggaaacctcagaactggtctatttggtgtcgtggaacctcttactgctttcaatacacgattagtaatcaactgttttgtatacttgttttcagttttcatttcgacaaacaagcactgtaattatagctattagaataaaatctcttaactattaaaaaaaaaaggggggcggccaaaaaaccccgggccattcggtccctttgtcaagg

SEQ ID NO: 337787 - DNA, 1755 bp, Homo sapiens
aggcctgcgaggcgaattcgacacgaggaccaacgcctggctcggagcagcagcctctgaggtgtccctggccagtgtccttccacctgtccacaagcatggggaacatcttcgccaacctcttcaagggcctttttggcaaaaaagaaatgcgcatcctcatggtgggcctggatgctgcagggaagaccacgatcctctacaagcttaagctgggtgagatcgtgaccaccattcccaccataggcttcaacgtggaaaccgtggagtacaagaacatcagcttcactgtgtgggacgtgggtggccaggacaagatccggcccctgtggcgccactacttccagaacacacaaggcctgatcttcgtggtggacagcaatgacagagagcgtgtgaacgaggcccgtgaggagctcatgaggatgctggccgaggacgagctccgggatgctgtcctcctggtgttcgccaacaagcaggacctccccaacgccatgaatgcggccgagatcacagacaagctggggctgcactcactacgccacaggaactggtacattcaggccacctgcgccaccagcggcgacgggctctatgaaggactggactggctgtccaatcagctccggaaccagaagtgaacgcgacccccctccctctcactcctcttgccctctgctttactctcatgtggcaaacgtgcggctcgtggtgtgagtgccagaagctgcctccgtggtttggtcaccgtgtgcatcgcaccgtgctgtaaatgtggcagacgcagcctgcggccaggctttttatttaatgtaaatagtttttgtttccaatgaggcagtttctggtactcctatgcaatattactcagctttttttattgtaaaaagaaaaatcaactcactgttcagtgctgagaggggatgtaggcccatgggcacctggcctccaggagtcgctgtgttgggagagccggccacgcccttggctttagagctgtgttgaaatccattttggtggttggtttttaacccaaactcagtgcattttttaaaatagttaagaatccaagtcgagaacacttgaacacacagaagggagaccccgcctagcatagatttgcagttacggcctggatgccagtcgccagcccagctgttcccctcgggaacatgaggtggtggtggcgcagcagactgcgatcaattctgcatggtcacagtagagatccccgcaactcgcttgtccttgggtcaccctgcattccatagccatgtgcttgtccctgtgctcccacggttcccaggggccaggctgggagcccacagccaccccactatgccgcaggccgccctacccaccttcaggcagcctatgggacgcagggccccatctgtccctcggtcgccgtgtggccagagtgggtccgtcgtccccaacactcgtgctcgctcagacactttggcaggatgtctggggcctcaccagcaggagcgcgtgcaagccgggcaggcggtccacctagacccacagcccctcgggagcaccccacctctgtgtgtgatgtagctttctctccctcagcctgcaagggtccgatttgccatcgaaaaagacaacctctacttttttcttttgtattttgataaacactgaagctggagctgttaaatttatcttggggaaacctcagaactggtctatttggtgtcgtggaacctcttactgctttcaatacacgattagtaatca

SEQ ID NO: 337788 - DNA, 1801 bp, Homo sapiens
aggcctgcgaggcgaattcgacacgaggaccaacgcctggctcggagcagcagcctctgaggtgtccctggccagtgtccttccacctgtccacaagcatggggaacatcttcgccaacctcttcaagggcctttttggcaaaaaagaaatgcgcatcctcatggtgggcctggatgctgcagggaagaccacgatcctctacaagcttaagctgggtgagatcgtgaccaccattcccaccataggcttcaacgtggaaaccgtggagtacaagaacatcagcttcactgtgtgggacgtgggtggccaggacaagatccggcccctgtggcgccactacttccagaacacacaaggcctgatcttcgtggtggacagcaatgacagagagcgtgtgaacgaggcccgtgaggagctcatgaggatgctggccgaggacgagctccgggatgctgtcctcctggtgttcgccaacaagcaggacctccccaacgccatgaatgcggccgagatcacagacaagctggggctgcactcactacgccacaggaactggtacattcaggccacctgcgccaccagcggcgacgggctctatgaaggactggactggctgtccaatcagctccggaaccagaagtgaacgcgacccccctccctctcactcctcttgccctctgctttactctcatgtggcaaacgtgcggctcgtggtgtgagtgccagaagctgcctccgtggtttggtcaccgtgtgcatcgcaccgtgctgtaaatgtggcagacgcagcctgcggccaggctttttatttaatgtaaatagtttttgtttccaatgaggcagtttctggtactcctatgcaatattactcagctttttttattgtaaaaagaaaaatcaactcactgttcagtgctgagaggggatgtaggcccatgggcacctggcctccaggagtcgctgtgttgggagagccggccacgcccttggctttagagctgtgttgaaatccattttggtggttggtttttaacccaaactcagtgcattttttaaaatagttaagaatccaagtcgagaacacttgaacacacagaagggagaccccgcctagcatagatttgcagttacggcctggatgccagtcgccagcccagctgttcccctcgggaacatgaggtggtggtggcgcagcagactgcgatcaattctgcatggtcacagtagagatccccgcaactcgcttgtccttgggtcaccctgcattccatagccatgtgcttgtccctgtgctcccacggttcccaggggccaggctgggagcccacagccaccccactatgccgcaggccgccctacccaccttcaggcagcctatgggacgcagggccccatctgtccctcggtcgccgtgtggccagagtgggtccgtcgtccccaacactcgtgctcgctcagacactttggcaggatgtctggggcctcaccagcaggagcgcgtgcaagccgggcaggcggtccacctagacccacagcccctcgggagcaccccacctctgtgtgtgatgtagctttctctccctcagcctgcaagggtccgatttgccatcgaaaaagacaacctctacttttttcttttgtattttgataaacactgaagctggagctgttaaatttatcttggggaaacctcagaactggtctatttggtgtcgtggaacctcttactgctttcaatacacgattagtaatcaaaaaaaaaagggggggtctaaaattcctcaggggccataataccct

SEQ ID NO: 337789 - DNA, 1955 bp, Homo sapiens
aggcctgcgaggcgaattcgacacgaggaccaacgcctggctcggagcagcagcctctgaggtgtccctggccagtgtccttccacctgtccacaagcatggggaacatcttcgccaacctcttcaagggcctttttggcaaaaaagaaatgcgcatcctcatggtgggcctggatgctgcagggaagaccacgatcctctacaagcttaagctgggtgagatcgtgaccaccattcccaccataggcttcaacgtggaaaccgtggagtacaagaacatcagcttcactgtgtgggacgtgggtggccaggacaagatccggcccctgtggcgccactacttccagaacacacaaggcctgatcttcgtggtggacagcaatgacagagagcgtgtgaacgaggcccgtgaggagctcatgaggatgctggccgaggacgagctccgggatgctgtcctcctggtgttcgccaacaagcaggacctccccaacgccatgaatgcggccgagatcacagacaagctggggctgcactcactacgccacaggaactggtacattcaggccacctgcgccaccagcggcgacgggctctatgaaggactggactggctgtccaatcagctccggaaccagaagtgaacgcgacccccctccctctcactcctcttgccctctgctttactctcatgtggcaaacgtgcggctcgtggtgtgagtgccagaagctgcctccgtggtttggtcaccgtgtgcatcgcaccgtgctgtaaatgtggcagacgcagcctgcggccaggctttttatttaatgtaaatagtttttgtttccaatgaggcagtttctggtactcctatgcaatattactcagctttttttattgtaaaaagaaaaatcaactcactgttcagtgctgagaggggatgtaggcccatgggcacctggcctccaggagtcgctgtgttgggagagccggccacgcccttggctttagagctgtgttgaaatccattttggtggttggtttttaacccaaactcagtgcattttttaaaatagttaagaatccaagtcgagaacacttgaacacacagaagggagaccccgcctagcatagatttgcagttacggcctggatgccagtcgccagcccagctgttcccctcgggaacatgaggtggtggtggcgcagcagactgcgatcaattctgcatggtcacagtagagatccccgcaactcgcttgtccttgggtcaccctgcattccatagccatgtgcttgtccctgtgctcccacggttcccaggggccaggctgggagcccacagccaccccactatgccgcaggccgccctacccaccttcaggcagcctatgggacgcagggccccatctgtccctcggtcgccgtgtggccagagtgggtccgtcgtccccaacactcgtgctcgctcagacactttggcaggatgtctggggcctcaccagcaggagcgcgtgcaagccgggcaggcggtccacctagacccacagcccctcgggagcaccccacctctgtgtgtgatgtagctttctctccctcagcctgcaagggtccgatttgccatcgaaaaagacaacctctacttttttcttttgtattttgataaacactgaagctggagctgttaaatttatcttggggaaacctcagaactggtctatttggtgtcgtggaacctcttactgctttcaatacacgattagtaatcaccgcaaacacacaccaaggaccgcggaggccgtaatatgccggatgcgcacaaccagcgctccacgaaatgggcaccgtgcgcctacgcgggcaccgaacacagcttcctggcacaacacgggagaaacagcggagaccccataaagggggcgccataaacccgaaaacagcaggtaccggcgtagacagggcgacaaca

SEQ ID NO: 337790 - DNA, 1785 bp, Homo sapiens
aggcctgcgaggcgaattcgacacgaggaccaacgcctggctcggagcagcagcctctgaggtgtccctggccagtgtccttccacctgtccacaagcatggggaacatcttcgccaacctcttcaagggcctttttggcaaaaaagaaatgcgcatcctcatggtgggcctggatgctgcagggaagaccacgatcctctacaagcttaagctgggtgagatcgtgaccaccattcccaccataggcttcaacgtggaaaccgtggagtacaagaacatcagcttcactgtgtgggacgtgggtggccaggacaagatccggcccctgtggcgccactacttccagaacacacaaggcctgatcttcgtggtggacagcaatgacagagagcgtgtgaacgaggcccgtgaggagctcatgaggatgctggccgaggacgagctccgggatgctgtcctcctggtgttcgccaacaagcaggacctccccaacgccatgaatgcggccgagatcacagacaagctggggctgcactcactacgccacaggaactggtacattcaggccacctgcgccaccagcggcgacgggctctatgaaggactggactggctgtccaatcagctccggaaccagaagtgaacgcgacccccctccctctcactcctcttgccctctgctttactctcatgtggcaaacgtgcggctcgtggtgtgagtgccagaagctgcctccgtggtttggtcaccgtgtgcatcgcaccgtgctgtaaatgtggcagacgcagcctgcggccaggctttttatttaatgtaaatagtttttgtttccaatgaggcagtttctggtactcctatgcaatattactcagctttttttattgtaaaaagaaaaatcaactcactgttcagtgctgagaggggatgtaggcccatgggcacctggcctccaggagtcgctgtgttgggagagccggccacgcccttggctttagagctgtgttgaaatccattttggtggttggtttttaacccaaactcagtgcattttttcctagcatagatttgcagttacggcctggatgccagtcgccagcccagctgttcccctcgggaacatgaggtggtggtggcgcagcagactgcgatcaattctgcatggtcacagtagagatccccgcaactcgcttgtccttgggtcaccctgcattccatagccatgtgcttgtccctgtgctcccacggttcccaggggccaggctgggagcccacagccaccccactatgccgcaggccgccctacccaccttcaggcagcctatgggacgcagggccccatctgtccctcggtcgccgtgtggccagagtgggtccgtcgtccccaacactcgtgctcgctcagacactttggcaggatgtctggggcctcaccagcaggagcgcgtgcaagccgggcaggcggtccacctagacccacagcccctcgggagcaccccacctctgtgtgtgatgtagctttctctccctcagcctgcaagggtccgatttgccatcgaaaaagacaacctctacttttttcttttgtattttgataaacactgaagctggagctgttaaatttatcttggggaaacctcagaactggtctatttggtgtcgtggaacctcttactgctttcaatacacgattagtaatcaactgttttgtatacttgttttcagttttcatttcgacaaacaagcactgtaattatagctattagaataaaatctcttaactatt

SEQ ID NO: 337791 - DNA, 1580 bp, Homo sapiens
  misc_feature (1553)..(1553): n is a, c, g, or t
  misc_feature (1557)..(1557): n is a, c, g, or t
aggcctgcgaggcgaattcgacacgaggaccaacgcctggctcggagcagcagcctctgaggtgtccctggccagtgtccttccacctgtccacaagcatggggaacatcttcgccaacctcttcaagggcctttttggcaaaaaagaaatgcgcatcctcatggtgggcctggatgctgcagggaagaccacgatcctctacaagcttaagctgggtgagatcgtgaccaccattcccaccataggcttcaacgtggaaaccgtggagtacaagaacatcagcttcactgtgtgggacgtgggtggccaggacaagatccggcccctgtggcgccactacttccagaacacacaaggcctgatcttcgtggtggacagcaatgacagagagcgtgtgaacgaggcccgtgaggagctcatgaggatgctggccgaggacgagctccgggatgctgtcctcctggtgttcgccaacaagcaggacctccccaacgccatgaatgcggccgagatcacagacaagctggggctgcactcactacgccacaggaactggtacattcaggccacctgcgccaccagcggcgacgggctctatgaaggactggactggctgtccaatcagctccggaaccagaagtgaacgcgacccccctccctctcactcctcttgccctctgctttactctcatgtggcaaacgtgcggctcgtggtgtgagtgccagaagctgcctccgtggtttggtcaccgtgtgcatcgcaccgtgctgtaaatgtggcagacgcagcctgcggccaggctttttatttaatgtaaatagtttttgtttccaatgaggcagtttctggtactcctatgcaatattactcagctttttttattgtaaaaagaaaaatcaactcactgttcagtgctgagaggggatgtaggcccatgggcacctggcctccaggagtcgctgtgttgggagagccggccacgcccttggctttagagctgtgttgaaatccattttggtggttggtttttaacccaaactcagtgcattttttaaaatagttaagaatccaagtcgagaacacttgaacacacagaagggagaccccgcctagcatagatttgcagttacggcctggatgccagtcgccagcccagctgttcccctcgggaacatgaggtggtggtggcgcagcagactgcgatcaattctgcatggtcacagtagagatccccgcaactcgcttgtccttgggtcaccctgcattccatagccatgtgcttgtccctgtgctcccacggttcccaggggccaggctgggagcccacagccaccccactatgccgcaggccgccctacccaccttcaggcagcctatgggacgcagggccccatctgtccctcggtcgccgtgtggccagagtgggtccgtcgtccccaacactcgtgctcgctcagacactttggcaggatgtctggggcctcaccagcaggagcgcgtgcaagccgggcaggcggtccacctagacccacagcccctcgggagctaagngagntgggatcctctagatcaaaccca

SEQ ID NO: 337792 - DNA, 1987 bp, Homo sapiens
aggcctgcgaggcgaattcgacacgaggaccaacgcctggctcggagcagcagcctctgaggtgtccctggccagtgtccttccacctgtccacaagcatggggaacatcttcgccaacctcttcaagggcctttttggcaaaaaagaaatgcgcatcctcatggtgggcctggatgctgcagggaagaccacgatcctctacaagcttaagctgggtgagatcgtgaccaccattcccaccataggcttcaacgtggaaaccgtggagtacaagaacatcagcttcactgtgtgggacgtgggtggccaggacaagatccggcccctgtggcgccactacttccagaacacacaagggccggatcttgtcctgaccaccattcccaccataggcttcaacgtggaaaccgtggagtacaagaacatcagcttcactgtgtgggacgtgggtggccaggacaagatccggcccctgtggcgccactacttccagaacacacaaggcctgatcttcgtggtggacagcaatgacagagagcgtgtgaacgaggcccgtgaggagctcatgaggatgctggccgaggacgagctccgggatgctgtcctcctggtgttcgccaacaagcaggacctccccaacgccatgaatgcggccgagatcacagacaagctggggctgcactcactacgccacaggaactggtacattcaggccacctgcgccaccagcggcgacgggctctatgaaggactggactggctgtccaatcagctccggaaccagaagtgaacgcgacccccctccctctcactcctcttgccctctgctttactctcatgtggcaaacgtgcggctcgtggtgtgagtgccagaagctgcctccgtggtttggtcaccgtgtgcatcgcaccgtgctgtaaatgtggcagacgcagcctgcggccaggctttttatttaatgtaaatagtttttgtttccaatgaggcagtttctggtactcctatgcaatattactcagctttttttattgtaaaaagaaaaatcaactcactgttcagtgctgagaggggatgtaggcccatgggcacctggcctccaggagtcgctgtgttgggagagccggccacgcccttggctttagagctgtgttgaaatccattttggtggttggtttttaacccaaactcagtgcattttttaaaatagttaagaatccaagtcgagaacacttgaacacacagaagggagaccccgcctagcatagatttgcagttacggcctggatgccagtcgccagcccagctgttcccctcgggaacatgaggtggtggtggcgcagcagactgcgatcaattctgcatggtcacagtagagatccccgcaactcgcttgtccttgggtcaccctgcattccatagccatgtgcttgtccctgtgctcccacggttcccaggggccaggctgggagcccacagccaccccactatgccgcaggccgccctacccaccttcaggcagcctatgggacgcagggccccatctgtccctcggtcgccgtgtggccagagtgggtccgtcgtccccaacactcgtgctcgctcagacactttggcaggatgtctggggcctcaccagcaggagcgcgtgcaagccgggcaggcggtccacctagacccacagcccctcgggagcaccccacctctgtgtgtgatgtagctttctctccctcagcctgcaagggtccgatttgccatcgaaaaagacaacctctacttttttcttttgtattttgataaacactgaagctggagctgttaaatttatcttggggaaacctcagaactggtctatttggtgtcgtggaacctcttactgctttcaatacacgattagtaatcaactgttttgtatacttgttttcagttttcatttcgacaaacaagcactgtaattatagctattagaataaaatctcttaactatt

SEQ ID NO: 337793 - DNA, 1975 bp, Homo sapiens
aggcctgcgaggcgaattcgacacgaggaccaacgcctggctcggagcagcagcctctgaggtgtccctggccagtgtccttccacctgtccacaagcatggggaacatcttcgccaacctcttcaagggcctttttggcaaaaaagaaatgcgcatcctcatggtgggcctggatgctgcagggaagaccacgatcctctacaagcttaagctgggtgagatcgtgaccaccattcccaccataggcttcaacgtggaaaccgtggagtacaagaacatcagcttcactgtgtgggacgtgggtggccaggacaagatccggcccctgtggcgccactacttccagaacacacaaggcctgatcttcgtggtggacagcaatgacagagagcgtgtgaacgaggcccgtgaggagctcatgaggatgctggccgaggacgagctccgggatgctgtcctcctggtgttcgccaacaagcaggtaggcgcccgggccagcctggggaatgtgaggagccagtgtgggttccgcctggtggtaggggttactggaggctggtggggcccctttctctgtcctgtggacagcccttcccaccaacccttccttcccccagacctccccaacgccatgaatgcggccgagatcacagacaagctggggctgcactcactacgccacaggaactggtacattcaggccacctgcgccaccagcggcgacgggctctatgaaggactggactggctgtccaatcagctccggaaccagaagtgaacgcgacccccctccctctcactcctcttgccctctgctttactctcatgtggcaaacgtgcggctcgtggtgtgagtgccagaagctgcctccgtggtttggtcaccgtgtgcatcgcaccgtgctgtaaatgtggcagacgcagcctgcggccaggctttttatttaatgtaaatagtttttgtttccaatgaggcagtttctggtactcctatgcaatattactcagctttttttattgtaaaaagaaaaatcaactcactgttcagtgctgagaggggatgtaggcccatgggcacctggcctccaggagtcgctgtgttgggagagccggccacgcccttggctttagagctgtgttgaaatccattttggtggttggtttttaacccaaactcagtgcattttttaaaatagttaagaatccaagtcgagaacacttgaacacacagaagggagaccccgcctagcatagatttgcagttacggcctggatgccagtcgccagcccagctgttcccctcgggaacatgaggtggtggtggcgcagcagactgcgatcaattctgcatggtcacagtagagatccccgcaactcgcttgtccttgggtcaccctgcattccatagccatgtgcttgtccctgtgctcccacggttcccaggggccaggctgggagcccacagccaccccactatgccgcaggccgccctacccaccttcaggcagcctatgggacgcagggccccatctgtccctcggtcgccgtgtggccagagtgggtccgtcgtccccaacactcgtgctcgctcagacactttggcaggatgtctggggcctcaccagcaggagcgcgtgcaagccgggcaggcggtccacctagacccacagcccctcgggagcaccccacctctgtgtgtgatgtagctttctctccctcagcctgcaagggtccgatttgccatcgaaaaagacaacctctacttttttcttttgtattttgataaacactgaagctggagctgttaaatttatcttggggaaacctcagaactggtctatttggtgtcgtggaacctcttactgctttcaatacacgattagtaatcaactgttttgtatacttgttttcagttttcatttcgacaaacaagcactgtaattatagctattagaataaaatctcttaactatt

SEQ ID NO: 337794 - DNA, 1774 bp, Homo sapiens
aggcctgcgaggcgaattcgacacgaggaccaacgcctggctcggagcagcagcctctgaggtgtccctggccagtgtccttccacctgtccacaagcatggggaacatcttcgccaacctcttcaagggcctttttggcaaaaaagaaatgcgcatcctcatggtgggcctggatgctgcagggaagaccacgatcctctacaagcttaagctgggtgagatcgtgaccaccattcccaccataggcttcaacgtggaaaccgtggagtacaagaacatcagcttcactgtgtgggacgtgggtggccaggacaagatccggcccctgtggcgccactacttccagaacacacaaggcctgatcttcgtggtggacagcaatgacagagagcgtgtgaacgaggcccgtgaggaggacctccccaacgccatgaatgcggccgagatcacagacaagctggggctgcactcactacgccacaggaactggtacattcaggccacctgcgccaccagcggcgacgggctctatgaaggactggactggctgtccaatcagctccggaaccagaagtgaacgcgacccccctccctctcactcctcttgccctctgctttactctcatgtggcaaacgtgcggctcgtggtgtgagtgccagaagctgcctccgtggtttggtcaccgtgtgcatcgcaccgtgctgtaaatgtggcagacgcagcctgcggccaggctttttatttaatgtaaatagtttttgtttccaatgaggcagtttctggtactcctatgcaatattactcagctttttttattgtaaaaagaaaaatcaactcactgttcagtgctgagaggggatgtaggcccatgggcacctggcctccaggagtcgctgtgttgggagagccggccacgcccttggctttagagctgtgttgaaatccattttggtggttggtttttaacccaaactcagtgcattttttaaaatagttaagaatccaagtcgagaacacttgaacacacagaagggagaccccgcctagcatagatttgcagttacggcctggatgccagtcgccagcccagctgttcccctcgggaacatgaggtggtggtggcgcagcagactgcgatcaattctgcatggtcacagtagagatccccgcaactcgcttgtccttgggtcaccctgcattccatagccatgtgcttgtccctgtgctcccacggttcccaggggccaggctgggagcccacagccaccccactatgccgcaggccgccctacccaccttcaggcagcctatgggacgcagggccccatctgtccctcggtcgccgtgtggccagagtgggtccgtcgtccccaacactcgtgctcgctcagacactttggcaggatgtctggggcctcaccagcaggagcgcgtgcaagccgggcaggcggtccacctagacccacagcccctcgggagcaccccacctctgtgtgtgatgtagctttctctccctcagcctgcaagggtccgatttgccatcgaaaaagacaacctctacttttttcttttgtattttgataaacactgaagctggagctgttaaatttatcttggggaaacctcagaactggtctatttggtgtcgtggaacctcttactgctttcaatacacgattagtaatcaactgttttgtatacttgttttcagttttcatttcgacaaacaagcactgtaattatagctattagaataaaatctcttaactatt

SEQ ID NO: 337795 - DNA, 1149 bp, Homo sapiens
aggcctgcgaggcgaattcgacacgaggaccaacgcctggctcggagcagcagcctctgaggtgtccctggccagtgtccttccacctgtccacaagcatggggaacatcttcgccaacctcttcaagggcctttttggcaaaaaagaaatgcgcatcctcatggtgggcctggatgctgcagggaagaccacgatcctctacaagcttaagctgggtgagatcgtgaccaccattcccaccataggcttcaacgtggaaaccgtggagtacaagaacatcagcttcactgtgtgggacgtgggtggccaggacaagatccggcccctgtggcgccactacttccagaacacacaaggcctgatcttcgtggtggacagcaatgacagagagcgtgtgaacgaggcccgtgaggagctcatgaggatgctggccgaggacgagctccgggatgctgtcctcctggtgttcgccaacaagcaggacctccccaacgccatgaatgcggccgagatcacagacaagctggggctgcactcactacgccacaggaactggtacattcaggccacctgcgccaccagcggcgacgggctctatgaaggactggactggctgtccaatcagctccggaaccagaagtgaacgcgacccccctccctctcactcctcttgccctctgctttactctcatgtggcaaacgtgcggctcgtggtgtgagtgccagaagctgcctccgtggtttggtcaccgtgtgcatcgcaccgtgctgtaaatgtggcagacgcagcctgcggccaggctttttatttaatgtaaatagtttttgtttccaatgaggcagtttctggtactcctatgcaatattactcagctttttttattgtctccctcagcctgcaagggtccgatttgccatcgaaaaagacaacctctacttttttcttttgtattttgataaacactgaagctggagctgttaaatttatcttggggaaacctcagaactggtctatttggtgtcgtggaacctcttactgctttcaatacacgattagtaatcaactgttttgtatacttgttttcagttttcatttcgacaaacaagcactgtaattatagctattagaataaaatctcttaactatt

SEQ ID NO: 337796 - DNA, 1095 bp, Homo sapiens
  misc_feature (892)..(892): n is a, c, g, or t
  misc_feature (925)..(925): n is a, c, g, or t
  misc_feature (929)..(929): n is a, c, g, or t
  misc_feature (933)..(933): n is a, c, g, or t
  misc_feature (935)..(935): n is a, c, g, or t
  misc_feature (938)..(938): n is a, c, g, or t
aggcctgcgaggcgaattcgacacgaggaccaacgcctggctcggagcagcagcctctgaggtgtccctggccagtgtccttccacctgtccacaagcatggggaacatcttcgccaacctcttcaagggcctttttggcaaaaaagaaatgcgcatcctcatggtgggcctggatgctgcagggaagaccacgatcctctacaagcttaagctgggtgagatcgtgaccaccattcccaccataggcttcaacgtggaaaccgtggagtacaagaacatcagcttcactgtgtgggacgtgggtggccaggacaagatccggcccctgtggcgccactacttccagaacacacaaggcctgatcttcgtggtggacagcaatgacagagagcgtgtgaacgaggcccgtgaggagctcatgaggatgctggccgaggacgagctccgggatgctgtcctcctggtgttcgccaacaagcaggacctccccaacgccatgaatgcggccgagatcacagacaagctggggctgcactcactacgccacaggaactggtacattcaggccacctgcgccaccagcggcgacgggctctatgaaggactggactggctgtccaatcagctccggaaccagaagtgaacgcgacccccctccctctcactcctcttgccctctgctttactctcatgtggcaaacgtgcggctcgtggtgtgagtgccagaagctgcctccgtggtttggtcaccgtgtgcatcgcaccgtgctgtaaatgtggcagacgcagcctgcggccaggctttttatttaatgtaaatagtttttgtttccaatgaggcagtttctggtactcctatgcaatattactcagctttttttattgtatggnaaagagaatacatcctgtccgcgtaaggggttngccntggncnggnccgggtgcggttggggagccgcgcccctgttttgcggttgcaccttgggggcgtgccccccccggcctttcattccctcgcgctgtgccggggcgcccattttgcgtggcctcccctcccttggggggccgctggtcacctctcctcgtttccggcc

SEQ ID NO: 337797 - DNA, 685 bp, Homo sapiens
aggcctgcgaggcgaattcgacacgaggaccaacgcctggctcggagcagcagcctctgaggtgtccctggccagtgtccttccacctgtccacaagcatggggaacatcttcgccaacctcttcaagggcctttttggcaaaaaagaaatgcgcatcctcatggtgggcctggatgctgcagggaagaccacgatcctctacaagcttaagctgggtgagatcgtgaccaccattcccaccataggcttcaacgtggaaaccgtggagtacaagaacatcagcttcactgtgtgggacgtgggtggccaggacaagatccggcccctgtggcgccactacttccagaacacacaaggcctgatcttcgtggtggacagcaatgacagagagcgtgtgaacgaggcccgtgaggagctcatgaggatgctggccgaggacgagctccgggatgctgtcctcctggtgttcgccaacaagcaggacctccccaacgccatgaatgcggccgagatcacagacaagctggggctgcactcactacgccacaggaactggtacattcaggccacctgcgccaccagcggcgacgggctctatgaaggactggactggctgtccaatcagctccggaaccagaagtgaacgcgacttcgcgaatgggtactagctcgagtcgtatatga

SEQ ID NO: 337798 - DNA, 889 bp, Homo sapiens
aggcctgcgaggcgaattcgacacgaggaccaacgcctggctcggagcagcagcctctgaggtgtccctggccagtgtccttccacctgtccacaagcatggggaacatcttcgccaacctcttcaagggcctttttggcaaaaaagaaatgcgcatcctcatggtgggcctggatgctgcagggaagaccacgatcctctacaagcttaagctgggtgagatcgtgaccaccattcccaccataggcttcaacgtggaaaccgtggagtacaagaacatcagcttcactgtgtgggacgtgggtggccaggacaagatccggcccctgtggcgccactacttccagaacacacaaggcctgatcttcgtggtggacagcaatgacagagagcgtgtgaacgaggcccgtgaggagctcatgaggatgctggccgaggacgagctccgggatgctgtcctcctggtgttcgccaacaagcaggacctccccaacgccatgaatgcggccgagatcacagacactgtaattatagctattagaataaaatctcttaactattaaaaaaaaaaaaaaacaacatgccccacaccaagaacacaaagaaaaacaaggacgaagacaccccaagaaccccgagcacccacaacagcgaacacccaagctacgaagacatctaagcacggagcacgatctgacaggaactacctagacgatcgccaacaagagccaatcagaggaccacatgtcgtcacaacacggcaggggtcgcaaacacaacgcaccgccgaccaggacggcagttcatcgcacaagcgcagagacaatgagcagaacacacgagacggccgacagcacgacccccgccagcgcgccactacccagacagt

SEQ ID NO: 337799 - DNA, 516 bp, Homo sapiens
aggcctgcgaggcgaattcgacacgaggaccaacgcctggctcggagcagcagcctctgaggtgtccctggccagtgtccttccacctgtccacaagcatggggaacatcttcgccaacctcttcaagggcctttttggcaaaaaagaaatgcgcatcctcatggtgggcctggatgctgcagggaagaccacgatcctctacaagcttaagctgggtgagatcgtgaccaccattcccaccataggcttcaacgtggaaaccgtggagtacaagaacatcagcttcactgtgtgggacgtgggtggccaggacaagatccggcccctgtggcgccactacttccagaacacacaaggcctgatcttcgtggtggacagcaatgacagagagcgtgtgaacgaggcccgtgaggagctcatgaggatgctggccgaggacgagctccgggatgctgtcctcctggtgttcgccaacaagcaggccattcaacgcctccggccattcaacgcctccg

SEQ ID NO: 337800 - DNA, 376 bp, Homo sapiens
cactccccctccagcacttttcctcatgggagccagccctttccatagcctcaagtggaactaatctgtcacttctttctcttaccttctattcccgacaacagacatgtgtgcttggtgacttagattcatatctatagtattaatagacacctttaggatatgcatgttagaaacatgaatgttgtgttaagtttcctgtcttagaacccagaacttggcattgtagaatccatctgtgcagatcaatcatatcaaactgggatgtcactgagtttttagaggtttgtgaactttacaagagtcgctttgaaaggagctttgaaagcatgaagaatgtttgttagaagagccttaaaaaatgtaataaccggcc

SEQ ID NO: 337801 - DNA, 423 bp, Homo sapiens
ttttttgagacaggtttgcactctgttgcctggattggagtgcagtggcacaatcttggttcatcgcagcctcaacctcccaggctcaagtgattctctggcatcagccccctgagtatctgggactacaggcgtgtgacctcacacttggctaattttttttattttttgtagtgatgggggtcttactatgttccccaggctggtcttgtactcctggcctcacgtgatcctcttacctcagccttctaaagtgctaggattgcaggcgtgagctacaatgcctggcctacacacagagccctctttacgtgaaacaccacatgagactacaggcccaggatcccactgggagaagtgctgagataatctggaagatgggctgtcagagaagagagagatgcgcaccagtctctaccagat

SEQ ID NO: 337802 - DNA, 404 bp, Homo sapiens
ggccactgcacccagcctcacatagatgtttaatatcttttgttaagtttaaccctgagtatcgcgactgttgttgtaagcggggtcttctcttttcccataccttctagtgacttgttatttatatttaagtgtgtgtgtttatactaccatctttagtttttactttttcaattatttatcttgacttttccaggtatacaataatatcatatgaaaatagcaatagttttaactatttctattgcgttttctttcttttgtcaaattcctctgataaatacacccagtatagtgatggtggtggcagcatctgtgtcttccctgagcttagtattagtgcccaggtatgaaactgtgtattcgtactctctggagtatgaagctggttcctggcttctgtg

SEQ ID NO: 337803 - DNA, 214 bp, Homo sapiens
ggaacttatgttctccatcatctctcatctggactcctctctctgccacttcattagtgtccccctccatattactctccacaatagtctgggtaaggcaaatctgaaaatcttctccaacttaaaatccttcaatggcttcctattactctcagaataaactccaaagtctctactaaaaatacaaaattggccaggcgcggtggctcacacc

SEQ ID NO: 337804 - DNA, 350 bp, Homo sapiens
actgccagtaggttaggaatccctggaatcagccttcattcagtgtatgacttaagctcctgggtctgaatttctcccatctataaaatgagaataatgcggcttgccctgtctattgccctaggactgctgtgagtttcccaagacaggtgggaaagggcttggcaggtgaggaactgtcattacaattgcctgaggagcctaaacatctcctgagcaaagggcccacggagctgctgcccaatcccaggccctccatggactctgcatgccagaagctgaggatttctggcctggggcagaaatgaggggtctcatcctgtccaaggactaagttcgggaagattcat

SEQ ID NO: 337805 - DNA, 343 bp, Homo sapiens
atccaggaaacactcttatgggaagcttctctgtttttgttttggagcaactttgcacaattaatcacagcatcatttacagttataaaaagttggaaacaacctagaggcccaataagtagaaaatagatcatttatagtacacaaacttgacaatatattatacaatattaaaaacaacaatggcactaacataacaacattaagaagtacttatgttatatgtgggaaaaatgatgctgtattttgttatgaaaaatgcaaatggatatgttagtgccttcaaaagggcaagaggattatgaatgattaagcgtacttatttcctttattgtttttctta

SEQ ID NO: 337806 - DNA, 508 bp, Homo sapiens
gcggccgcctgaggggagcccgcgcctccgccgcctgagaggaggtcgagctgccgccggggcgatgctggaggagctggagtgcggggcgcccggcgccaggggagccgccacaggtcggttcgggcccgcgccgaggggaagagggggcgcggcgcgcggcctggacgggccgaggcggcgatgggaggcggacgggcctccgggcgccaagcctggtcctgcgggccgggcgttcaccccctggggccttctcatccccagcgagggcctggcgtccccaagggcacccttgttgacgttattgttgtagccgcgaccatattgtttgtttccggcgcttttgcgtcagttcgtccctccaggactctctggggcggtgggtcggaggggccgagaggggaaactgaggcccagggaagcgaaagggcttgccctgcaggttactggatgcgtttgtgtcccttgaccatgttggaccttgcagcgggtggggaaactgaggccc

SEQ ID NO: 337807 - DNA, 3525 bp, Homo sapiens
gcggccgcctgaggggagcccgcgcctccgccgcctgagaggaggtcgagctgccgccggggcgatgctggaggagctggagtgcggggcgcccggcgccaggggagccgccacagccatggattgcaaagatagaccagcttttccagttaagaagttaatacaagcccgtctgccgtttaagcgcctgaatcttgtcccaaaggggaaagccgatgacatgtcagacgatcagggtacttctgtgcaaagtaaaagccccgatttagaggcctctttggacaccttggaaaacaactgtcatgtgggttctgacatagactttagaccgaaacttgtcaacgggaagggtcccttagataactttttaagaaatagaatcgaaaccagtattggccagagcacagtcatcattgatttgacagaggactcgaatgagcagccagacagtcttgtggaccacaataaactaaattctgaagcctctccctccagggaggcaataaatggccagcgagaagacactggggatcagcaggggttgttgaaggccattcagaacgacaagttggcatttcctggagagaccctttcagacattccttgcaaaacagaggaggagggtgttggctgtggaggtgcagggaggagaggcgactcccaggaatgttcgccacggagctgcccggagctgacgagtggcccgagaatgtgccccagaaaggagcaggacagttggagtgaagctgggggcatcctgttcaaagggaaggtgcctatggtggtcttgcaggacatcttggctgtgagaccaccgcaaatcaagtcccttccagccacaccccaaggcaagaacatgacccctgagagtgaggtgctggaatctttccccgaagaagactctgtactcagccattcgtccctgagctctccctcttccaccagctcgcccgaggggccgcctgctcccccaaagcagcacagcagtaccagtcccttccccacctccacgcccctccgcagaataactaagaaattcgtcaaaggctctacagagaagaacaagctcagactgcaaagagatcaggagcgtctgggcaagcagctcaagttacgtgcagaaagggaagaaaaggagaagctgaaagaggaggccaagcgggccaaggaggaggccaagaagaagaaggaggaagagaaggagcttaaggaaaaggagaggcgggagaagcgggagaaggatgagaaggagaaggcggagaagcagcggctcaaggaggagcggcgcaaggagagacaggaagccctggaagccaaagcaaagagtcggctgaaatgtcatttgctgtctcacagggctaaacttgaggaaaaaaggaaaaaggaagaagagaaacggttaagagaagaagagaagcgcattaaagcagagaaggccgaaatcacgaggttcttccagaaaccaaagactccacaggcccccaagaccctggccggctcctgtgggaagtttgccccctttgaaattaaagagcacatggtcctggcccctcggcgtcggaccgctttccatccagacctctgcagtcagctggaccagctcctccagcagcagagcggcgagttctccttcttgaaagacctcaaaggccggcagcccctgaggtccggacccacgcacgtttccacccggaatgcagatatttttaacagtgatgtcgtcatcgtggagcgtgggaagggcgacggtgttcccgagaggaggaagtttggcaggatgaagctcctgcagttctgtgagaaccaccggcctgcctactggggtacctggaataagaagacggcactcatccgcgcgcgagacccctgggcccaggacacgaagctcctggactatgaggtggacagtgatgaggagtgggaagaagaggagcctggggagtccctgtcccacagtgagggggatgatgatgacgacatgggagaggatgaagatgaggacgatggtttctttgtgccccatgggtacctgtctgaggacgaaggtgtgacagaggagtgtgccgaccctgagaaccataaggtccgccagaaactgaaggccaaggagtgggacgagttcctggctaaggggaagcgctttcgcgtcctgcaacctgtgaagatcggctgcgtgtgggcggctgacagagactgcgcaggcgatgacctgaaggtactgcagcagttcgcagcctgcttcctggagaccctgccggcccaggaggagcagacgcccaaggcctccaagcgggagaggagagacgagcagatcctggcccagctgctgccgctcctgcacggcaatgtgaacgggagcaaggtcatcatccgggagttccaggagcactgccgccggggactgctcagcaaccacaccggcagcccgcggagcccctccaccacctacctgcacacccccacccccagcgaggatgccgccatcccctctaagtcccggctcaagcggctcatttccgagaactcagtgtatgagaagcggcctgacttcaggatgtgctggtacgtgcacccgcaggtgctacagagcttccagcaggagcacctgcccgtgccgtgccagtggagctatgtgacatcggtgccctcggcccccaaagaggacagtggcagcgtcccctccacggggcccagccagggcactcccatctcgctgaagaggaagtcagcgggcagcatgtgcatcacccaattcatgaagaagcgcaggcacgacggccagattggtgctgaagacatggacggcttccaggcagacacggaggaggaggaagaggaggagggcgactgtatgatcgtggatgtcccggatgctgtggaggtccaagccccgtgtggagccgcttccggagctgggggtggtgtgggggtggacaccggcaaggccaccctgaccgcgagcccactgggtgcatcctgagagcaggggtgacgtatgtagaatgcttagggtgtcctccccacagagcagatacttgaaccgactcaattcctgtgtaaagagcactttgtcctgcttcacggacctccccaaagtgtgcagagttctatataggatgctggattagttcctttgatatttgtaaaaattcccccaagagccgcatatgaatctgccctttaataaagcattattgagattgctggcctattggggaagcctgcgggcacaggagcaggcgtggaatccaatacttgtaaatgaattgaagcgtcaggaccacccgcctggccacgtgcgcgggcccctggacctaacgaggcagtgtataaacttattctctagccctgaaaaaaaacatcaacacgcaatacacaacataagcaaaacaacgaactaaaaaaccggggcgcatattagagggcggcgaaaaaagagttaataacggccacgcgacataagttccggcacacgtttttcaacaagggaaacagggcccccaaagggggcaatatagaggtatt

SEQ ID NO: 337808 - DNA, 3356 bp, Homo sapiens
gcggccgcctgaggggagcccgcgcctccgccgcctgagaggaggtcgagctgccgccggggcgatgctggaggagctggagtgcggggcgcccggcgccaggggagccgccacagccatggattgcaaagatagaccagcttttccagttaagaagttaatacaagcccgtctgccgtttaagcgcctgaatcttgtcccaaaggggaaagccgatgacatgtcagacgatcagggtacttctgtgcaaagtaaaagccccgatttagaggcctctttggacaccttggaaaacaactgtcatgtgggttctgacatagactttagaccgaaacttgtcaacgggaagggtcccttagataactttttaagaaatagaatcgaaaccagtattggccagagcacagtcatcattgatttgacagaggactcgaatgagcagccagacagtcttgtggaccacaataaactaaattctgaagcctctccctccagggaggcaataaatggccagcgagaagacactggggatcagcaggggttgttgaaggccattcagaacgacaagttggcatttcctggagagaccctttcagacattccttgcaaaacagaggaggagggtgttggctgtggaggtgcagggaggagaggcgactcccaggaatgttcgccacggagctgcccggagctgacgagtggcccgagaatgtgccccagaaaggagcaggacagttggagtgaagctgggggcatcctgttcaaagggaaggtgcctatggtggtcttgcaggacatcttggctgtgagaccaccgcaaatcaagtcccttccagccacaccccaaggcaagaacatgacccctgagagtgaggtgctggaatctttccccgaagaagactctgtactcagccattcgtccctgagctctccctcttccaccagctcgcccgaggggccgcctgctcccccaaagcagcacagcagtaccagtcccttccccacctccacgcccctccgcagaataactaagaaattcgtcaaaggctctacagagaagaacaagctcagactgcaaagagatcaggagcgtctgggcaagcagctcaagttacgtgcagaaagggaagaaaaggagaacagcggctcaaggaggagcggcgcaaggagagacaggaagccctggaggctaaacttgaggaaaaaaggaaaaaggaagaagagaaacggttaagagaagaagagaagcgcattaaagcagagaaggccgaaatcacgaggttcttccagaaaccaaagactccacaggcccccaagaccctggccggctcctgtgggaagtttgccccctttgaaattaaagagcacatggtcctggcccctcggcgtcggaccgctttccatccagacctctgcagtcagctggaccagctcctccagcagcagagcggcgagttctccttcttgaaagacctcaaaggccggcagcccctgaggtccggacccacgcacgtttccacccggaatgcagatatttttaacagtgatgtcgtcatcgtggagcgtgggaagggcgacggtgttcccgagaggaggaagtttggcaggatgaagctcctgcagttctgtgagaaccaccggcctgcctactggggtacctggaataagaagacggcactcatccgcgcgcgagacccctgggcccaggacacgaagctcctggactatgaggtggacagtgatgaggagtgggaagaagaggagcctggggagtccctgtcccacagtgagggggatgatgatgacgacatgggagaggatgaagatgaggacgatggtttctttgtgccccatgggtacctgtctgaggacgaaggtgtgacagaggagtgtgccgaccctgagaaccataaggtccgccagaaactgaaggccaaggagtgggacgagttcctggctaaggggaagcgctttcgcgtcctgcaacctgtgaagatcggctgcgtgtgggcggctgacagagactgcgcaggcgatgacctgaaggtactgcagcagttcgcagcctgcttcctggagaccctgccggcccaggaggagcagacgcccaaggcctccaagcgggagaggagagacgagcagatcctggcccagctgctgccgctcctgcacggcaatgtgaacgggagcaaggtcatcatccgggagttccaggagcactgccgccggggactgctcagcaaccacaccggcagcccgcggagcccctccaccacctacctgcacacccccacccccagcgaggatgccgccatcccctctaagtcccggctcaagcggctcatttccgagaactcagtgtatgagaagcggcctgacttcaggatgtgctggtacgtgcacccgcaggtgctacagagcttccagcaggagcacctgcccgtgccgtgccagtggagctatgtgacatcggtgccctcggcccccaaagaggacagtggcagcgtcccctccacggggcccagccagggcactcccatctcgctgaagaggaagtcagcgggcagcatgtgcatcacccaattcatgaagaagcgcaggcacgacggccagattggtgctgaagacatggacggcttccaggcagacacggaggaggaggaagaggaggagggcgactgtatgatcgtggatgtcccggatgctgtggaggtccaagccccgtgtggagccgcttccggagctgggggtggtgtgggggtggacaccggcaaggccaccctgaccgcgagcccactgggtgcatcctgagagcaggggtgacgtatgtagaatgcttagggtgtcctccccacagagcagatacttgaaccgactcaattcctgtgtaaagagcactttgtcctgcttcacggacctccccaaagtgtgcagagttctatataggatgctggattagttcctttgatatttgtaaaaattcccccaagagccgcatatgaatctgccctttaataaagcattattgagattgctggcctattggggaagcctgcgggcacaggagcaggcgtggaatccaatacttgtaaatgaattgaagcgtcaggaccacccgcctggccacgtgcgcgggcccctggacctaacgaggcagtgtataaacttattctctagccctgaaaaaaaacatcaacacgcaatacacaacataagcaaaacaacgaactaaaaaaccggggcgcatattagagggcggcgaaaaaagagttaataacggccacgcgacataagttccggcacacgtttttcaacaagggaaacagggcccccaaagggggcaatatagaggtatt

SEQ ID NO: 337809 - DNA, 2719 bp, Homo sapiens
gcggccgcctgaggggagcccgcgcctccgccgcctgagaggaggtcgagctgccgccggggcgatgctggaggagctggagtgcggggcgcccggcgccaggggagccgccacagccatggattgcaaagatagaccagcttttccagttaagaagttaatacaagcccgtctgccgtttaagcgcctgaatcttgtcccaaaggggaaagccgatgacatgtcagacgatcagggtacttctgtgcaaagtaaaagccccgatttagaggcctctttggacaccttggaaaacaactgtcatgtgggttctgacatagactttagaccgaaacttgtcaacgggaagggtcccttagataactttttaagaaatagaatcgaaaccagtattggccagagcacagtcatcattgatttgacagaggactcgaatgagcagccagacagtcttgtggaccacaataaactaaattctgaagcctctccctccagggaggcaataaatggccagcgagaagacactggggatcagcaggggttgttgaaggccattcagaacgacaagttggcatttcctggagagaccctttcagacattccttgcaaaacagaggaggagggtgttggctgtggaggtgcagggaggagaggcgactcccaggaatgttcgccacggagctgcccggagctgacgagtggcccgagaatgtgccccagaaaggagcaggacagttggagtgaagctgggggcatcctgttcaaagggaaggtgcctatggtggtcttgcaggacatcttggctgtgagaccaccgcaaatcaagtcccttccagccacaccccaaggcaagaacatgacccctgagagtgaggtgctggaatctttccccgaagaagactctgtactcagccattcgtccctgagctctccctcttccaccagctcgcccgaggggccgcctgctcccccaaagcagcacagcagtaccagtcccttccccacctccacgcccctccgcagaataactaagaaattcgtcaaaggctctacagagaagaacaagctcagactgcaaagagatcaggagcgtctgggcaagcagctcaagttacgtgcagaaagggaagaaaaggagaagctgaaagaggaggccaagcgggccaaggaggaggccaagaagaagaaggaggaagagaaggagcttaaggaaaaggagaggcgggagaagcgggagaaggatgagaaggagaaggcggagaagcagcggctcaaggaggagcggcgcaaggagagacaggaagccctggaggctaaacttgaggaaaaaaggaaaaaggaagaagagaaacggttaagagaagaagagaagcgcattaaagcagagaaggccgaaatcacgaggttcttccagaaaccaaagactccacaggcccccaagaccctggccggctcctgtgggaagtttgccccctttgaaattaaagagcacatggtcctggcccctcggcgtcggaccgctttccatccagacctctgcagtcagctggaccagctcctccagcagcagagcggcgagttctccttcttgaaagacctcaaaggccggcagcccctgaggtccggacccacgcacgtttccacccggaatgcagatatttttaacagtgatgtcgtcatcgtggagcgtgggaagggcgacggtgttcccgagaggaggaagtttggcaggatgaagctcctgcagttctgtgagaaccaccggcctgcctactggggtacctggaataagaagacggcactcatccgcgcgcgagacccctgggcccaggacacgaagctcctggactatgaggtggacagtgatgaggagtgggaagaagaggagcctggggagtccctgtcccacagtgagggggatgatgatgacgacatgggagaggatgaagatgaggacgatggtttctttgtgccccatgggtacctgtctgaggacgaaggtgtgacagaggagtgtgccgaccctgagaaccataaggtccgccagaaactgaaggccaaggagtgggacgagttcctggctaaggggaagcgctttcgcgtcctgcaacctgtgaagatcggctgcgtgtgggcggctgacagagactgcgcaggcgatgacctgaaggtactgcagcagttcgcagcctgcttcctggagaccctgccggcccaggaggcagatacttgaaccgactcaattcctgtgtaaagagcactttgtcctgcttcacggacctccccaaagtgtgcagagttctatataggatgctggattagttcctttgatatttgtaaaaattcccccaagagccgcatatgaatctgccctttaataaagcattattgagattgctggcctattggggaagcctgcgggcacaggagcaggcgtggaatccaatacttgtaaatgaattgaagcgtcaggaccacccgcctggccacgtgcgcgggcccctggacctaacgaggcagtgtataaacttattctctagccctgaaaaaaaacatcaacacgcaatacacaacataagcaaaacaacgaactaaaaaaccggggcgcatattagagggcggcgaaaaaagagttaataacggccacgcgacataagttccggcacacgtttttcaacaagggaaacagggcccccaaagggggcaatatagaggtatt

SEQ ID NO: 337810 - DNA, 3429 bp, Homo sapiens
gcggccgcctgaggggagcccgcgcctccgccgcctgagaggaggtcgagctgccgccggggcgatgctggaggagctggagtgcggggcgcccggcgccaggggagccgccacagcccgtctgccgtttaagcgcctgaatcttgtcccaaaggggaaagccgatgacatgtcagacgatcagggtacttctgtgcaaagtaaaagccccgatttagaggcctctttggacaccttggaaaacaactgtcatgtgggttctgacatagactttagaccgaaacttgtcaacgggaagggtcccttagataactttttaagaaatagaatcgaaaccagtattggccagagcacagtcatcattgatttgacagaggactcgaatgagcagccagacagtcttgtggaccacaataaactaaattctgaagcctctccctccagggaggcaataaatggccagcgagaagacactggggatcagcaggggttgttgaaggccattcagaacgacaagttggcatttcctggagagaccctttcagacattccttgcaaaacagaggaggagggtgttggctgtggaggtgcagggaggagaggcgactcccaggaatgttcgccacggagctgcccggagctgacgagtggcccgagaatgtgccccagaaaggagcaggacagttggagtgaagctgggggcatcctgttcaaagggaaggtgcctatggtggtcttgcaggacatcttggctgtgagaccaccgcaaatcaagtcccttccagccacaccccaaggcaagaacatgacccctgagagtgaggtgctggaatctttccccgaagaagactctgtactcagccattcgtccctgagctctccctcttccaccagctcgcccgaggggccgcctgctcccccaaagcagcacagcagtaccagtcccttccccacctccacgcccctccgcagaataactaagaaattcgtcaaaggctctacagagaagaacaagctcagactgcaaagagatcaggagcgtctgggcaagcagctcaagttacgtgcagaaagggaagaaaaggagaagctgaaagaggaggccaagcgggccaaggaggaggccaagaagaagaaggaggaagagaaggagcttaaggaaaaggagaggcgggagaagcgggagaaggatgagaaggagaaggcggagaagcagcggctcaaggaggagcggcgcaaggagagacaggaagccctggaggctaaacttgaggaaaaaaggaaaaaggaagaagagaaacggttaagagaagaagagaagcgcattaaagcagagaaggccgaaatcacgaggttcttccagaaaccaaagactccacaggcccccaagaccctggccggctcctgtgggaagtttgccccctttgaaattaaagagcacatggtcctggcccctcggcgtcggaccgctttccatccagacctctgcagtcagctggaccagctcctccagcagcagagcggcgagttctccttcttgaaagacctcaaaggccggcagcccctgaggtccggacccacgcacgtttccacccggaatgcagatatttttaacagtgatgtcgtcatcgtggagcgtgggaagggcgacggtgttcccgagaggaggaagtttggcaggatgaagctcctgcagttctgtgagaaccaccggcctgcctactggggtacctggaataagaagacggcactcatccgcgcgcgagacccctgggcccaggacacgaagctcctggactatgaggtggacagtgatgaggagtgggaagaagaggagcctggggagtccctgtcccacagtgagggggatgatgatgacgacatgggagaggatgaagatgaggacgatggtttctttgtgccccatgggtacctgtctgaggacgaaggtgtgacagaggagtgtgccgaccctgagaaccataaggtccgccagaaactgaaggccaaggagtgggacgagttcctggctaaggggaagcgctttcgcgtcctgcaacctgtgaagatcggctgcgtgtgggcggctgacagagactgcgcaggcgatgacctgaaggtactgcagcagttcgcagcctgcttcctggagaccctgccggcccaggaggagcagacgcccaaggcctccaagcgggagaggagagacgagcagatcctggcccagctgctgccgctcctgcacggcaatgtgaacgggagcaaggtcatcatccgggagttccaggagcactgccgccggggactgctcagcaaccacaccggcagcccgcggagcccctccaccacctacctgcacacccccacccccagcgaggatgccgccatcccctctaagtcccggctcaagcggctcatttccgagaactcagtgtatgagaagcggcctgacttcaggatgtgctggtacgtgcacccgcaggtgctacagagcttccagcaggagcacctgcccgtgccgtgccagtggagctatgtgacatcggtgccctcggcccccaaagaggacagtggcagcgtcccctccacggggcccagccagggcactcccatctcgctgaagaggaagtcagcgggcagcatgtgcatcacccaattcatgaagaagcgcaggcacgacggccagattggtgctgaagacatggacggcttccaggcagacacggaggaggaggaagaggaggagggcgactgtatgatcgtggatgtcccggatgctgtggaggtccaagccccgtgtggagccgcttccggagctgggggtggtgtgggggtggacaccggcaaggccaccctgaccgcgagcccactgggtgcatcctgagagcaggggtgacgtatgtagaatgcttagggtgtcctccccacagagcagatacttgaaccgactcaattcctgtgtaaagagcactttgtcctgcttcacggacctccccaaagtgtgcagagttctatataggatgctggattagttcctttgatatttgtaaaaattcccccaagagccgcatatgaatctgccctttaataaagcattattgagattgctggcctattggggaagcctgcgggcacaggagcaggcgtggaatccaatacttgtaaatgaattgaagcgtcaggaccacccgcctggccacgtgcgcgggcccctggacctaacgaggcagtgtataaacttattctctagccctgaaaaaaaacatcaacacgcaatacacaacataagcaaaacaacgaactaaaaaaccggggcgcatattagagggcggcgaaaaaagagttaataacggccacgcgacataagttccggcacacgtttttcaacaagggaaacagggcccccaaagggggcaatatagaggtatt

SEQ ID NO: 337811 - DNA, 1362 bp, Homo sapiens
gcggccgcctgaggggagcccgcgcctccgccgcctgagaggaggtcgagctgccgccggggcgatgctggaggagctggagtgcggggcgcccggcgccaggggagccgccacagccatggattgcaaagatagaccagcttttccagttaagaagttaatacaagcccgtctgccgtttaagcgcctgaatcttgtcccaaaggggaaagccgatgacatgtcagacgatcagggtacttctgtgcaaagtaaaagccccgatttagaggcctctttggacaccttggaaaacaactgtcatgtgggttctgacatagactttagaccgaaacttgtcaacgggaagggtcccttagataactttttaagaaatagaatcgaaaccagtattggccagagcacagtcatcattgatttgacagaggactcgaatgagcagccagacagtcttgtggaccacaataaactaaattctgaagcctctccctccagggaggcaataaatggccagcgagaagacactggggatcagcaggggttgttgaaggccattcagaacgacaagttggcatttcctggagagaccctttcagacattccttgcaaaacagaggaggagggtgttggctgtggaggtgcagggaggagaggcgactcccaggaatgttcgccacggagctgcccggagctgacgagtggcccgagaatgtgccccagaaaggagcaggacagttggagtgaagctgggggcatcctgttcaaagggaaggtgcctatggtggtcttgcaggacatcttggctgtgagaccaccgcaaatcaagtcccttccagccacaccccaaggcaagaacatgacccctgagagtgaggtgctggaatctttccccgaagaagactctgtactcagccattcgtccctgagctctccctcttccaccagctcgcccgaggggccgcctgctcccccaaagcagcacagcagtaccagtcccttccccacctccacgcccctccgcagaataactaagaaattcgtcaaaggctctacagagaagaacaagctcagactgcaaagagatcaggagcgtctgggcaagcagctcaagttacgtgcagaaagggaagaaaaggagaagctgaaagaggaggccaagcgggccaaggaggaggccaagaagaagaaggaggaagagaaggagcttaaggaaaaggagaggcgggagaagcgggagaaggatgagaaggagaaggcggagaagcagcggctcaaggaggagcggcgcaaggagagacaggaagccctggagctaaacttgaggaaaaaaggaaaaggatggtcatggatccagagatctcc

SEQ ID NO: 337812 - DNA, 2355 bp, Homo sapiens
cctgaaatgaagatgtggttctgatgaggaagaagaaaagaaggaggaggccaagaagaagaaggaggaagagaaggagcttaaggaaaaggagaggcgggagaagcgggagaaggatgagaaggagaaggcggagaagcagcggctcaaggaggagcggcgcaaggagagacaggaagccctggaggctaaacttgaggaaaaaaggaaaaaggaagaagagaaacggttaagagaagaagagaagcgcattaaagcagagaaggccgaaatcacgaggttcttccagaaaccaaagactccacaggcccccaagaccctggccggctcctgtgggaagtttgccccctttgaaattaaagagcacatggtcctggcccctcggcgtcggaccgctttccatccagacctctgcagtcagctggaccagctcctccagcagcagagcggcgagttctccttcttgaaagacctcaaaggccggcagcccctgaggtccggacccacgcacgtttccacccggaatgcagatatttttaacagtgatgtcgtcatcgtggagcgtgggaagggcgacggtgttcccgagaggaggaagtttggcaggatgaagctcctgcagttctgtgagaaccaccggcctgcctactggggtacctggaataagaagacggcactcatccgcgcgcgagacccctgggcccaggacacgaagctcctggactatgaggtggacagtgatgaggagtgggaagaagaggagcctggggagtccctgtcccacagtgagggggatgatgatgacgacatgggagaggatgaagatgaggacgatggtttctttgtgccccatgggtacctgtctgaggacgaaggtgtgacagaggagtgtgccgaccctgagaaccataaggtccgccagaaactgaaggccaaggagtgggacgagttcctggctaaggggaagcgctttcgcgtcctgcaacctgtgaagatcggctgcgtgtgggcggctgacagagactgcgcaggcgatgacctgaaggtactgcagcagttcgcagcctgcttcctggagaccctgccggcccaggaggagcagacgcccaaggcctccaagcgggagaggagagacgagcagatcctggcccagctgctgccgctcctgcacggcaatgtgaacgggagcaaggtcatcatccgggagttccaggagcactgccgccggggactgctcagcaaccacaccggcagcccgcggagcccctccaccacctacctgcacacccccacccccagcgaggatgccgccatcccctctaagtcccggctcaagcggctcatttccgagaactcagtgtatgagaagcggcctgacttcaggatgtgctggtacgtgcacccgcaggtgctacagagcttccagcaggagcacctgcccgtgccgtgccagtggagctatgtgacatcggtgccctcggcccccaaagaggacagtggcagcgtcccctccacggggcccagccagggcactcccatctcgctgaagaggaagtcagcgggcagcatgtgcatcacccaattcatgaagaagcgcaggcacgacggccagattggtgctgaagacatggacggcttccaggcagacacggaggaggaggaagaggaggagggcgactgtatgatcgtggatgtcccggatgctgtggaggtccaagccccgtgtggagccgcttccggagctgggggtggtgtgggggtggacaccggcaaggccaccctgaccgcgagcccactgggtgcatcctgagagcaggggtgacgtatgtagaatgcttagggtgtcctccccacagagcagatacttgaaccgactcaattcctgtgtaaagagcactttgtcctgcttcacggacctccccaaagtgtgcagagttctatataggatgctggattagttcctttgatatttgtaaaaattcccccaagagccgcatatgaatctgccctttaataaagcattattgagattgctggcctattggggaagcctgcgggcacaggagcaggcgtggaatccaatacttgtaaatgaattgaagcgtcaggaccacccgcctggccacgtgcgcgggcccctggacctaacgaggcagtgtataaacttattctctagccctgaaaaaaaacatcaacacgcaatacacaacataagcaaaacaacgaactaaaaaaccggggcgcatattagagggcggcgaaaaaagagttaataacggccacgcgacataagttccggcacacgtttttcaacaagggaaacagggcccccaaagggggcaatatagaggtatt

SEQ ID NO: 337813 - DNA, 2004 bp, Homo sapiens
gcggccgcctgaggggagcccgcgcctccgccgcctgagaggaggtcgagctgccgccggggcgatgctggaggagctggagtgcggggcgcccggcgccaggggagccgccacagccatggattgcaaagatagaccagcttttccagttaagaagttaatacaagcccgtctgccgtttaagcgcctgaatcttgtcccaaaggggaaagccgatgacatgtcagacgatcagggtacttctgtgcaaagtaaaagccccgatttagaggcctctttggacaccttggaaaacaactgtcatgtgggttctgacatagactttagaccgaaacttgtcaacgggaagggtcccttagataactttttaagaaatagaatcgaaaccagtattggccagagcacagtcatcattgatttgacagaggactcgaatgagcagccagacagtcttgtggaccacaataaactaaattctgaagcctctccctccagggaggcaataaatggccagcgagaagacactggggatcagcaggggttgttgaaggccattcagaacgacaagttggcatttcctggagagaccctttcagacattccttgcaaaacagaggaggagggtgttggctgtggaggtgcagggaggagaggcgactcccaggaatgttcgccacggagctgcccggagctgacgagtggcccgagaatgtgccccagaaaggagcaggacagttggagtgaagctgggggcatcctgttcaaagggaaggtgcctatggtggtcttgcaggacatcttggctgtgagaccaccgcaaatcaagtcccttccagccacaccccaaggcaagaacatgacccctgagagtgaggtgctggaatctttccccgaagaagactctgtactcagccattcgtccctgagctctccctcttccaccagctcgcccgaggggccgcctgctcccccaaagcagcacagcagtaccagtcccttccccacctccacgcccctccgcagaataactaagaaattcgtcaaaggctctacagagaagaacaagctcagactgcaaagagatcaggagcgtctgggcaagcagctcaagttacgtgcagaaagggaagaaaaggagaagctgaaagaggaggccaagcgggccaaggaggaggccaagaagaagaaggaggaagagaaggagcttaaggaaaaggagaggcgggagaagcgggagaaggatgagaaggagaaggcggagaagcagcggctcaaggaggagcggcgcaaggagagacaggaagccctggaagccaaagcaaagagtcggctgaaatgtcatttgctgtctcacagggctaaacttgaggaaaaaaggaaaaaggaagaagagaaacggttaagagaagaagagaagcgcattaaagcagagaaggccgaaatcacgaggttcttccagaaaccaaagactccacaggcccccaagaccctggccggctcctgtgggaagtttgccccctttgaaattaaagagcacatggtcctggcccctcggcgtcggaccgctttccatccagacctctgcagtcagctggaccagctcctccagcagcagagcggcgagttctccttcttgaaagacctcaaaggccaagcgggccaaggaggaggccaagaagaagaaggaggaagagaaggagcttaaggaaaaggagaggcgggagaagcgggagaaggatgagaaggagaacgcgagcccactgggtgcatcctgagagcaggggtgacgtatgtagaatgcttagggtgtcctccccacagagcagatacttgaaccgactcaattcctgtgtaaagagcactttgtcctgcttcacggacctccccaaagtgtgcagagttctatataggatgctggattagttcctttgatatttgtaaaaattcccccaagagccgcatatgaatctgccctttaataaagcattattgagattgctggcc

SEQ ID NO: 337814 - DNA, 571 bp, Homo sapiens
agggaaggctgcactgaggcagcaagggagggccaggtggatttctggagcactcgccaaagaggaagtacagaggccctgcagcaggctgcgtgggaggagtgtgcccgggtggtggggggcaggcagggtcaacctgagagcaggtgagcaggtcacctctagaagaggcacaacgccccagcctctgcctgtccccactgtcaggtggagggtcccgccctggggttgttgcaggccccatgaggcagcagggtggggtcttcccccagggagcccagagggcccagccagctcaagaccctccctctcttgccctgcagaggtccaagccccgtgtggagccgcttccggagctgggggtggtgtgggggtggacaccggcaaggccaccctgaccgcgagcccactgggtgcatcctgagagcaggggtgacgtatgtagaatgcttagggtgtcctccccacagagcagatacttgaaccgactcaattcctgtgtaaagagcactttgtcctgcttcacggacctccccaaagtgtgcagagttctatataggatgctggatta

SEQ ID NO: 337815 - DNA, 3480 bp, Homo sapiens
gcggccgcctgaggggagcccgcgcctccgccgcctgagaggaggtcgagctgccgccggggcgatgctggaggagctggagtgcggggcgcccggcgccaggggagccgccacagccatggattgcaaagatagaccagcttttccagttaagaagttaatacaagcccgtctgccgtttaagcgcctgaatcttgtcccaaaggggaaagccgatgacatgtcagacgatcagggtacttctgtgcaaagtaaaagccccgatttagaggcctctttggacaccttggaaaacaactgtcatgtgggttctgacatagactttagaccgaaacttgtcaacgggaagggtcccttagataactttttaagaaatagaatcgaaaccagtattggccagagcacagtcatcattgatttgacagaggactcgaatgagcagccagacagtcttgtggaccacaataaactaaattctgaagcctctccctccagggaggcaataaatggccagcgagaagacactggggatcagcaggggttgttgaaggccattcagaacgacaagttggcatttcctggagagaccctttcagacattccttgcaaaacagaggaggagggtgttggctgtggaggtgcagggaggagaggcgactcccaggaatgttcgccacggagctgcccggagctgacgagtggcccgagaatgtgccccagaaaggagcaggacagttggagtgaagctgggggcatcctgttcaaagggaaggtgcctatggtggtcttgcaggacatcttggctgtgagaccaccgcaaatcaagtcccttccagccacaccccaaggcaagaacatgacccctgagagtgaggtgctggaatctttccccgaagaagactctgtactcagccattcgtccctgagctctccctcttccaccagctcgcccgaggggccgcctgctcccccaaagcagcacagcagtaccagtcccttccccacctccacgcccctccgcagaataactaagaaattcgtcaaaggctctacagagaagaacaagctcagactgcaaagagatcaggagcgtctgggcaagcagctcaagttacgtgcagaaagggaagaaaaggagaagctgaaagaggaggccaagcgggccaaggaggaggccaagaagaagaaggaggaagagaaggagcttaaggaaaaggagaggcgggagaagcgggagaaggatgagaaggagaaggcggagaagcagcggctcaaggaggagcggcgcaaggagagacaggaagccctggaggctaaacttgaggaaaaaaggaaaaaggaagaagagaaacggttaagagaagaagagaagcgcattaaagcagagaaggccgaaatcacgaggttcttccagaaaccaaagactccacaggcccccaagaccctggccggctcctgtgggaagtttgccccctttgaaattaaagagcacatggtcctggcccctcggcgtcggaccgctttccatccagacctctgcagtcagctggaccagctcctccagcagcagagcggcgagttctccttcttgaaagacctcaaaggccggcagcccctgaggtccggacccacgcacgtttccacccggaatgcagatatttttaacagtgatgtcgtcatcgtggagcgtgggaagggcgacggtgttcccgagaggaggaagtttggcaggatgaagctcctgcagttctgtgagaaccaccggcctgcctactggggtacctggaataagaagacggcactcatccgcgcgcgagacccctgggcccaggacacgaagctcctggactatgaggtggacagtgatgaggagtgggaagaagaggagcctggggagtccctgtcccacagtgagggggatgatgatgacgacatgggagaggatgaagatgaggacgatggtttctttgtgccccatgggtacctgtctgaggacgaaggtgtgacagaggagtgtgccgaccctgagaaccataaggtccgccagaaactgaaggccaaggagtgggacgagttcctggctaaggggaagcgctttcgcgtcctgcaacctgtgaagatcggctgcgtgtgggcggctgacagagactgcgcaggcgatgacctgaaggtactgcagcagttcgcagcctgcttcctggagaccctgccggcccaggaggagcagacgcccaaggcctccaagcgggagaggagagacgagcagatcctggcccagctgctgccgctcctgcacggcaatgtgaacgggagcaaggtcatcatccgggagttccaggagcactgccgccggggactgctcagcaaccacaccggcagcccgcggagcccctccaccacctacctgcacacccccacccccagcgaggatgccgccatcccctctaagtcccggctcaagcggctcatttccgagaactcagtgtatgagaagcggcctgacttcaggatgtgctggtacgtgcacccgcaggtgctacagagcttccagcaggagcacctgcccgtgccgtgccagtggagctatgtgacatcggtgccctcggcccccaaagaggacagtggcagcgtcccctccacggggcccagccagggcactcccatctcgctgaagaggaagtcagcgggcagcatgtgcatcacccaattcatgaagaagcgcaggcacgacggccagattggtgctgaagacatggacggcttccaggcagacacggaggaggaggaagaggaggagggcgactgtatgatcgtggatgtcccggatgctgtggaggtccaagccccgtgtggagccgcttccggagctgggggtggtgtgggggtggacaccggcaaggccaccctgaccgcgagcccactgggtgcatcctgagagcaggggtgacgtatgtagaatgcttagggtgtcctccccacagagcagatacttgaaccgactcaattcctgtgtaaagagcactttgtcctgcttcacggacctccccaaagtgtgcagagttctatataggatgctggattagttcctttgatatttgtaaaaattcccccaagagccgcatatgaatctgccctttaataaagcattattgagattgctggcctattggggaagcctgcgggcacaggagcaggcgtggaatccaatacttgtaaatgaattgaagcgtcaggaccacccgcctggccacgtgcgcgggcccctggacctaacgaggcagtgtataaacttattctctagccctgaaaaaaaacatcaacacgcaatacacaacataagcaaaacaacgaactaaaaaaccggggcgcatattagagggcggcgaaaaaagagttaataacggccacgcgacataagttccggcacacgtttttcaacaagggaaacagggcccccaaagggggcaatatagaggtatt

SEQ ID NO: 337816 - DNA, 3164 bp, Homo sapiens
gcggccgcctgaggggagcccgcgcctccgccgcctgagaggaggtcgagctgccgccggggcgatgctggaggagctggagtgcggggcgcccggcgccaggggagccgccacagccatggattgcaaagatagaccagcttttccagttaagaagttaatacaagcccgtctgccgtttaagcgcctgaatcttgtcccaaaggggaaagccgatgacatgtcagacgatcagggtacttctgtgcaaagtaaaagccccgatttagaggcctctttggacaccttggaaaacaactgtcatgtgggttctgacatagactttagaccgaaacttgtcaacgggaagggtcccttagataactttttaagaaatagaatcgaaaccagtattggccagagcacagtcatcattgatttgacagaggactcgaatgagcagccagacagtcttgtggaccacaataaactaaattctgaagcctctccctccagggaggcaataaatggccagcgagaagacactggggatcagcaggggttgttgaaggccattcagaacgacaagttggcatttcctggagagaccctttcagacattccttgcaaaacagaggaggagggtgttggctgtggaggtgcagggaggagaggcgactcccaggaatgttcgccacggagctgcccggagctgacgagtggcccgagaatgtgccccagaaaggagcaggacagttggagtgaagctgggggcatcctgttcaaagggaaggtgcctatggtggtcttgcaggacatcttggctgtgagaccaccgcaaatcaagtcccttccagccacaccccaaggcaagaacatgacccctgagagtgaggtgctggaatctttccccgaagaagactctgtactcagccattcgtccctgagctctccctcttccaccagctcgcccgaggggccgcctgctcccccaaagcagcacagcagtaccagtcccttccccacctccacgcccctccgcagaataactaagaaattcgtcaaaggctctacagagaagaacaagctcagactgcaaagagatcaggagcgtctgggcaagcagctcaagttacgtgcagaaagggaagaaaaggagaagctgaaagaggaggccaagcgggccaaggaggaggccaagaagaagaaggaggaagagaaggagcttaaggaaaaggagaggcgggagaagcgggagaaggatgagaaggagaaggcggagaagcagcggctcaaggaggagcggcgcaaggagagacaggaagccctggaggctaaacttgaggaaaaaaggaaaaaggaagaagagaaacggttaagagaagaagagaagcgcattaaagcagagaaggccgaaatcacgaggttcttccagaaaccaaagactccacaggcccccaagaccctggccggctcctgtgggaagtttgccccctttgaaattaaagagcacatggtcctggcccctcggcgtcggaccgctttccatccagacctctgcagtcagctggaccagctcctccagcagcagagcggcgagttctccttcttgaaagacctcaaaggccggcagcccctgaggtccggacccacgcacgtttccacccggaatgcagatatttttaacagtgatgtcgtcatcgtggagcgtgggaagggcgacggtgttcccgagaggaggaagtttggcaggatgaagctcctgcagttctgtgagaaccaccggcctgcctactggggtacctggaataagaagacggcactcatccgcgcgcgagacccctgggcccaggacacgaagctcctggactatgaggtggacagtgatgaggagtgggaagaagaggagcctggggagtccctgtcccacagtgagggggatgatgatgacgacatgggagaggatgaagatgaggacgatggtttctttgtgccccatgggtacctgtctgaggacgaaggtgtgacagaggagtgtgccgaccctgagaaccataaggtccgccagaaactgaaggccaaggagtgggacgagttcctggctaaggggaagcgctttcgcgtcctgcaacctgtgaagatcggctgcgtgtgggcggctgacagagactgcgcaggcgatgacctgaaggtactgcagcagttcgcagcctgcttcctggagaccctgccggcccaggaggagcagacgcccaaggcctccaagcgggagaggagagacgagcagatcctggcccagctgctgccgctcctgcacggcaatgtgaacgggagcaaggtcatcatccgggagttccaggagcactgccgccggggactgctcagcaaccacaccggcagcccgcggagcccctccaccacctacctgcacacccccacccccagcgaggatgccgccatcccctctaagtcccggctcaagcggctcatttccgagaactcagtgtatgagaagcggcctgacttcaggatgtgctggtacgtgcacccgcaggtgctacagagcttccagcaggagcacctgcccgtgccgtgccagtggagctatgtgacatcggtgccctcggcccccaaagaggacagtggcagcgtcccctccacggggcccagccagggcactcccatctcgctgaagaggaagtcagcgggcagcatgtgcatcacccaattcatgaagaagcgcaggcacgacggccagattggtgctgaagacatggacggcttccaggcagacacggaggaggaggaagaggaggagggcgactgtatgatcgtggatgtcccggatgctgtggaggtccaagccccgtgtggagccgcttccggagctgggggtggtgtgggggtggacaccggcaaggccaccctgaccgcgagcccactgggtgcatcctgagagcaggggtgacgtatgtagaatgcttagggtgtcctccccacagagcagatacttgaaccgactcaattcctgtgtaaagagcactttgtcctgcttcacggacctccccaaagtgtgcagagttctatataggatgctggattagttcctttgatatttgtaaaaattcccccaagagccgcatatgaatctgccctttaataaagcattattgagattgctggcc

SEQ ID NO: 337817 - DNA, 2939 bp, Homo sapiens
gcggccgcctgaggggagcccgcgcctccgccgcctgagaggaggtcgagctgccgccggggcgatgctggaggagctggagtgcggggcgcccggcgccaggggagccgccacagccatggattgcaaagatagaccagcttttccagttaagaagttaatacaagcccgtctgccgtttaagcgcctgaatcttgtcccaaaggggaaagccgatgacatgtcagacgatcagggtacttctgtgcaaagtaaaagccccgatttagaggcctctttggacaccttggaaaacaactgtcatgtgggttctgacatagactttagaccgaaacttgtcaacgggaagggtcccttagataactttttaagaaatagaatcgaaaccagtattggccagagcacagtcatcattgatttgacagaggactcgaatgagcagccagacagtcttgtggaccacaataaactaaattctgaagcctctccctccagggaggcaataaatggccagcgagaagacactggggatcagcaggggttgttgaaggccattcagaacgacaagttggcatttcctggagagaccctttcagacattccttgcaaaacagaggaggagggtgttggctgtggaggtgcagggaggagaggcgactcccaggaatgttcgccacggagctgcccggagctgacgagtggcccgagaatgtgccccagaaaggagcaggacagttggagtgaagctgggggcatcctgttcaaagggaaggtgcctatggtggtcttgcaggacatcttggctgtgagaccaccgcaaatcaagtcccttccagccacaccccaaggcaagaacatgacccctgagagtgaggtgctggaatctttccccgaagaagactctgtactcagccattcgtccctgagctctccctcttccaccagctcgcccgaggggccgcctgctcccccaaagcagcacagcagtaccagtcccttccccacctccacgcccctccgcagaataactaagaaattcgtcaaaggctctacagagaagaacaagctcagactgcaaagagatcaggagcgtctgggcaagcagctcaagttacgtgcagaaagggaagaaaaggagaagctgaaagaggaggccaagcgggccaaggaggaggccaagaagaagaaggaggaagagaaggagcttaaggaaaaggagaggcgggagaagcgggagaaggatgagaaggagaaggcggagaagcagcggctcaaggaggagcggcgcaaggagagacaggaagccctggaggctaaacttgaggaaaaaaggaaaaaggaagaagagaaacggttaagagaagaagagaagcgcattaaagcagagaaggccgaaatcacgaggttcttccagaaaccaaagactccacaggcccccaagaccctggccggctcctgtgggaagtttgccccctttgaaattaaagagcacatggtcctggcccctcggcgtcggaccgctttccatccagacctctgcagtcagctggaccagctcctccagcagcagagcggcgagttctccttcttgaaagacctcaaaggccggcagcccctgaggtccggacccacgcacgtttccacccggaatgcagatatttttaacagtgatgtcgtcatcgtggagcgtgggaagggcgacggtgttcccgagaggaggaagtttggcaggatgaagctcctgcagttctgtgagaaccaccggcctgcctactggggtacctggaataagaagacggcactcatccgcgcgcgagacccctgggcccaggacacgaagctcctggactatgaggtggacagtgatgaggagtgggaagaagaggagcctggggagtccctgtcccacagtgagggggatgatgatgacgacatgggagaggatgaagatgaggacgatggtttctttgtgccccatgggtacctgtctgaggacgaaggtgtgacagaggagtgtgccgaccctgagaaccataaggtccgccagaaactgaaggccaaggagtgggacgagttcctggctaaggggaagcgctttcgcgtcctgcaacctgtgaagatcggctgcgtgtgggcggctgacagagactgcgcaggcgatgacctgaaggtactgcagcagttcgcagcctgcttcctggagaccctgccggcccaggaggagcagacgcccaaggcctccaagcgggagaggagagacgagcagatcctggcccagctgctgccgctcctgcacggcaatgtgaacgggagcaaggtcatcatccgggagttccaggagcactgccgccggggactgctcagcaaccacaccggcagcccgcggagcccctccaccacctacctgcacacccccacccccagcgaggatgccgccatcccctctaagtcccggctcaagcggctcatttccgagaaccaattcatgaagaagcgcaggcacgacggccagattggtgctgaagacatggacggcttccaggcagacacggaggaggaggaagaggaggagggcgactgtatgatcgtggatgtcccggatgctgtggaggtccaagccccgtgtggagccgcttccggagctgggggtggtgtgggggtggacaccggcaaggccaccctgaccgcgagcccactgggtgcatcctgagagcaggggtgacgtatgtagaatgcttagggtgtcctccccacagagcagatacttgaaccgactcaattcctgtgtaaagagcactttgtcctgcttcacggacctccccaaagtgtgcagagttctatataggatgctggattagttcctttgatatttgtaaaaattcccccaagagccgcatatgaatctgccctttaataaagcattattgagattgctggcc

SEQ ID NO: 337818 - DNA, 3045 bp, Homo sapiens
gcggccgcctgaggggagcccgcgcctccgccgcctgagaggaggtcgagctgccgccggggcgatgctggaggagctggagtgcggggcgcccggcgccaggggagccgccacagccatggattgcaaagatagaccagcttttccagttaagaagttaatacaagcccgtctgccgtttaagcgcctgaatcttgtcccaaaggggaaagccgatgacatgtcagacgatcagggtacttctgtgcaaagtaaaagccccgatttagaggcctctttggacaccttggaaaacaactgtcatgtgggttctgacatagactttagaccgaaacttgtcaacgggaagggtcccttagataactttttaagaaatagaatcgaaaccagtattggccagagcacagtcatcattgatttgacagaggactcgaatgagcagccagacagtcttgtggaccacaataaactaaattctgaagcctctccctccagggaggcaataaatggccagcgagaagacactggggatcagcaggggttgttgaaggccattcagaacgacaagttggcatttcctggagagaccctttcagacattccttgcaaaacagaggaggagggtgttggctgtggaggtgcagggaggagaggcgactcccaggaatgttcgccacggagctgcccggagctgacgagtggcccgagaatgtgccccagaaaggagcaggacagttggagtgaagctgggggcatcctgttcaaagggaaggtgcctatggtggtcttgcaggacatcttggctgtgagaccaccgcaaatcaagtcccttccagccacaccccaaggcaagaacatgacccctgagagtgaggtgctggaatctttccccgaagaagactctgtactcagccattcgtccctgagctctccctcttccaccagctcgcccgaggggccgcctgctcccccaaagcagcacagcagtaccagtcccttccccacctccacgcccctccgcagaataactaagaaattcgtcaaaggctctacagagaagaacaagctcagactgcaaagagatcaggagcgtctgggcaagcagctcaagttacgtgcagaaagggaagaaaaggagaagctgaaagaggaggccaagcgggccaaggaggaggccaagaagaagaaggaggaagagaaggagcttaaggaaaaggagaggcgggagaagcgggagaaggatgagaaggagaaggcggagaagcagcggctcaaggaggagcggcgcaaggagagacaggaagccctggaggctaaacttgaggaaaaaaggaaaaaggaagaagagaaacggttaagagaagaagagaagcgcattaaagcagagaaggccgaaatcacgaggttcttccagaaaccaaagactccacaggcccccaagaccctggccggctcctgtgggaagtttgccccctttgaaattaaagagcacatggtcctggcccctcggcgtcggaccgctttccatccagacctctgcagtcagctggaccagctcctccagcagcagagcggcgagttctccttcttgaaagacctcaaaggccggcagcccctgaggtccggacccacgcacgtttccacccggaatgcagatatttttaacagtgatgtcgtcatcgtggagcgtgggaagggcgacggtgttcccgagaggaggaagtttggcaggatgaagctcctgcagttctgtgagaaccaccggcctgcctactggggtacctggaataagaagacggcactcatccgcgcgcgagacccctgggcccaggacacgaagctcctggactatgaggtggacagtgatgaggagtgggaagaagaggagcctggggagtccctgtcccacagtgagggggatgatgatgacgacatgggagaggatgaagatgaggacgatggtttctttgtgccccatgggtacctgtctgaggacgaaggtgtgacagaggagtgtgccgaccctgagaaccataaggtccgccagaaactgaaggccaaggagtgggacgagttcctggctaaggggaagcgctttcgcgtcctgcaacctgtgaagatcggctgcgtgtgggcggctgacagagactgcgcaggcgatgacctgaaggtactgcagcagttcgcagcctgcttcctggagaccctgccggcccaggaggagcagacgcccaaggcctccaagcgggagaggagagacgagcagatcctggcccagctgctgccgctcctgcacggcaatgtgaacgggagcaaggtcatcatccgggagttccaggagcactgccgccggggactgctcagcaaccacaccggcagcccgcggagcccctccaccacctacctgcacacccccacccccagcgaggatgccgccatcccctctaagtcccggctcaagcggctcatttccgagaactcagtgtatgagaagcggcctgacttcaggatgtgctggtacgtgcacccgcaggtgctacagagcttccagcaggagcacctgcccgtgccgtgccagtggagctatgtgacatcggtgccccagccagggcactcccatctcgctgaagaggaagtcagcgggcagcatgtgcatcacccaattcatgaagaagcgcaggcacgacggccagattggtgctgaagacatggacggcttccaggcagacacggaggaggaggaagaggaggagggcgactgtatgatcgtggatgtcccggatgctgtggaggtccaagccccgtgtggagccgcttccggagctgggggtggtgtgggggtggacaccggcaaggccaccctgaccgcgagcccactgggtgcatcctgagagcaggggtgacgtatgtagaatgcttagggtgtcctccccacagagagttctatataggatgctggattagttcctttgatatttgtaaaaattcccccaagagccgcatatgaatctgccctttaataaagcattattgagattgctggcc

SEQ ID NO: 337819 - DNA, 3505 bp, Homo sapiens
gcggccgcctgaggggagcccgcgcctccgccgcctgagaggaggtcgagctgccgccggggcgatgctggaggagctggagtgcggggcgcccggcgccaggggagccgccacagccatggattgcaaagatagaccagcttttccagttaagaagttaatacaagagatggctttctgtctttgtttcagcccgtctgccgtttaagcgcctgaatcttgtcccaaaggggaaagccgatgacatgtcagacgatcagggtacttctgtgcaaagtaaaagccccgatttagaggcctctttggacaccttggaaaacaactgtcatgtgggttctgacatagactttagaccgaaacttgtcaacgggaagggtcccttagataactttttaagaaatagaatcgaaaccagtattggccagagcacagtcatcattgatttgacagaggactcgaatgagcagccagacagtcttgtggaccacaataaactaaattctgaagcctctccctccagggaggcaataaatggccagcgagaagacactggggatcagcaggggttgttgaaggccattcagaacgacaagttggcatttcctggagagaccctttcagacattccttgcaaaacagaggaggagggtgttggctgtggaggtgcagggaggagaggcgactcccaggaatgttcgccacggagctgcccggagctgacgagtggcccgagaatgtgccccagaaaggagcaggacagttggagtgaagctgggggcatcctgttcaaagggaaggtgcctatggtggtcttgcaggacatcttggctgtgagaccaccgcaaatcaagtcccttccagccacaccccaaggcaagaacatgacccctgagagtgaggtgctggaatctttccccgaagaagactctgtactcagccattcgtccctgagctctccctcttccaccagctcgcccgaggggccgcctgctcccccaaagcagcacagcagtaccagtcccttccccacctccacgcccctccgcagaataactaagaaattcgtcaaaggctctacagagaagaacaagctcagactgcaaagagatcaggagcgtctgggcaagcagctcaagttacgtgcagaaagggaagaaaaggagaagctgaaagaggaggccaagcgggccaaggaggaggccaagaagaagaaggaggaagagaaggagcttaaggaaaaggagaggcgggagaagcgggagaaggatgagaaggagaaggcggagaagcagcggctcaaggaggagcggcgcaaggagagacaggaagccctggaggctaaacttgaggaaaaaaggaaaaaggaagaagagaaacggttaagagaagaagagaagcgcattaaagcagagaaggccgaaatcacgaggttcttccagaaaccaaagactccacaggcccccaagaccctggccggctcctgtgggaagtttgccccctttgaaattaaagagcacatggtcctggcccctcggcgtcggaccgctttccatccagacctctgcagtcagctggaccagctcctccagcagcagagcggcgagttctccttcttgaaagacctcaaaggccggcagcccctgaggtccggacccacgcacgtttccacccggaatgcagatatttttaacagtgatgtcgtcatcgtggagcgtgggaagggcgacggtgttcccgagaggaggaagtttggcaggatgaagctcctgcagttctgtgagaaccaccggcctgcctactggggtacctggaataagaagacggcactcatccgcgcgcgagacccctgggcccaggacacgaagctcctggactatgaggtggacagtgatgaggagtgggaagaagaggagcctggggagtccctgtcccacagtgagggggatgatgatgacgacatgggagaggatgaagatgaggacgatggtttctttgtgccccatgggtacctgtctgaggacgaaggtgtgacagaggagtgtgccgaccctgagaaccataaggtccgccagaaactgaaggccaaggagtgggacgagttcctggctaaggggaagcgctttcgcgtcctgcaacctgtgaagatcggctgcgtgtgggcggctgacagagactgcgcaggcgatgacctgaaggtactgcagcagttcgcagcctgcttcctggagaccctgccggcccaggaggagcagacgcccaaggcctccaagcgggagaggagagacgagcagatcctggcccagctgctgccgctcctgcacggcaatgtgaacgggagcaaggtcatcatccgggagttccaggagcactgccgccggggactgctcagcaaccacaccggcagcccgcggagcccctccaccacctacctgcacacccccacccccagcgaggatgccgccatcccctctaagtcccggctcaagcggctcatttccgagaactcagtgtatgagaagcggcctgacttcaggatgtgctggtacgtgcacccgcaggtgctacagagcttccagcaggagcacctgcccgtgccgtgccagtggagctatgtgacatcggtgccctcggcccccaaagaggacagtggcagcgtcccctccacggggcccagccagggcactcccatctcgctgaagaggaagtcagcgggcagcatgtgcatcacccaattcatgaagaagcgcaggcacgacggccagattggtgctgaagacatggacggcttccaggcagacacggaggaggaggaagaggaggagggcgactgtatgatcgtggatgtcccggatgctgtggaggtccaagccccgtgtggagccgcttccggagctgggggtggtgtgggggtggacaccggcaaggccaccctgaccgcgagcccactgggtgcatcctgagagcaggggtgacgtatgtagaatgcttagggtgtcctccccacagagcagatacttgaaccgactcaattcctgtgtaaagagcactttgtcctgcttcacggacctccccaaagtgtgcagagttctatataggatgctggattagttcctttgatatttgtaaaaattcccccaagagccgcatatgaatctgccctttaataaagcattattgagattgctggcctattggggaagcctgcgggcacaggagcaggcgtggaatccaatacttgtaaatgaattgaagcgtcaggaccacccgcctggccacgtgcgcgggcccctggacctaacgaggcagtgtataaacttattctctagccctgaaaaaaaacatcaacacgcaatacacaacataagcaaaacaacgaactaaaaaaccggggcgcatattagagggcggcgaaaaaagagttaataacggccacgcgacataagttccggcacacgtttttcaacaagggaaacagggcccccaaagggggcaatatagaggtatt

SEQ ID NO: 337820 - DNA, 2559 bp, Homo sapiens
gcggccgcctgaggggagcccgcgcctccgccgcctgagaggaggtcgagctgccgccggggcgatgctggaggagctggagtgcggggcgcccggcgccaggggagccgccacagccatggattgcaaagatagaccagcttttccagttaagaagttaatacaagcccgtctgccgtttaagcgcctgaatctttcccttccccacctccacgcccctccgcagaataactaagaaattcgtcaaaggctctacagagaagaacaagctcagactgcaaagagatcaggagcgtctgggcaagcagctcaagttacgtgcagaaagggaagaaaaggagaacagcggctcaaggaggagcggcgcaaggagagacaggaagccctggaggctaaacttgaggaaaaaaggaaaaaggaagaagagaaacggttaagagaagaagagaagcgcattaaagcagagaaggccgaaatcacgaggttcttccagaaaccaaagactccacaggcccccaagaccctggccggctcctgtgggaagtttgccccctttgaaattaaagagcacatggtcctggcccctcggcgtcggaccgctttccatccagacctctgcagtcagctggaccagctcctccagcagcagagcggcgagttctccttcttgaaagacctcaaaggccggcagcccctgaggtccggacccacgcacgtttccacccggaatgcagatatttttaacagtgatgtcgtcatcgtggagcgtgggaagggcgacggtgttcccgagaggaggaagtttggcaggatgaagctcctgcagttctgtgagaaccaccggcctgcctactggggtacctggaataagaagacggcactcatccgcgcgcgagacccctgggcccaggacacgaagctcctggactatgaggtggacagtgatgaggagtgggaagaagaggagcctggggagtccctgtcccacagtgagggggatgatgatgacgacatgggagaggatgaagatgaggacgatggtttctttgtgccccatgggtacctgtctgaggacgaaggtgtgacagaggagtgtgccgaccctgagaaccataaggtccgccagaaactgaaggccaaggagtgggacgagttcctggctaaggggaagcgctttcgcgtcctgcaacctgtgaagatcggctgcgtgtgggcggctgacagagactgcgcaggcgatgacctgaaggtactgcagcagttcgcagcctgcttcctggagaccctgccggcccaggaggagcagacgcccaaggcctccaagcgggagaggagagacgagcagatcctggcccagctgctgccgctcctgcacggcaatgtgaacgggagcaaggtcatcatccgggagttccaggagcactgccgccggggactgctcagcaaccacaccggcagcccgcggagcccctccaccacctacctgcacacccccacccccagcgaggatgccgccatcccctctaagtcccggctcaagcggctcatttccgagaactcagtgtatgagaagcggcctgacttcaggatgtgctggtacgtgcacccgcaggtgctacagagcttccagcaggagcacctgcccgtgccgtgccagtggagctatgtgacatcggtgccctcggcccccaaagaggacagtggcagcgtcccctccacggggcccagccagggcactcccatctcgctgaagaggaagtcagcgggcagcatgtgcatcacccaattcatgaagaagcgcaggcacgacggccagattggtgctgaagacatggacggcttccaggcagacacggaggaggaggaagaggaggagggcgactgtatgatcgtggatgtcccggatgctgtggaggtccaagccccgtgtggagccgcttccggagctgggggtggtgtgggggtggacaccggcaaggccaccctgaccgcgagcccactgggtgcatcctgagagcaggggtgacgtatgtagaatgcttagggtgtcctccccacagagcagatacttgaaccgactcaattcctgtgtaaagagcactttgtcctgcttcacggacctccccaaagtgtgcagagttctatataggatgctggattagttcctttgatatttgtaaaaattcccccaagagccgcatatgaatctgccctttaataaagcattattgagattgctggcctattggggaagcctgcgggcacaggagcaggcgtggaatccaatacttgtaaatgaattgaagcgtcaggaccacccgcctggccacgtgcgcgggcccctggacctaacgaggcagtgtataaacttattctctagccctgaaaaaaaacatcaacacgcaatacacaacataagcaaaacaacgaactaaaaaaccggggcgcatattagagggcggcgaaaaaagagttaataacggccacgcgacataagttccggcacacgtttttcaacaagggaaacagggcccccaaagggggcaatatagaggtatt

SEQ ID NO: 337821 - DNA, 1178 bp, Homo sapiens
  misc_feature (1123)..(1123): n is a, c, g, or t
gcggccgcctgaggggagcccgcgcctccgccgcctgagaggaggtcgagctgccgccggggcgatgctggaggagctggagtgcggggcgcccggcgccaggggagccgccacagccatggattgcaaagatagaccagcttttccagttaagaagttaatacaagcccgtctgccgtttaagcgcctgaatcttgtcccaaaggggaaagccgatgacatgtcagacgatcagggtacttctgtgcaaagtaaaagccccgatttagaggcctctttggacaccttggaaaacaactgtcatgtgggttctgacatagactttagaccgaaacttgtcaacgggaagggtcccttagataactttttaagaaatagaatcgaaaccagtattggccagagcacagtcatcattgatttgacagaggactcgaatgagcagccagacagtcttgtggaccacaataaactaaattctgaagcctctccctccagggaggcaataaatggccagcgagaagacactggggatcagcaggggttgttgaaggccattcagaacgacaagttggcatttcctggagagaccctttcagacattccttgcaaaacagaggaggagggtgttggctgtggaggtgcagggaggagaggcgactcccaggaatgttcgccacggagctgcccggagctgacgagtggcccgagaatgtgccccagaaaggagcaggacagttggagtgaagctgggggcatcctgttcaaagggaaggtgcctatggtggtcttgcaggacatcttggctgtgagaccaccgcaaatcaagtcccttccagccacaccccaaggcaagaacatgacccctgagagtgaggtgctggaatctttccccgaagaagactctgtactcagccattcgtccctgagctctccctcttccaccagctcgcccgaggggccgcctgctcccccaaagcagcacagcagtaccagtcccttccccacctccacgcccctccgcagaataactaaagaaattcgtcaaaggtctacagagaaagaaccaagttagactggcaagagatcaggagcgtctgggcagcagttcagttacgtgacgaanggagacaaggggagtttaatatgatgcaggggcagggggcccaaaaaagggccag

SEQ ID NO: 337822 - DNA, 301 bp, Homo sapiens
ggctaaacttgaggaaaaaaggaaaaaggaagaagagaaacggttaagagaagaagagaaggtagagtgtttcccacagagcttccccgtcccagcccgttggagaagcagatgcccaaagtggaattcttgccacagccgtcacctaatattctcttggtttggggaaaccaaatggcgcccgcagggagggcgagtctgtctagatgcgttcttgttgcttcttcccagtgctggctgtcacatgcctactggccctgcaatcctggcacttctacccacaagggcaacttggacattt

SEQ ID NO: 337823 - DNA, 384 bp, Homo sapiens
ttctttagtctgaaccttcctttccagtcgaaggttttcccttgtgggagattttagttaaaaggttggttaaagggagagaggctcctgaactggaacagagtgattattcttaatatctacaagtttattttaacaaaagactcttgcaaattctactccaagtgaatgagacctgtcccaggcaccattttaaccagaccaagattccaccaccaaaacaaaaaacatattattaaggcagcacaaccgctcctaattcctagagcaaaagttctaaccaacaggagcaggagggtatgagaacaacaaaactggtaatcctgtaaaaccaataaagattgtatttgtttagagaggtgttttatcaatgcagaatctggg

SEQ ID NO: 337824 - DNA, 727 bp, Homo sapiens
tgacctgtgggttcattacctgtgtcaaagactgaagacgggagaattagggaagtggtggcctgggagaaccaaggacatgtttgtgtgccctatttaggcgattgttctacttcatgctaaatttgtgaggagttttatgaagcctagaaaattaagtagaaaatatatttttacagtattttaagctggaacagactatttaaagctcgaagagaccctagagataaaccagttcagtctcttccttttgcagtagaagggacgaggcccagaggactcacggtgtttcgggaacttgcagggagttagcgcagcaccaggatcggagcgcggggccccgtgtccagctccttactctttttgttctggcagcgatgcccaccgggccttcacagtacatttctctggatacagagagaaacattattcatctgaaagcaaggcttcagaagctgtttttataataatttgttagagccacatagtaacttgcaaataaacatttacagttaatgagaaaaatggatacccctgagaaaaaccgtttgtagttactgtgttctagtcagagctcttgagctaatttgaaaggaaagtcaggattctggcaggaggagagctatccccagattccaaggatggggaagagaatctctgtatggactagaattcgagactgtcctgtgtccctctgtctctccttcccggtcttctgtctgtgtcc

SEQ ID NO: 337825 - DNA, 402 bp, Homo sapiens
taaggagtagtgtaattcttgcaactaatgggaaagaagtagagacagcagcaaagccacctgcttctggaagggagagtgcaagcattttctccaggacaccaggatagggaaagcaaaacttccaaacaaagctagtttcaggcaatgaagacactatgtaaagcttccttctgggttatcccaaaagaattctaacaacataagattggaggttgtgactgtcttactccattttctgctgctattaacagaataccacagactaattttttttttttttttttttttttttgggaacaggtttttgctttgtcccccgggggggggtggcggggggcaacccggggtcacgtgagccttgtgccatgtgcttcaaacaagggggggacccctctaaaa

SEQ ID NO: 337826 - DNA, 369 bp, Homo sapiens
taaggagtagtgtaattcttgcaactaatgggaaagaagtagagacagcagcaaagccacctgcttctggaagggagagtgcaagcattttctccaggacaccaggatagggaaagcaaaacttccaaacaaagctagtttcaggcaatgaagacactatgtaaagcttccttctgggttatcccaaaagaattctaacaacataagattggaggttgtgactgtcttactccattttctgctgctattaacagaataccacagactaatttttttttttttttttttttttgagacagagtcttgctctgtcacccaggctggagtgcagcggcgcaatcttggctcactgtagcctctgcccactgg

SEQ ID NO: 337827 - DNA, 332 bp, Homo sapiens
cactctgggaaggccccagaggaggctgcacctgaggggggccttaaaacactccagaggggccttgaaacgtactagaacttgtctctgaggcagagagaggccaggaaaggtacaacctccacacctccctgccttctagattatcttatggaaatcagacaccaaaagggttcccctctcaaaagcgagaatctacaagaaggactttgccagtggctcccacactgtgagagtgtgggtccccgttccccagccctgcccgcccagtcctggtgtgccccattgccctggccgccgagtcctggtgtgccccattgccccggccgctc

SEQ ID NO: 337828 - DNA, 3222 bp, Homo sapiens
  misc_feature (2084)..(2084): n is a, c, g, or t
aaagtggaaccggggcggcgcgggggccggcggctgccgcgatctctccctggtagcgggaggctgagcgggcggcgcgacgcgggggccgacgggggcgccgggtggccgcgccggaagtgccttgcgcggcagaggaagcgcagggacagagcggagcaggccgagccggcggaaagggtctttgctgctgcgcccgggcaggggctgccgcggccccaggtcccgcttcgagacgcggcgcggtccaggcgggaggcgactccctaggaagggacccggggcgggaggaggaagtgaggccgcgcggaaggaaggcggcgagccccggggccccgaggccttggccgcgtcacagcacccacatggcctctggagtgggcgcggccttcgaggaactgcctcacgacggcacgtgtgacgagtgcgagcccgacgaggctccgggggccgaggaagtgtgccgagaatgcggcttctgctactgccgccgccatgccgaggcgcacaggcagaagttcctcagtcaccatctggccgaatacgtccacggctcccaggcctggaccccgccagctgacggagagggggcggggaaggaagaagcggaggtcaaggtggagcaggagagggagatagaaagcgaggcaggggaagagagtgagtcggaggaagagagcgagtcagaggaagagagcgagacagaggaagagagtgaggatgagagcgatgaggagagtgaagaagacagcgaggaagaaatggaggatgagcaagaaagcgaggccgaagaagacaaccaagaagaaggggaatccgaggcggagggagaaactgaggcagaaagtgaatttgacccagaaatagaaatggaagcagagagagtggccaagaggaagtgtccggaccatgggcttgatttgagtacctattgccaggaagataggcagctcatctgtgtcctgtgtccagtcattggggctcaccagggccaccaactctccaccctagacgaagcctttgaagaattaagaagcaaagactcaggtggactgaaggccgctatgatcgaattggtggaaaggttgaagttcaagagctcagaccctaaagtaactcgggaccaaatgaagatgtttatacagcaggaatttaagaaagttcagaaagtgattgctgatgaggagcagaaggcccttcatctagtggacatccaagaggcaatggccacagctcatgtgactgagatactggcagacatccaatcccacatggataggttgatgactcagatggcccaagccaaggaacaacttgatacctctaatgaatcagctgagccaaaggcagagggcgatgaggaaggacccagtggtgccagtgaagaagaggacacatgaaggcttgctacccccagtggaaaatcatcccctccccttgtgtgtatgtgacagcgtgtatgtaacggcttctgatttctgtgaaagctgctcagcaacaaacgtacttccaccagatgtgtccccagatccacagcaggcacatatctctccaagggatgaccagttttatgcttactgtgtgcttctcatcccctggttgtggtaggtcaaggaaaagagcccctttgatccaccaggagcaattaagaaaggtccttcaggtaatccctcaatggctgctttgaacttactcaggaaagccagcccccataatattgtattaccaaacagtatcgctttgttaggaaggatctggaataatcttgaagggaagtcagagttttctccctgcctattaacaaaaacccaattttgttcatattgaagcatgaaataaatgagagcaaggtagggccaaattaactcttgtggacagtccctaaaagtccagttctacatttgtgaaaattgtggtgccatgaattaagatggatgactggaaaaaggtgttggagaaagagttaaagatgaggaagagatatttttagtatatgaagttatccaggacttgatattcataattcagtgctgtggaaatgaaaaaaatgattgaagaggtggaacggaaatgaccttaggggnaaaaaaaaggaccaaagaagtctgattaaaagttgaaatcagtatttctgaattcaaattgcttgaatttccaaaatagtcagtaaaggatctaatagaaccagaattatttgggtgaattctgcaggttttatgggcttgtcacaacgtgaagggctggaatgtatattaccaaatgggaatttccattgtaggtttttgctagtcccacccccattttagcctaatttggcttaaacgcagtatggggagaattgttcccattccatgtgttctgaattcagctcatctcccagcatatagatatatcctcctttaactccgaccagaacccttcttcctgtggcactccccacccatagaccttcagatcatctcccacaccctggatctcactctcctcttagtaacagagacactcctgaggttggacttccttgcttttctctacttccaaatcacaatttcttacaaccaagctttgtgctcccgagtaagcagggatgtactaggggaatgtaaaactgcaaacttaaaaacctgcatcttcttgaagcatcagttttacttaccaaatggtttagagtcataagatgacctatttttatataaaagttatattatagaataaaatgttcatacgcatagactgttaagataaaaaaataggaatcttgcaaggtaattcttatttgcaagtgggttatgtgttcactctcctctacctttatggtattttggtgttcacttacgaagcatacaactagaaccatatccaagcagactctgggttgctgttaacccagggcctagacttctagtgcctctgaggcagaaccaaaggagcctgcactgggggaaatcccttttcctgcctgcctgtctgcctgtgacctgtgtacgtattacaggctttaggaccagctgattgttatgcttgcaggatggttttgaaacagaaacaatacttgtttactgtaggaatcctatttatattatttttcagtcctgtgaatgctgtgaaaagatttattcctttgaggccaggaagctcccaggcatatatgcttctaggttaggattgtcctgactcactaaagatgccaggatattggggctgaggggagtttgaggtgtt

SEQ ID NO: 337829 - DNA, 194 bp, Homo sapiens
caggtggactgaaggccgctatgatcgaattggtggaaaggttgaagttcaagagctcagaccctaaagtaagtattgtttggaattgattgggtgttggtaccccaagcatttcattctccttgagctaaaattgtgaggtgttgatgatcatctctctgaatattgcattaagatttaattaagcctgccca

SEQ ID NO: 337830 - DNA, 2599 bp, Homo sapiens
  misc_feature (1461)..(1461): n is a, c, g, or t
agttaaaaaagagcaaataaccagagttagtagaagaataaaataaagagcagaaacgaaatagaaaacagaaaatgaagtagaagtctattctctgaaaacatcaatccaatacgtaaatggctagcaggattgcttagggaagaaaggagagaaagcgaggccgaagaagacaaccaagaagaaggggaatccgaggcggagggagaaactgaggcagaaagtgaatttgacccagaaatagaaatggaagcagagagagtggccaagaggaagtgtccggaccatgggcttgatttgagtacctattgccaggaagataggcagctcatctgtgtcctgtgtccagtcattggggctcaccagggccaccaactctccaccctagacgaagcctttgaagaattaagaagcaaagactcaggtggactgaaggccgctatgatcgaattggtggaaaggttgaagttcaagagctcagaccctaaagtaactcgggaccaaatgaagatgtttatacagcaggaatttaagaaagttcagaaagtgattgctgatgaggagcagaaggcccttcatctagtggacatccaagaggcaatggccacagctcatgtgactgagatactggcagacatccaatcccacatggataggttgatgactcagatggcccaagccaaggaacaacttgatacctctaatgaatcagctgagccaaaggcagagggcgatgaggaaggacccagtggtgccagtgaagaagaggacacatgaaggcttgctacccccagtggaaaatcatcccctccccttgtgtgtatgtgacagcgtgtatgtaacggcttctgatttctgtgaaagctgctcagcaacaaacgtacttccaccagatgtgtccccagatccacagcaggcacatatctctccaagggatgaccagttttatgcttactgtgtgcttctcatcccctggttgtggtaggtcaaggaaaagagcccctttgatccaccaggagcaattaagaaaggtccttcaggtaatccctcaatggctgctttgaacttactcaggaaagccagcccccataatattgtattaccaaacagtatcgctttgttaggaaggatctggaataatcttgaagggaagtcagagttttctccctgcctattaacaaaaacccaattttgttcatattgaagcatgaaataaatgagagcaaggtagggccaaattaactcttgtggacagtccctaaaagtccagttctacatttgtgaaaattgtggtgccatgaattaagatggatgactggaaaaaggtgttggagaaagagttaaagatgaggaagagatatttttagtatatgaagttatccaggacttgatattcataattcagtgctgtggaaatgaaaaaaatgattgaagaggtggaacggaaatgaccttaggggnaaaaaaaaggaccaaagaagtctgattaaaagttgaaatcagtatttctgaattcaaattgcttgaatttccaaaatagtcagtaaaggatctaatagaaccagaattatttgggtgaattctgcaggttttatgggcttgtcacaacgtgaagggctggaatgtatattaccaaatgggaatttccattgtaggtttttgctagtcccacccccattttagcctaatttggcttaaacgcagtatggggagaattgttcccattccatgtgttctgaattcagctcatctcccagcatatagatatatcctcctttaactccgaccagaacccttcttcctgtggcactccccacccatagaccttcagatcatctcccacaccctggatctcactctcctcttagtaacagagacactcctgaggttggacttccttgcttttctctacttccaaatcacaatttcttacaaccaagctttgtgctcccgagtaagcagggatgtactaggggaatgtaaaactgcaaacttaaaaacctgcatcttcttgaagcatcagttttacttaccaaatggtttagagtcataagatgacctatttttatataaaagttatattatagaataaaatgttcatacgcatagactgttaagataaaaaaataggaatcttgcaaggtaattcttatttgcaagtgggttatgtgttcactctcctctacctttatggtattttggtgttcacttacgaagcatacaactagaaccatatccaagcagactctgggttgctgttaacccagggcctagacttctagtgcctctgaggcagaaccaaaggagcctgcactgggggaaatcccttttcctgcctgcctgtctgcctgtgacctgtgtacgtattacaggctttaggaccagctgattgttatgcttgcaggatggttttgaaacagaaacaatacttgtttactgtaggaatcctatttatattatttttcagtcctgtgaatgctgtgaaaagatttattcctttgaggccaggaagctcccaggcatatatgcttctaggttaggattgtcctgactcactaaagatgccaggatattggggctgaggggagtttgaggtgtt

SEQ ID NO: 337831 - DNA, 448 bp, Homo sapiens
tcttgaggcaatcgttttctgaaataatcttaagttgactccattgctcaactatctgattaagtagctttatattcttaaaacaaatatttcatttgtttttaaattttattcttccaaatataggagcacccaggattaggcaagatatttaaagtagacataaaattactatgtttcctcatatgctaagaaaacagaaaacgttggtgtacatacaaaaaagatatttgatcgcctttttttcttcttaaaatacgtttatgaggtatcagttgaatgagaacaaaatggtagcagtgggtgggaagctggaaaatgacctaaattctaggatacgaatccaatgcattgtagataaatatgttagctgtggcaccataacccgctggatccatcaaccatgtggatccatgatggggacaagtgaatacaaaaggtaaaaatg

SEQ ID NO: 337832 - DNA, 565 bp, Homo sapiens
cctccaaagtagttggaactataggtacactcagatcatttaagaactttcaaatcaacatatgaataagaaaaacagagtggtgtaaaatattgctgaggaaatgcaaaataaagtcagaggtagtattaagtaaagttacttatgtgtgtcaaggaagagttctggtcttaaaagcagcaatggactcagaatgaaaaaggtgaacaaacgatacgggaaagatacagaggttatgaacaatggtaggaacactggaatagccaaccaaggtaaaaaaggctagaagttggaagtagacattagaagactactgtaaagctttggatgatgtataatattataaagctgtagatttctgcagcagaatataaaaatcagcacaattttttttttctggcagttaaacgagtgcaaaattcataaaaagtgaggccacagctattaggacttaatgcctagacagagtggtagccgtgatagttagaaagaggtgaactagtaatgtggtaatggctaaattgggcaaagggcaaggaaaaggaacaagaacaaaaagagaatc

SEQ ID NO: 337833 - DNA, 525 bp, Homo sapiens
tcaagtaatccatagtgttacaaagtacctgcctgttcatctgtttccctttgatccagtttctagttttcctttccacgtttggcctaatgtatattaaaacagcttcagtttgtttaagggaatggttatgcatgctggcaaaataccaggttacgtgcagataccttctgctaaactcagtctgcatgctgcccttcccaaagccttaatcatgtttaaattgaatagcactcaggtgtttagaagttgggatttttttcatgtaaattgtacttataaaaactgaatctgagctgctattacccactgatagttattttttctacatgtcgatgtctggattctataaccatttgtttttccccagaccagaatttattacagaattctcaaagctgacggatcggtggcagaatgctgtccagggtgttcggcagaggaagggtgacgttgatgggctggtgaggcagtggcaagatttcactacttctgtggagaacttgtttcgcttcctcactgaca

SEQ ID NO: 337834 - DNA, 385 bp, Homo sapiens
ggaattggattgaatgaaaagtttctttattgctgtgaaaagtggatccaacttttggagaagatagaagaagcactcaaagtggatgtggctaacagccttcctgagctcctggagcagcagaaaacctataagatgttagaagctgaagtttctataaaccagacaattgctgattcctatgtcacccagtccttacaactcctggacacaacagaaatagagaacagaccagaatttattacagaattctcaaagctgacggatcggtggcagaatgctgtccagggtgttcggcagaggaagggtgacgttgatgggctggtgaggcagtggcaagatttcactacttctgtggagaacttgtttcgcttcctcactgaca

SEQ ID NO: 337835 - DNA, 450 bp, Homo sapiens
ggtgaggaggagctggagaagcttgggaatgggaagaagctgaagaagctcagtggtgaagaggagctggagaagccctgagtgagcccgagctgggagtggtgagtgtgagtggaccttcccagatagatctggtgagaatggggtggcagttctagaactgaacaagaggggcttcctggtcgtggaccccgacgggtgggcatgcggtagatacccagcacatccgagggaaggatggatggctattgatttcccttcaggccatgccaatatgtttgtcaagcaacagatgcaattcaagtgctactgtgatccaggtgtggctcgctgtttaggtaaagaagcttcacaaaggcgctgccacaaaccaacatgtgttctttgggtttcatctcgtaatttcattcatgaaggttgggaattctgttactcagaatcttacctatt

SEQ ID NO: 337836 - DNA, 225 bp, Homo sapiens
tcccagtgagataattgaggtctggggaaaaaaagagccagaaatccctgacggttcttgtgttctgattcctgctggagggggtaaagtgtgagaggggtatggtggtcttggtctttagttctaagagacagagaggaatagggacagcagtgaggggtgggggaaaggggatacttgtctaagtgctcagaatgtacaaagcaagtttgaagagaggtccct

SEQ ID NO: 337837 - DNA, 302 bp, Homo sapiens
gttggtgtgcaggtgttggtgtgggtgttggtgtggatgttggtgtgcaggtgttggtgtgggtgttggtgtgcaggtgctggtgtgggtgttggtgtgggtgttggtgtgcaggtgctggtgtggatgttggtgtgggtgttggtgtgcacgtattggtgtgcaggtgttggtgtggatgttggtgtggacattggtgtgcaggtgttggtgtgggtgttggtgtggacgttggcgtgcaggtgttggtgtgggtgttggtgtgcaggtgttggtgtggacattggtgtgcaggtgctggt

SEQ ID NO: 337838 - DNA, 301 bp, Homo sapiens
gggtctgtaagcttcactggaaccttttccttggggacgtagagaaagtccttttttctaccttctaggagtgagtggctgcagaaaggggaactcttcacgattaaaaagaaaatgtgataaagtctcatcaacgtgcataggaatttgctcctcaggctggttcacagggatgcctatgaagcatttctgagaagtggatgtacttcatgaaagatgcgatgcatcagctaccctacaagattttgcagttgggaaagtaatgatctaggattcatagttctggaggactaaggcagtt

SEQ ID NO: 337839 - DNA, 241 bp, Homo sapiens
tatgatgccatttcaaagacggaacacactgaggttaagtaactggtggaggatcagaagccggtatgtgtcagagcgaagactccaacccaagtagattccatacctttaaccactacctcatacaatgtgtgtgtgtgtgtgtgtgtgtgtgtgtgtgcgcgcgcgcgtgtgtctgtctctctctcttagacagggtcttgctttgttgcccagggtggagtgctggagtgcaatggca

SEQ ID NO: 337840 - DNA, 338 bp, Homo sapiens
taagcacctgcctcttggttttgttgtacagatgacatatgagaacccaggcctggtgtggtacctcgcacacagtaaaggctgagtacaggcagctgtgtctcctgctgtcattcctgaggggctccctggccctctgccccccggggggattctcattaggtcacttcttaaagcctcctgagacaaggcattcagtgcccatcctccctgctcactatgcttggcacccacttcccccagtgtgctcaccaccatgtggggaaacagtcaattccatggtgctgtgtctgtcttcccaggtgtggcccctctgccgccccaaccagctcacctcg

SEQ ID NO: 337841 - DNA, 847 bp, Homo sapiens
cctgagagacgcttacacctcagtagtacaagcgctcgtatcttgttggagtatcagattaaaacagcaggctgtattccattacagaagataccctcacatccaaactgcttcatacgagaaaggctaccagtggtccatgagttctcatcatttagtagattaggattccagcataaaaagaaaaactgacaaataccccttttaaataagacagagtacattggactgtgtatatgttgtaaacgaattctaaaagccttttgactaaaaatgtagttattcaaagtttgttatactagaatttaattcatagatggtcctagtctctttgctttcgttttaaatagcacttgcatcttaataggatgaaaagtacgtgtctacctttctctgcccttcactatgctggagggaccttgctggcaaaagactgtgcaggccacattttgagtgtccagctcctcccacctagggcacagctctaccaagggcatggcatctgttgcacctccagcagcctcagccccactgttggttgtgtattcatggtactgtttgggggtggcatttgggcctgaagttggggtatcctgtgaggtagggatacaggtctagttgctgtgcaagagacccaaaacaatagccgtgcaagtgcccctgcccagcacaggaggcggctgccccattacaggcccacacttctgactggctgcatccccaaggaggaaggggcatggatcattccttcaggacaccactcacaaggcgcccacctgacttccaatcatatcttcttacagaaagaggagaacggatgtggaggtgcagtgtgtactctgaggtg

SEQ ID NO: 337842 - DNA, 331 bp, Homo sapiens
ctttgtttataaacttttccatatatctttctttagtatctccttttctaaattatagtcctagcccttttcttttaggaggcttttcatttgcccaatttcctattctatcatcaaagttctgaattatgtctcttgcttattagccctttatttattatctttatccctaagtccttactagagagtaagtgttacagaaataggtactctattttttaatgctgctacatttacagcacaattctattttttgctaattgaaagccagattctttgcttacgatgttaaaaccatagcttcatagctaagaccagacctagggaatct

SEQ ID NO: 337843 - DNA, 316 bp, Homo sapiens
cacggacagatatcagcccctagatgagccggctggttttattccctcatcaagtcctccccgaccctggacctcaggcactgttttgtatccggctataaaggaagttgggtgactgctttcaatgtactgtacacatcagcagtcagtgagaagtcaccaccataaccatcacacatggtctgggtgagctgagccaccaccaccactaattccagcaacctgaaaggaaaagcaggatgcctgccaagcgtgcccagcaaggggaccctgggagaccccatccgacctcctccatccgtgggccaggtaacaa

SEQ ID NO: 337844 - DNA, 370 bp, Homo sapiens
aattcagaattttattttagaaaggtaatagaaaacatatgctacttattatgaatcactcctagcaggatctgggaagattcttagaacctataatattaaacatttctgtagcaaacatgattatttgctctaagtggaataagtaaagatttttaatagcgtcacgtcacttcaagttatgacactaaatgcattttggagcgaaacttacaaaaaacaatatttttaaaactttctggattttagacttgtgagtaaagattagattttatataaatcgcattgtgagttagggagtgcttaatggactggccttggaagccagtcagtatttatggaaaaaaaagtgtgtttcgaacgaccaata

SEQ ID NO: 337845 - DNA, 279 bp, Homo sapiens
ctcagcctcccaaagtgctgggcgtacaggcatgagccaccacgcccagccctacatttctttttaaacaaaacaagatttgtggttacatatggttatctatctgtctagatagataatctatctgtcatttattgccttcaaaatgaaattaattttcaaggttttttggaaatggctactaatgatgtagttagatgcccagtgggttataccaagattctttcctgagtcactatttgtcattcctttttcccaacccttgtaagtattaactgt

SEQ ID NO: 337846 - DNA, 730 bp, Homo sapiens
ggaagtgaggataggccgagttccgggcgcgaggcggccaccgtggagagcagagcgcggcggctggaagctgctaagtcagagccgcgatgttccggattgagggcctcgcgccgaagctggacccggaggagatgaaacggaagatgcgcgaggatgtgatctcctccatacggaactttctcatctacgtggccctcctgcgagtcactccatttatcttaaagaaattggacagcatatgaagacaggacatcacatatgaatgcacgatatgaagagcctggttacagtttcgactcctctctgcaagtgaataggcccagaaaggtgtaagagactctttgaatggacataaaattctgcttgttaagaacaagtttggctctggtaactgaccttcaaagctaaaatataaaactatttgggaagtatgaaacgatgtctcgtgatctggtgtacccttatccctgtgacgtttggcctctgacaatactggtataattgtaaataatgtcaaactccgttttctagcaagtattaagggagctgtgtctgaaatggcactgtcttgtcagtcatttctgtttacctttttcttctgcccagagtgtatttgtgaagagtctcttatattatgttttgtggaaatcagcacacaaccacaatgacatttaagcacaggatcattattagtctatgtttttaataaacatatcaattaagaaaa

SEQ ID NO: 337847 - DNA, 866 bp, Homo sapiens
ggaagtgaggataggccgagttccgggcgcgaggcggccaccgtggagagcagagcgcggcggctggaagctgctaagtcagagccgcgatgttccggattgagggcctcgcgccgaagctggacccggaggagatgaaacggaagatgcgcgaggatgtgatctcctccatacggaactttctcatctacgtggccctcctgcgagtcactccatttatcttaaagaaattggacagcatatgaagacaggacatcacatatgaatgcacgatatgaagagcctggttacagtttcgactcctctctgcaagtgaataggcccagaaaggtgtaagagactctttgaatggacataaaattctgcttgttaagaacaagtttggctctggtaactgaccttcaaagctaaaatataaaactatttgggaagtatgaaacgatgtctcgtgatctggtgtacccttatccctgtgacgtttggcctctgacaatactggtataattgtaaataatgtcaaactccgttttctagcaagtattaagggagctgtgtctgaaatggcactgtcttgtcagtcatttctgtttacctttttcttctgcccagagtgtatttgtgaagagtctcttatattatgttttgtggaaatcagcacacaaccacaatgacatttaagcacaggatcattattagtctatgtttttaataaacatatcaattaagaaaaagttgggtttctatttttcttatcctactttttgctgcaaaccaacaatcactagtgagacttgtattatattgagattattgcaagcttcagtaagttcatcttgttttggactagagaatttgccaatcctgat

SEQ ID NO: 337848 - DNA, 1001 bp, Homo sapiens
ggaagtgaggataggccgagttccgggcgcgaggcggccaccgtggagagcagagcgcggcggctggaagctgctaagtcagagccgcgatgttccggattgagggcctcgcgccgaagctggacccggaggagatgaaacggaagatgcgcgaggatgtgatctcctccatacggaactttctcatctacgtggccctcctgcgagtcactccatttatcttaaagaaattggacagcatatgaagacaggacatcacatatgaatgcacgatatgaagagcctggttacagtttcgactcctctctgcaagtgaataggcccagaaaggtgtaagagactctttgaatggacataaaattctgcttgttaagaacaaaaaaaaaaaaaaaaaaaaaaaaaaaagaaaaaaaaaaaaaaaaaaaaaaaaaaaaaaaaagggggggggccccccaaaagatccccccccgagggggcgcccacacgattcagacggcgcgccgccaagatattggtggaaaagagggggcgcgcccaaataagggggagcggtctattaaaacagagagcgagcggcgggcggcaagagtataacacaacgagcagacagcggtggaaaaacacggagaacagcgggggaagcacacatggaggagaggagcgcaccccactaaactcgcgccggggggggggggggagaccaacacaaaagaggggacgaggaacaacaacaccagctagccacgagagaagagattaaaagaacggcgcttgatcagaggggaagtaaacaatatgacaaaacttttagacagagggtgcttactagtggtgggggggttaacaacagcaggagcggagaaatatgatgctgcgtggtggggtaggaagagagaaaaaagtgagggtcaatcgatgggagggggttatgagtcgatagaggaaaggagaaagatatttattaagccggggggggggtgatgaggcgtaagaactaagtg

SEQ ID NO: 337849 - DNA, 505 bp, Homo sapiens
gcggccgcggcccggactccgcggtgggcgagcgccctgtgaggtaagcggccggtgcgcagaggctgcgggcgaacttgggcggccgggggaggggacccggggcgcttccccaggcgaccgacccaggaggcgccgctcagtcctggccgaggctgagcgtctggtcgggcttcgggcatcaggggtctggcaggaccatgaggcgtaccctcaggccgcccgcggctccgcggtcccccggcatccggaggctcaggcgcgccgacggagagctatgccttggtttaccctcccgtaaaactaccggacgcggagcatgtatctccgcggtgcctccagccctgagatttttcgagtgtgtaagtaaagtcgaagaagaagaagctgactcttgggatgggaagagccttcacctaggaacgcaggggcaaatatggggctgggcacccactgtgtattttatgcaaatctcaaggggcaaatatggggctgggcacccact

SEQ ID NO: 337850 - DNA, 712 bp, Homo sapiens
tagtaacgcccgccagtgtgcgggaattcggctttcgagcgccgcccgggcaggtgtaagtcagagccgcgatgttccggattgagggcctcgcgccgaagctggacccggaggagatgaaacggaagatgcgcgaggatgtgatctcctccatacggaactttctcatctacgtggccctcctgcgagtcactccatttatcttaaagaaattggacagcatatgaagacaggacatcacatatgaatgcacgatatgaagagcctggttacagtttcgactcctctctgcaagtgaataggcccagaaaggtgtaagagactctttgaatggacataaaattctgcttgttaagaacaagtttggctctggtaactgaccttcaaagctaaaatataaaactatttgggaagtatgaaacgatgtctcgtgatctggtgtacccttatccctgtgacgtttggcctctgacaatactggtataattgtaaataatgtcaaactccgttttctagcaagtattaagggagctgtgtctgaaatggcactgtcttgtcagtcatttctgtttacctttttcttctgcccagagtgtatttgtgaagagtctcttatattatgttttgtggaaatcagcacacaaccacaatgacatttaagcacaggatcattattagtctatgtttttaataaacatatcaattaagaaaa

SEQ ID NO: 337851 - DNA, 829 bp, Homo sapiens
ggaagtgaggataggccgagttccgggcgcgaggcggccaccgtggagagcagagcgcggcggctggaagctgctaagtcagagccgcgatgttccggattgagggcctcgcgccgaagctggacccggaggagatgaaacggaagatgcgcgaggatgtgatctcctccatacggaactttctcatctacgtggccctcctgcgagtcactccatttatcttaaagaaattggacagcatatgaagacaggacatcacatatgaatgcacgatatgaagagcctggttacagtttcgactcctctctgcaagtgaataggcccagaaaggtgtaagagactctttgaatggacataaaattctgcttgttaagaacaagtttggctctggtaactgaccttcaaagctaaaatataaaactatttgggaagtatgaaacgatgtctcgtgatctggtgtacccttatccctgtgacgtttggcctctgacaatactggtataattgtaaataatgtcaaactccgttttctagcaagtattaagggagctgtgtctgaaatggcactgtcttgtcagtcatttctgtttacctttttcttctgcccagagtgtatttgtgaagagtctcttatattatgttttgtggaaatcagcacacaaccacaatgacatttaagcacaggatcattattagtctatgtttttaataaacatatcaattaagaaaaaacaaaaacaaaatcgggctttatgtcgggggggggcaaacggggtttcgaagggcctgggccaaagggtccggcccgtttttgtacaggggaacgccg

SEQ ID NO: 337852 - DNA, 1285 bp, Homo sapiens
atacaaaaattagccaggcatagtggcatgtgcctatagtcccaactattcaggaggctgaaaaaaataaataaataaaataatgttaacaaaattctattagtatgagtattgagaaagaaggtgatttgggtagcttttttttggtcacaacacttttacacaggacagtaatatcacttctttagatctatatgtcgacacttagttttctagacatttctatgtacatgatcttattagaccctcttaatgactgaggtaggactgtatcagatgtgatctagagtatgttaagtgatatatagctaatcagtaagagacccaaaataggtgtccagctcttccggttctctagttcagtgttttcccatatcctctgcctttcaaatgagtttttaaaggtgaaaaatgcccatttgtttcctctagagttttgttccttttacagttaaaataaatcgctagagtaaagccttgtcatttgaaagagaattggatttatactttatggccctaaggggcaaactatctggagaaaaggttttatgtagtataagaatgaaatttacaataatagctgaatgacagtggaatgggctgctttggaaggcaactagtcccttttgctgggctgtacaggcacatgcttgaccatcacttggagttattttcaaaaacatgttgaataaacctgataattctataatgtagcctatgggctaatagatttgaaaactaattttagatttgtttttctttcagctccatttatcttaaagaaattggacagcatatgaagacaggacatcacatatgaatgcacgatatgaagagcctggttacagtttcgactcctctctgcaagtgaataggcccagaaaggtgtaagagactctttgaatggacataaaattctgcttgttaagaacaagtttggctctggtaactgaccttcaaagctaaaatataaaactatttgggaagtatgaaacgatgtctcgtgatctggtgtacccttatccctgtgacgtttggcctctgacaatactggtataattgtaaataatgtcaaactccgttttctagcaagtattaagggagctgtgtctgaaatggcactgtcttgtcagtcatttctgtttacctttttcttctgcccagagtgtatttgtgaagagtctcttatattatgttttgtggaaatcagcacacaaccacaatgacatttaagcacaggatcattattagtctatgtttttaataaacatatcaattaagaaaa

SEQ ID NO: 337853 - DNA, 833 bp, Homo sapiens
ggaagtgaggataggccgagttccgggcgcgaggcggccaccgtggagagcagagcgcggcggctggaagctgctaagtcagagccgcgatgttccggattgagggcctcgcgccgaagctggacccggaggagatgaaacggaagatgcgcgaggatgtgatctcctccatacggaactttctcatctacgtggccctcctgcgagtcaagtgagtgtctcccgggctgtgactgtgagaccagcggggagctcaccgacgggcaccccttaactctaaggggtcatcggggccttcgaactgagctgaacgctccatttatcttaaagaaattggacagcatatgaagacaggacatcacatatgaatgcacgatatgaagagcctggttacagtttcgactcctctctgcaagtgaataggcccagaaaggtgtaagagactctttgaatggacataaaattctgcttgttaagaacaagtttggctctggtaactgaccttcaaagctaaaatataaaactatttgggaagtatgaaacgatgtctcgtgatctggtgtacccttatccctgtgacgtttggcctctgacaatactggtataattgtaaataatgtcaaactccgttttctagcaagtattaagggagctgtgtctgaaatggcactgtcttgtcagtcatttctgtttacctttttcttctgcccagagtgtatttgtgaagagtctcttatattatgttttgtggaaatcagcacacaaccacaatgacatttaagcacaggatcattattagtctatgtttttaataaacatatcaattaagaaaa

SEQ ID NO: 337854 - DNA, 746 bp, Homo sapiens
ggaagtgaggataggccgagttccgggcgcgaggcggccaccgtggagagcagagcgcggcggctggaagctgctaagtcagagccgcgatgttccggattgagggcctcgcgccgaagctggacccggaggagatgaaacggaagatgcgcgaggatgtgatctcctccatacggaactttctcatctacgtggccctcctgcgagtcactccatttatcttaaagaaattggacagcatatgaagacaggacatcacatatgaatgcacgatatgaagagcctggttacagtttcgactcctctctgcaagtgaataggcccagaaaggtgtaagagactctttgaatggacataaaattctgcttgttaagaacaagtttggctctggtaactgaccttcaaagctaaaatataaaactatttgggaagtatgaaacgatgtctcgtgatctggtgtacccttatccctgtgacgtttggcctctgacaatactggtataattgtaaataatgtcaaactccgttttctagcaagtattaagggagctgtgtctgaaatggcactgtcttgtcagtcatttctgtttacctttttcttctgcccagagtgtatttgtgaagagtctcttatattcacttccattctggatctttcacaagaatgtgaagtcaactaatgaggtctaaattttcttccttctacttcttctgtctcctatggtatcataacttatctccccttc

SEQ ID NO: 337855 - DNA, 936 bp, Homo sapiens
ggaagtgaggataggccgagttccgggcgcgaggcggccaccgtggagagcagagcgcggcggctggaagctgctaagtcagagccgcgatgttccggattgagggcctcgcgccgaagctggacccggaggagatgaaacggaagatgcgcgaggatgtgatctcctccatacggaactttctcatctacgtggccctcctgcgagtcactccatttatcttaaagaaattggacagcatatgaagacaggacatcacatatgaatgcacgatatgaagagcctggttacagtttcgactcctctctgcaagtgaataggcccagaaaggtgtaagagactctttgaatggacataaaattctgcttgttaagaacaagtttggctctggtaactgaccttcaaagctaaaatataaaactatttgggaagtatgaacacaatacaaaaaacaaaaggggcggccgctcgcgatctagaaatctagtcctacgccgtgtgacagaggacgctcaggcggtgtcctcaggatgcccgatgtgggcagacccgcagccacctagcggtgcgagagtaccccagaagatcaagctcttggggaagtggacgccccgatgattgtgcagatcagtgacatttccctgcaggattaccttgccgtgacggagaagtttgccaagtacctgccctcaccagttgccggggggttaatgcccgcaaaggctttccggaaagctcagtgtgccattgtggagcgcctcaataagtccatgattgatgcgcggcgcaacaaagggcaggaaggtcatgatgttggcatcggtccaggattgcttggagatattaacctgcccccgggggaaccctctgaggcctgtggagcccccattcacgggccgggggaccacccatgggggcggcggtaaaacacggttt

SEQ ID NO: 337856 - DNA, 676 bp, Homo sapiens
ggaagtgaggataggccgagttccgggcgcgaggcggccaccgtggagagcagagcgcggcggctggaagctgctaagtcagagccgcgatgttccggattgagggcctcgcgccgaagctggacccggaggagatgaaacggaagatgcgcgaggatgtgatctcctccatacggaactttctcatctacgtggccctcctgcgagtcactccatttatcttaaagaaattggacagcatatgaagacaggacatcacatatgaatgcacgatatgaagagcctggttacagtttcgactcctctctgcaagtgaataggcccagaaaggtgtaagagactctttgaatggacataaaattctgcttgttaagaacaagtttggctctggtaactgaccttcaaagctaaaatatctgtgacgtttggcctctgacaatactggtataattgtaaataatgtcaaactccgttttctagcaagtattaagggagctgtgtctgaaatggcactgtcttgtcagtcatttctgtttacctttttcttctgcccagagtgtatttgtgaagagtctcttatattatgttttgtggaaatcagcacacaaccacaatgacatttaagcacaggatcattattagtctatgtttttaataaacatatcaattaagaaaa

SEQ ID NO: 337857 - DNA, 1763 bp, Homo sapiens
  misc_feature (841)..(841): n is a, c, g, or t
gcggccgcggcccggactccgcggtgggcgagcgccctgtgaggtgaccatggaggctggtggcctccccttggagctgtggcgcatgatcttagcctacttgcaccttcccgacctgggccgctgcagcctggtatgcagggcctggtatgaactgatcctcagtctcgacagcacccgctggcggcagctgtgtctgggttgcaccgagtgccgccatcccaattggcccaaccagccagatgtggagcctgagtcttggagagaagccttcaagcagcattaccttgcatccaagacatggaccaagaatgccttggacttggagtcttccatctgcttttctctattccgccggaggagggaacgacgtaccctgagtgttgggccaggccgtgagtttgacagcctgggcagtgccttggccatggccagcctgtatgaccgaattgtgctcttcccaggtgtgtacgaagagcaaggtgaaatcatcttgaaggtgcctgtggagattgtagggcaggggaagttgggtgaagtggccctgctggccagcattgatcagcactgctcaaccacacgcctgtgcaacctcgtcttcacgccagcctggttctcacccatcatgtataagacaacatcaggtcacgtccagtttgacaactgcaactttgagaacgggcacatccaggtccatggcccgggtacttgccaagtgaagttctgtaccttcaaaaacacccatatcttcctgcacaacgtgcccctgtgtgtcctggaaaactgtgaatttgtgggcagtgaaaacaactctgtgactgttgagggtcacccatctgcngataagaactgggcctacaagtatctactagggcttatcaagtcctcacccacttttctccccacagaggactctgactttttaatgtccctggacctagagagccgggaccaggcctggagcccaaagacctgtgacattgttatcgagggcagccagagccctaccagcccagcttctagctccccaaagccaggctccaaggctggctcacaggaggcagaggtgggtagtgatggtgaaagggtggcccagaccccggacagcagcgatggaggcctgagtcccagcggtgaggatgaagatgaggaccagctgatgtacagactatcctaccaagtgcagggcccacgccctgtattggggggctcatttctgggcccacctctaccaggagcatccattcagctgcccagctgcctagtgctgaactcactgcagcaggagctgcagaaggataaggaggccatggcactggccaactccgtgcagggctgcctcatccgcaagtgcctcttccgggacgggaagggaggcgtcttcgtctgctcccacggcagagccaagatggaaggaaacatcttccggaacctgacttacgcagtgcggtgtatacataatagcaagatcatcatgctcaggaacgacatttaccgctgccgagcgtcaggcatctttcttcgcttggagggcggtggcttgattgccggcaacaacatttaccacaatgcagaggctggtgtagacatccggaaaaagtccaacccactcatactgtgtaaccagatccaccatggccttcgctctggcattgtcgtccttggcaatgggaaaggcatcatccggaacaatcaaatcttttccaataaggaggctggcatttacatcctgtaccacggaaaccccgttgtgaggtgtgtgc

SEQ ID NO: 337858 - DNA, 2137 bp, Homo sapiens
  misc_feature (1215)..(1215): n is a, c, g, or t
tagtaacgcccgccagtgtgcgggaattcggctttcgagcgccgcccgggcaggtgtaagtcagagccgcgatgttccggattgagggcctcgcgccgaagctggacccggaggagatgaaacggaagatgcgcgaggatgtgatctcctccatacggaactttctcatctacgtggccctcctgcgagtcaagtgagtgtctcccgggctgtgactgtgagaccagcggggagctcaccgacgggcaccccttaactctaaggggtcatcggggccttcgaactgagctgaacgctccatttatcttaaagaaattggacagcatatgaagacaggacatcacatatgaatgcacgatatgaagagcctggttacagtttcgactcctctctgcaagtgaataggcccagaaaggtgtgaccatggaggctggtggcctccccttggagctgtggcgcatgatcttagcctacttgcaccttcccgacctgggccgctgcagcctggtatgcagggcctggtatgaactgatcctcagtctcgacagcacccgctggcggcagctgtgtctgggttgcaccgagtgccgccatcccaattggcccaaccagccagatgtggagcctgagtcttggagagaagccttcaagcagcattaccttgcatccaagacatggaccaagaatgccttggacttggagtcttccatctgcttttctctattccgccggaggagggaacgacgtaccctgagtgttgggccaggccgtgagtttgacagcctgggcagtgccttggccatggccagcctgtatgaccgaattgtgctcttcccaggtgtgtacgaagagcaaggtgaaatcatcttgaaggtgcctgtggagattgtagggcaggggaagttgggtgaagtggccctgctggccagcattgatcagcactgctcaaccacacgcctgtgcaacctcgtcttcacgccagcctggttctcacccatcatgtataagacaacatcaggtcacgtccagtttgacaactgcaactttgagaacgggcacatccaggtccatggcccgggtacttgccaagtgaagttctgtaccttcaaaaacacccatatcttcctgcacaacgtgcccctgtgtgtcctggaaaactgtgaatttgtgggcagtgaaaacaactctgtgactgttgagggtcacccatctgcngataagaactgggcctacaagtatctactagggcttatcaagtcctcacccacttttctccccacagaggactctgactttttaatgtccctggacctagagagccgggaccaggcctggagcccaaagacctgtgacattgttatcgagggcagccagagccctaccagcccagcttctagctccccaaagccaggctccaaggctggctcacaggaggcagaggtgggtagtgatggtgaaagggtggcccagaccccggacagcagcgatggaggcctgagtcccagcggtgaggatgaagatgaggaccagctgatgtacagactatcctaccaagtgcagggcccacgccctgtattggggggctcatttctgggcccacctctaccaggagcatccattcagctgcccagctgcctagtgctgaactcactgcagcaggagctgcagaaggataaggaggccatggcactggccaactccgtgcagggctgcctcatccgcaagtgcctcttccgggacgggaagggaggcgtcttcgtctgctcccacggcagagccaagatggaaggaaacatcttccggaacctgacttacgcagtgcggtgtatacataatagcaagatcatcatgctcaggaacgacatttaccgctgccgagcgtcaggcatctttcttcgcttggagggcggtggcttgattgccggcaacaacatttaccacaatgcagaggctggtgtagacatccggaaaaagtccaacccactcatactgtgtaaccagatccaccatggccttcgctctggcattgtcgtccttggcaatgggaaaggcatcatccggaacaatcaaatcttttccaataaggaggctggcatttacatcctgtaccacggaaaccccgttgtgaggtgtgtgc

SEQ ID NO: 337859 - DNA, 400 bp, Homo sapiens
ctggctcaggacagatggggaagaattcgtatattttagtacccctgaattaaagcattatacttaggcctaattgttattgactaaacaagaaaataagatgttaatccctaacagatacttcagttgttagagacttcatatttttggaaaactattgaaaagtttaagaaaatcccacaaactttcaatttggagttctcattatctcattaaatgaatagcactgcatataattaagctcccaagcaggtttaagatttgggagatgtgcaaatacagatcaccatgtgttcattcactatttggtagtccctcagaatggatttcagtgactctgtgttttaagaactcttaaaattctcctcccgtttttttggcagagagccaatgaaacatt

SEQ ID NO: 337860 - DNA, 396 bp, Homo sapiens
gtagaaaactcttaaagattctacaaaagaaatggtagaactaataaatttagtaaagtagcaaaatacaaaatcaacacacaaaccagctgcaattctatacattaacaatgaacaatatgaaacaagaaaattcaatttacaatggaatcaaagagaatacagatgctacttgacttacgatggggttaaatccctataaacccaccataaattgaaaatatcctaagtcaaaaatgcacttaatacacctaacgtaccaaacatcacagcttagcctatcctatcttaaacgtgctcagaacacttacattagtctagttcagcaaaaccatctaatacaaagctattttaaaataaagtgttgactacctcatgtaattaattcaacacttt

SEQ ID NO: 337861 - DNA, 798 bp, Homo sapiens
atgttgaaaacatttgtgttaggtctgctttttgtttgtttgtttgtttatccgagacagggtttggttctgttgcccaggctggagtgcagcggcacaatctcggctcactgcaaactctgcctccccggctcaagcgattcttgtgcctcagcctcccaagtagctgggattacaggcgcacaccaccatgcccagctaatttttttttgtatttggaagaggcagggtttcaccatgttggccaggctggtctcgaactcctgacctcaaatgatgcacctgccttggcctctgaaagtgttgggattacaggtgtgagtcaccacatccggccttgtgctaggttttctgaagcagactctaagtgtcacggatacagttgttaaaatggttctgtatatactcaatgattctccagttcatggaaacagaagacaatgaatttaatgatactgtgttctctgccagtattcactgatggagaaggggaagggtctttttaaataaagatttacttttcaactccaattcagattttcttgaaaataaaaggaatgtttgtcaaatcatcattttcactcagtaattcattatttcaataatcaaaataaaaaatgactgccatttgcattttctcatctatcttcatactgcatataaacaagataaatttaaagctccaaggaagggaagagaagatcttatttatgatccacccagacaggtgtgagaatttatgttccaacttcataagttgataataatgatttcacatatttttacaacatgattcag

SEQ ID NO: 337862 - DNA, 916 bp, Homo sapiens
aaattttctaccatagataacagaaaattctttcgcgcaagcatgtcattgtattaatgatattctcctgccctaaggaaatttacttcccttcaagcacagggtcccccaaattactgtatttccacccctttcagcttattttatccttttctcctgctacagaacagttggcattcaccattcccttcggtaaagtctttttttaggctgtggcttaaaggttgctttttcccccatagctcaaggttaggccttgtgacctcacttatgtaatttgagtgatttgatagcacaaatcaattttatacttaaattacagcataaaacagcactgcctcctgttggaaaaacttgcttgctaattttaaccagacacagtaaaaatactgtccaatacctcaaaaattgtgtaaatatatatccatttcaattgtcccccttcctctcctctccttttatctcttggaagataaaaatgtatgggtcctgtgctgataatgtttctgttcatatttctatgccctggtacctggatcagcttttgttctacacaaaaagacttgtatctggcttatttctgaaagctagtgttggccatgatgaacttttagagcaaaagatttcaggcagagtacattcttacatattcttacacaatcaatattcagttccagcccgcacagtagccctagcaaatgccagtgctccttccagagattcacctatggattcagtaccccagaagagaatttctgtaaattcttggggaagctatagctagactatggctcaacactcatttttcccccatgattcttaatctaacagtggcaatgttggcctcttcttaggcaactagattcggttcttgcttattctgccaataaaatactttattgagatgcttaaaaat

SEQ ID NO: 337863 - DNA, 619 bp, Homo sapiens
ttcctcgcccaaacaattgtttcctttttttgtgtgtcctaacaatgtgtttacataagcagatatatttatatatgtgtgtatttatgggtacatacatttatatatgtatgtgtatttgtatgttataaaattatatttacatagacaggtgaccttaaaacaacacacagctatgcactgtgcaggtccacttacaagtgagtttttttccataaacatattacaaaatgatctggagattttcagcaatctggaaaaactcagaaaccacgtcaccaataaatagcaaaacaaaataagaaaaagttaggtacgtcatgaatgcataaaatatacatagataccagtctatttatgtgttaatcaactgttgatgttatcagtaaggcttttggtcaacagaaggctgttggtagttaggttttgaaagagttgaaaattatgtgcggatttactgccatgtggggagttggtgcttctgacccctacattggtcaagggtcacctgcatcagtatgagtagttgcatgtgtgtgcattctgaaacactatggtaatagaagaaaaggaaagtgtggaagagcagatatgataggttccaatttgtgtgaaagag

SEQ ID NO: 337864 - DNA, 230 bp, Homo sapiens
ctgttgtgattcagtctgtgaatatttactgatcctgtgcctattttcttcagtgggattctcaattaaacaaactgcatggccatttgaaagcttattagacatagattttggacttgaaactgggtaagtttccaaagaaagaacgcgaatttttgcacaaaaccacattttgaattcatcagtagtcctcagcagcactacttcacagtctttgtgtagaaattgaa

SEQ ID NO: 337865 - DNA, 134 bp, Homo sapiens
tcaactgtgccagctaggaatctgtggatacagcacgcttctcccatctcagaagaaaaagcaaaacgtaccacttctgacaactcaccactggagagcatgagagaagcattaagtaagacctccctgacatc

SEQ ID NO: 337866 - DNA, 311 bp, Homo sapiens
agtgaatgcaaatagtccaacttcccataacaagcaccttctctccctacagacagagttacgtgggaagccaagtcagcatcaaactgttgcttggaaaaggtgggctcagaacaaaggaagttggatatatgattgcagtgtttaaaggtacctgaatgggacaggctgacaggtctgtcttgccaatgggaccatagcactatacacagaggcactgactaaggctctagtgaccccatgtagtgtagaacaggccctagcaacatttgtctctgggactccttcctcactttcatcactgaccagtg

SEQ ID NO: 337867 - DNA, 373 bp, Homo sapiens
aataaggcaaatatgaatacttacctcagagtgttgttgtgaagatggaatgaattaatggccataaagcacttacagctgtgtctggtacatagtgaccactcactaatggtcacttataattccttcacaacctgtaagggtcctttccacccaggtgatgtccctatgtctcaactgaatgactggttagggatatctttccatgggctactgtggctgcagataattgcattcttatttgagagttatgttaactagtgtgggcttttatttgcttctctctttctatcaatgagtcctgctgcttcaaccctgggttaactgaaatttgaaacctttttctactcaaattcctttgatgctgaaattc

SEQ ID NO: 337868 - DNA, 365 bp, Homo sapiens
gatataagctataaacaaagcgcttgtagtagtgtaatataagggagtaatagttgttgctatcgttattttttaattttaattgacatactaattatacatatttatgggataaaatatgatgcttcaatacatgtatacattgtgtaatgatcaaatgaaggtaattagcatatccatcacctcaaacatttataatttttgctgtgagaacagcaaagagatacattctggttgaacttgctacagaatagtaacaactgatgtgcttctgctagtctttttttttttttttttttttttggaaacaaattctccctctgtgcccaaggcggaattgcggggcccccatctcaccccatgga

SEQ ID NO: 337869 - DNA, 343 bp, Homo sapiens
acaggtgtaagccactgcgcccggccttggacacatcttttattgaaacgtggttaaatcaagaggttggaaaaggagtctatcttggtgtgaggcaatttgaagatatattgatccaggaggaagagaagttaaagaaaataaatggtgatagaagctcctgcggaagaagaggaagcaaagagcctgcagttatgactgagaacatgggcctgaaggagagtcagctccggccactgggaagaagcagggagcggaggtgggggacacgctggatatcaagcaggatacagttcctcgtcaggtttcttaaattcatggcatgaaaatcccagatatctca

SEQ ID NO: 337870 - DNA, 374 bp, Homo sapiens
tggcatacccccattagcagtggcctcgtataagcaggtgggcatgtaagtatgtgtgaatgtgttggggggcagatatggaatggaagcttgagaccctaatgctcactcattcattcaacatatattcattcaacatatcctggatgcacttttttaactatgggaaagacagcacaggacaaaaatcctggccggatgcggtggctcacacctgtaatcccagcacttttgggaggccagtgtgggcagattgcttgagtccaggagttcaagaccagcctaggcaacatggtttctaccaaaaatacaaaaattaccaaagaatcatcaaggtaaatatgaaattacacctttgagaaggatcaggaatg

SEQ ID NO: 337871 - DNA, 458 bp, Homo sapiens
tccaatacaataatagttggggacttcaataccctactctcagcatgagacaaatcatctagacagaaaattaacaatgaaataaccagatttaagctgtactttagactaaatggaccttacaaacatttacagaacatttcattcaatagctacagaatatacattcttctcatcagcacatggaacattctccaaggtagatcacatgttatgacacaaaacaagtctcgggggtggttccaagatggccgaataggaacagctccagtctacagctcccagcatgagcgacgcagaagacgggtgatttctgcatttccaactgaggtaccgggttcatctcactggggcttgttggacagtgggggcaggacagtgggtgcagcccaacgagcatgagccaaagcagggcaaggcatcgcctcaccagggaagcgcaaagggtcagggaattc

SEQ ID NO: 337872 - DNA, 4407 bp, Homo sapiens
  misc_feature (1)..(1): n is a, c, g, or t
nagatccatgttcactagcggccttacagaaagtactcaaaaagaagttcgaatagttggtgttgaagctgaatcgatggatttagtgttgaactatgcctacacttccagagttattcttacagaggccaatgttcaagccttgttcactgcagctagcatcttccagattccttccatccaagaccaatgtgctaagtatatgatcagtcatttggacccacagaattctattggggtctttatctttgctgatcattatggtcatcaggaactcggagatcgatcaaaagaatacattcgtaaaaagtttctgtgtgtcaccaaagaacaagagtttctccagttgacaaaagaccaactgataagtatactagacagtgacgatttaaatgtagaccgagaagagcatgtttatgaaagcattataaggtggtttgagcatgaacagaatgaaagagaagtgcaccttccagaaatttttgctaaatgcatacgttttcctctgatggaagatacctttatagagaaaattccacctcagtttgcacaggctatagccaaaagctgtgtagaaaagggaccatccaacaccaatggctgtacacagaggcttggaatgactgcttctgaaatgatcatatgttttgatgctgcccacaaacactcaggaaagaagcaaacagtgccttgtctagatatagtcacaggaagggtgtttaaactatgcaaaccaccaaatgacctgagagaagttgggattcttgtatcaccagataatgacatttacattgcaggagggtacaggccaagcagcagtgaggtctccatcgaccataaggcagaaaatgatttctggatgtatgatcattccaccaatagatggctatccaaaccatccttgcttcgagccagaataggctgcaaacttgtctattgctgtggtaaaatgtatgcaatcggaggtcgtgtttatgaaggtgatgggagaaactcactaaaatctgttgagtgctacgacagtagagagaattgttggacgactgtttgcgcgatgccagttgcaatggaatttcataatgctgtggagtacaaagagaagatctatgttttacagggagaattttttctcttctatgagcctcaaaaagactactggggtttcttaacccccatgactgtgcctagaatccagggcttagcagctgtatacaaggactctatctactacatagctggaacctgtggaaatcatcaacgtatgtttactgtagaagcctatgatattgagctaaataaatggactcgtaagaaagactttccatgtgatcagtccataaatccataccttaaactggtacttttccagaacaaactccatttatttgttcgagctactcaagtgactgttgaagaacacgtcttcagaaccagcagaaaaaattccctttaccaatatgatgacattgctgaccagtggatgaaagtgtatgagaccccagatcggctctgggaccttggccggcattttgaatgtgctgttgctaaactgtatcctcagtgtcttcagaaagtactctaaatgagtagcaggccttagtgcatcactggcatctcattcttaggaaacttgtctttgatacaaaagagtgctgacagtatttcagaaagctgagagagttttatacatggaaaatgggtatgcttaaagattgcagggtagggagggattttccttcatccttgtgacatttcatttcagtaaggaaaagataacaaagtgcaattatcagcatttttttttcctggcataaaattaatcatttcattttataattttgtgataaatagtaactgaggtaccagatgaatcaggacaactatgcactcttataagagcatttagggtattattgggtaaagacgtctaaacttgtttgatgtgacttttaattttaaatacgggtaacaatctgaggcaatatcactaggactttagctgtgacctctctaacacagagaagcactaacttagatcctcattcttaatatttatatgtatctatttttgtgtactgttttcaagtgtactgagatttaaatgtgttctattattagagtagatcgaagaaaaaattagtctcagaaagagcttttagtctgattgtttccatttcccatgtaattttaagttaagctaaagttttaaagtggcagttttctgtcgatgactttttcaagtgctaacactgtctcttttgtgaaaatctggaaaagtgctcatattcacaggtggctggtgctagtctaacttaattcatgtgtataactagatggatttaaatggtctgagcctatgcctatctttcaaattggtgtggatttcatggccatagtactttacctgttgaactcttgtgatttcacaagattctctacttatgtgataggagggtatggccagttattcatctaactggactcaatcttagaatagtaggaacattatacccagtttgcactaacatgggccatttgtagcccaaccttctcttccatctacctgtccattcattattggtacaaggaaaggtaacttatttctcttctgcacagagcataatgtgaagttttatacctacttttaaaattctgctttccagaaacaaaattcctgcagtggtctaatttaatgtctttaagtttcatattacaattaaaacctcattttttttttccatttttgcacttaacagtgatgaatacttttacgttggaatcctccttctagctgaaggtgattgaaaaggaaaagagtgagtgaacagaaccatagctttctaggtactaaagcattttttgcatttaactgatgaaatttctaacaatcatcagttaggaatattaacatgaaggataaaccaacttatttgtatacctaaggcaggcatttggatcagtaacatgttttactaagcctagagtaattcgtaaagggtataagcataggacagattttgccctcaatcacaatatttgtattcacttgaaagcaaactggcatggttcgtattttaaaaatcttgcacaaattgtaatgtgatactgtgaaacaaattgaaaacattgcctctttgcatcacatacctcgtttttcagaaactttccaaactgctttacatagacctctacaagtagggaatgttttctgaagcagaagttaaaatggacagcatttctagaattaacattttaaaatctagtcttagctagatatgtggtttcttcttattggtgttgatagtatgtctgtaatctctgtataaactttgtcaacatttttacctccccagttttatcttctgttttgtttttgtttttatcatcatgatgttttggagttattactgtgtattttagaaatcattctttacagttttgcattgctgaggagagagaaaaaacaatttttttgcaagagatgttcatgtaatttatttttgaaagctttgttgaataagatttcctgccgctttttgacaatcttgtgtatttagaaaaatgtattacttgaaaacatgacatagaacattgagttagcaatttacatgggctgtatgttatataagagaatgacatactgtggctaattcaacagtagatttattcttttagcctgcacaacagttgatcttttggctatgacaatttgtatggagggtacgatctaagttaagtgtgtcaaaagcaaggcttaggatttgttatgggagtagaatatatattgaattttgtatgaagaactatttgtttaaattatatagctgggatattttgccactgttaaaatggattcagaagaggtcctagaaaagtaagattagtgacatgtgtgggtttatatttagatatttaaggtgcattttcatagtgtggtaagaccttaagtaaaaggcacaatgggtactacagaattaaaatgtaggtctaacataatgccagttccactttaactttgtttttgcatttgaagaatgtatgtagcactttcctatatatttgtcacacattgaaaactggactgggtataactatgttataggaaagtagaaattgtattctttattttccatctttgttttctgttctacaaagttgatgcttaagcatcaagctgattttattggtcatgagaacaaatggatgtgatcatgaaggaatcagattccctatgtaaagcagtttaaaatggaattcaatgttcagtgctcaggtatgtagtaagtactgtagtcctgtgggggcaaatgtgtagatatttttaaacattttgccataattgcacaattttttgcatttttacctgatgtcattgtttcttataataaaaccttttctgattgaaaa

SEQ ID NO: 337873 - DNA, 588 bp, Homo sapiens
ccatcaagcccaagtaactccttgtaccttcccaatacaaacctcccaattcaggttgattataatattatctgttatattgtgtcatggaatgacaaagttttaaggtattttgtaacccatatgaatgtatctctggagattataaaagaaatgttttagaaagtgaaatatatagcaaattatgccctttaatctttagaggttgtagttacaacatataaccaaaaaccaaacataaaaatttacatattcttgttttcttttttttttttttaggagaattttttctcttctatgagcctcaaaaagactactggggtttcttaacccccatgactgtgcctagaatccagggcttagcagctgtatacaaggactctatctactacatagctggaacctgtggaaatcatcaacgtatgtttactgtagaagcctatgatattgagctaaataaatggactcgtaagaaagactttccatgtgatcagtccataaatccataccttaaactggtacttttccagaacaaactccatttatttgttcgagctactcaagtgactgttgaagaacacgtcttca

SEQ ID NO: 337874 - DNA, 4315 bp, Homo sapiens
  misc_feature (1)..(1): n is a, c, g, or t
nagatccatgttcactagcggccttacagaaagtactcaaaaagaagttcgaatagttggtgttgaagctgaatcgatggatttagtgttgaactatgcctacacttccagagttattcttacagaggccaatgttcaagccttgttcactgcagctagcatcttccagattccttccatccaagaccaatgtgctaagtatatgatcagtcatttggacccacagaattctattggggtctttatctttgctgatcattatggtcatcaggaactcggagatcgatcaaaagaatacattcgtaaaaagtttctgtgtgtcaccaaagaacaagagtttctccagttgacaaaagaccaactgataagtatactagacagtgacgatttaaatgtagaccgagaagagcatgtttatgaaagcattataaggtggtttgagcatgaacagaatgaaagagaagtgcaccttccagaaatttttgctaaatgcatacgttttcctctgatggaagatacctttatagagaaaattccacctcagtttgcacaggctatagccaaaagctgtgtagaaaagggaccatccaacaccaatggctgtacacagaggcttggaatgactgcttctgaaatgatcatatgttttgatgctgcccacaaacactcaggaaagaagcaaacagtgccttgtctagatatagtcacaggaagggtgtttaaactatgcaaaccaccaaatgacctgagagaagttgggattcttgtatcaccagataatgacatttacattgcaggagggtacaggccaagcagcagtgaggtctccatcgaccataaggcagaaaatgatttctggatgtatgatcattccaccaatagatggctatccaaaccatccttgcttcgagccagaataggctgcaaacttgtctattgctgtggtaaaatgtatgcaatcggaggtcgtgtttatgaaggtgatgggagaaactcactaaaatctgttgagtgctacgacagtagagagaattgttggacgactgtttgcgcgatgccagttgcaatggaatttcataatgctgtggagtacaaagagaagatctatgttttacagggagaattttttctcttctatgagcctcaaaaagactactggggtttcttaacccccatgactgtgcctagaatccagggcttagcagctgtatacaaggactctatctactacatagctggaacctgtggaaatcatcaacgtatgtttactgtagaagcctatgatattgagctaaataaatggactcgtaagaaagactttccatgtgatcagtccataaatccataccttaaactggtacttttccagaacaaactccatttatttgttcgagctactcaagtgactgttgaagaacacgtcttcagaaccagcagaaaaaattccctttaccaatatgatgacattgctgaccagtggatgaaagtgtatgagaccccagatcggctctgggaccttggccggcattttgaatgtgctgttgctaaactgtatcctcagtgtcttcagaaagtactctaaatgagtagcaggccttagtgcatcactggcatctcattcttaggaaacttgtctttgatacaaaagagtgctgacaatttcatttcagtaaggaaaagataacaaagtgcaattatcagcatttttttttcctggcataaaattaatcatttcattttataattttgtgataaatagtaactgaggtaccagatgaatcaggacaactatgcactcttataagagcatttagggtattattgggtaaagacgtctaaacttgtttgatgtgacttttaattttaaatacgggtaacaatctgaggcaatatcactaggactttagctgtgacctctctaacacagagaagcactaacttagatcctcattcttaatatttatatgtatctatttttgtgtactgttttcaagtgtactgagatttaaatgtgttctattattagagtagatcgaagaaaaaattagtctcagaaagagcttttagtctgattgtttccatttcccatgtaattttaagttaagctaaagttttaaagtggcagttttctgtcgatgactttttcaagtgctaacactgtctcttttgtgaaaatctggaaaagtgctcatattcacaggtggctggtgctagtctaacttaattcatgtgtataactagatggatttaaatggtctgagcctatgcctatctttcaaattggtgtggatttcatggccatagtactttacctgttgaactcttgtgatttcacaagattctctacttatgtgataggagggtatggccagttattcatctaactggactcaatcttagaatagtaggaacattatacccagtttgcactaacatgggccatttgtagcccaaccttctcttccatctacctgtccattcattattggtacaaggaaaggtaacttatttctcttctgcacagagcataatgtgaagttttatacctacttttaaaattctgctttccagaaacaaaattcctgcagtggtctaatttaatgtctttaagtttcatattacaattaaaacctcattttttttttccatttttgcacttaacagtgatgaatacttttacgttggaatcctccttctagctgaaggtgattgaaaaggaaaagagtgagtgaacagaaccatagctttctaggtactaaagcattttttgcatttaactgatgaaatttctaacaatcatcagttaggaatattaacatgaaggataaaccaacttatttgtatacctaaggcaggcatttggatcagtaacatgttttactaagcctagagtaattcgtaaagggtataagcataggacagattttgccctcaatcacaatatttgtattcacttgaaagcaaactggcatggttcgtattttaaaaatcttgcacaaattgtaatgtgatactgtgaaacaaattgaaaacattgcctctttgcatcacatacctcgtttttcagaaactttccaaactgctttacatagacctctacaagtagggaatgttttctgaagcagaagttaaaatggacagcatttctagaattaacattttaaaatctagtcttagctagatatgtggtttcttcttattggtgttgatagtatgtctgtaatctctgtataaactttgtcaacatttttacctccccagttttatcttctgttttgtttttgtttttatcatcatgatgttttggagttattactgtgtattttagaaatcattctttacagttttgcattgctgaggagagagaaaaaacaatttttttgcaagagatgttcatgtaatttatttttgaaagctttgttgaataagatttcctgccgctttttgacaatcttgtgtatttagaaaaatgtattacttgaaaacatgacatagaacattgagttagcaatttacatgggctgtatgttatataagagaatgacatactgtggctaattcaacagtagatttattcttttagcctgcacaacagttgatcttttggctatgacaatttgtatggagggtacgatctaagttaagtgtgtcaaaagcaaggcttaggatttgttatgggagtagaatatatattgaattttgtatgaagaactatttgtttaaattatatagctgggatattttgccactgttaaaatggattcagaagaggtcctagaaaagtaagattagtgacatgtgtgggtttatatttagatatttaaggtgcattttcatagtgtggtaagaccttaagtaaaaggcacaatgggtactacagaattaaaatgtaggtctaacataatgccagttccactttaactttgtttttgcatttgaagaatgtatgtagcactttcctatatatttgtcacacattgaaaactggactgggtataactatgttataggaaagtagaaattgtattctttattttccatctttgttttctgttctacaaagttgatgcttaagcatcaagctgattttattggtcatgagaacaaatggatgtgatcatgaaggaatcagattccctatgtaaagcagtttaaaatggaattcaatgttcagtgctcaggtatgtagtaagtactgtagtcctgtgggggcaaatgtgtagatatttttaaacattttgccataattgcacaattttttgcatttttacctgatgtcattgtttcttataataaaaccttttctgattgaaaa

SEQ ID NO: 337875 - DNA, 512 bp, Homo sapiens
ggagctcccatactattccagggactgttggaaggtaaaagaaccaatctttacccgtaagaagagcctactaagtgatgggttggaggttaatagggaagttgagtgtgtgagtcagcagaatgagccagcattcaatagctcagtgcaaaagcacacattcatcggttaaggtcttgttccttaatagagatggatcgtttgctggttggtgttaactgagatgcttcctgattaaaataatcagcaaatgaaaatgtatctcaattttcagaagctcatttcatatgaatcactttcgcttttctgggatttcaaataaattggagagcttgggtcaaatgatgttttagggcgctcacaactgttctcaatgcttaagagcttacttgaaagagtaagttacaagcctcttcatgagacatgagtcggacatcccaggggatgtttccctttgttatccaaaggacccggaacgttgtcctatcaggcacctgactcactggacctct

SEQ ID NO: 337876 - DNA, 488 bp, Homo sapiens
ctctctgggcacccactgatctgcagctgtgagtcttgtgatttccaatccatgcgcgttgagcaccttgtatgcttcacttacgtgatcaatgtacatattcaagatggccacagggtcccgagggaggggtctcagaagacctgtgttcattcacaatccaaggccatctctgagaaagggtggcaagggttctacctcatagggtggtggtgagcactgagcaagttgatgagtgtaaaagtgcccagcatgcagtaagcgctgcagaaacattaaccacaactatttctgtttactggcagacgtgacactgccccggatcatgaagcaagcacagtttgcaattcctctggcccacaagcctagagatactgcaacactggagaagttcgctttttttaaaatagggaattcccatgagttccatttttgcacaataaagtgtgatttgttttctcagagacagtctcgctctgtcacccagg

SEQ ID NO: 337877 - DNA, 1059 bp, Homo sapiens
ccttcaattaaaaaaaacctattttttccaagcacgataaagcaaagcacaataagattatgtatgccaatattctaaaacaaacaggatggaggagcatctagacattctttactgaatcttgtaataatcttactactcaaaggaaggtctgtggatcaggaacattgacatgttaggaatatagactctcagcccccaccccagcactacagaatccgatttcattttatcaagatgccccaggcaatttacatctacatcaaggtttaagagtccttgtaatcctggctctggcatttactagcagtgtgatgttagattgcataatctctgtgtccactttgtcaactgtaaaatagagggtggagtacaggaagacagggtgcatgtaattggatattgggatatctctagagataaggtacacaaatgttaaataacacctcttgcttagtaagcattggttattttcacgtgctaagtactttcaaaaacaactgtaaggggatacagctttcaaattctcttaagtatttgaactcatcgtctttaaacccttacccttatttatgtcatattaagggtttttagcctattgaaatgttggggagggtttttattcatctggtttagtctttcttccttagagatgagtaagcacaggaaaaataagcatttccaaagtcagcaaatagtgtttgtcctaataagccctaatatagacaaatggccataacttcaatcaatgaattatcaagttataaacttaaaaatatacacagaaacaatctagtaatttgtcgaaccttgaaggacactgactgcttaatggactttagtcataatatgttgtaaccctagattaactgaaatgggtgaaatggatatgtatatatagaataagtttgtgcaaagagaagataacctggttttcaacttctttgaaaacatgttttagtataatctttgtgcatcgtttagtaagtataatatattctattaagtttcatgtttgtcttatgtaatgatttggaaagcacatccaggtctttcagt

SEQ ID NO: 337878 - DNA, 223 bp, Homo sapiens
gtcaaaacatactataaaagtacaatgattaaaatactggatctggctgggcatagtggctcacgcctgtaatcccagcatttttggggaggccaaggtgggagaactgcttgagtccaggagttcaagaccggcctgagcaacacggcaaaccccttctttacaaaaaatacaaaacttagccaggcatggtggcatgcccctgtagtcccagctacctggg

SEQ ID NO: 337879 - DNA, 320 bp, Homo sapiens
agcgaaactccatctcaacaacaacaaaaaaaaaaagaagaagaagtaaattaggcgggcatggtggcaggcacctgtaatcccagctactcgagaggctgaggcaggagacatgttcccaaccaacggggaacaagagaccagaaggacaatgtgggaacgtgagtggcaatctaagccatgccatctccagtgatatataaggtgcctggttgcaatcttgcacggaggagtcccatgaatctagactgctggacagaagaaccagactggaggaaaagaggatctacaagagccccagttatcctggccccatgacc

SEQ ID NO: 337880 - DNA, 417 bp, Homo sapiens
tcaatcggactttactgtataggaaagtggtgcaaattttgctacctattttcacgaatgtgatcaatctcaggcaagtcagcttctttaaaaaatgtaaagtggagcctggaatacaagagaacaaaaagcaggaatttacattatttccataatggaaaacttgttatttttaaactatttcttgtgagggaccattagaaaatttaaatcatttctccagaagagagtacctttggaaattagacaaatgtacatattaactgattgatactacaaaggaatgtgtctagaataaattacttttttaatgtaaaccttagaacttgaaaaactgtaattctgggaaagctacatattcaggtacatattcaataaatatgaatgaacacatgacaaatatataacctacagtaa

SEQ ID NO: 337881 - DNA, 147 bp, Homo sapiens
cactgacatgaaggagacaacaaaccggcaggggctgtggcatttggtagggaaccacagtccttgctatcccatgtggtttgtggattgaaccagtgagtaagtaaatgaatgaatctgatttccagcctatttatcctatggccg

SEQ ID NO: 337882 - DNA, 170 bp, Homo sapiens
caaggtgtccattgtaggtgattaactatatgtcaataggtggagaaaggagggtgagacagggttagagagcatcatttaccagaaggaatggagggagggaatgagagaaggcaggaatggaaaggaaaaaaaaaatcctttggtttctttttttttttttttttttt

SEQ ID NO: 337883 - DNA, 523 bp, Homo sapiens
tctacctctcccttacttcctccttccaagaacatgggcacaatgttgagcacttggagatgagagatcaggaccagtcccagtcagatggggtctccctatattgtctgagctggtctctaactcccggctcaagcgatcctcctgccttggcctcccaaagtgctgagattacaggtgtgagcgaccacacccagccatgttcagtttttacacagccattacgatcaacagttatctcatttgtcttcttaaaacaatttttaaatgttgtttagagatgaatgttgctctgttgcccaggctggagtgcagtggtgcaatcatagcttactgcagccttgaattcctgtccttggctcaattgatccttccacctcagcctcctgagtagttgggactacaggctaaaggccagaatcactgccccaccgtgcagccttcagcagctgctcctctctggcctcagtgtcctcttagttcaatgggcatcaccaggtccctgtggtgccttccttgtcac

SEQ ID NO: 337884 - DNA, 171 bp, Homo sapiens
tcggatttcttaagcctaattgtctattagcgaagtagtctgacttcatcatacaggctcccagagtttcacgtggaagtgtgagttgccagtctgttgattttcagtgtcccttctgggctttccaagtgttcattgccatagacagtccagaattatcggtattgttct

SEQ ID NO: 337885 - DNA, 889 bp, Homo sapiens
cgggactacaggtgtgggccaccacacccagctagcattgtttttattgtttctgtttcacaggagagagtaacttgacaagagacatagccagtgagtgatagacccaggacttgaacctgtgcctcctgaccacagatgctttgcccttttgctcttacgcctgaattagagctgcctctgtcctcagggactggtagggagtgaggaagacagcactcacagaaatgaggaggcgactggctgtgaggaccctgcagcacagagagtaataagcatagacaggaggggcagtaagagttgagaagttggggactgtcagggaagacctcaaagagaaagtgggatctcaggtgaactttgaagaatagggatgattttttagaaggcactggcaggcatcacaggcaaccagtcacccagcggctgctctgggtgctagggacacagtggtaaacaagacaggcagtcttgtcctcaaactgagggcagagtcgggaggcagaatatagtcaagaaaccatcaacaagagacgtgaaaacaatagagcagtgtggtagagagtgactgggccacgccttaggggacatgtggggacatgaggcagccatgctaaaatctgaaggttttggggtggaaagggcagcaagtatcctcagctggggacgaggccctgagataggaatggtttggtgggttcaagggtcaagaaaaatacagaggctggagcaacatgaagaaggaagagtgaaggcaaataagggcacagaaggctttatcaggcccaacggcaaagcctgcgagctgtgctgaatttagcgcgtatgtcagaatttagttaggggaagcctttggagggagggtttgaagcaaagggaaagacatctc

SEQ ID NO: 337886 - DNA, 500 bp, Homo sapiens
ctcactcatcttgagaatgaggaagagttaacccagaacaaagaaagggtagttgatgtttagtgtttgggcagatgtattccaagcaaagggaacattattggtaaaagaagaaaggggattgagagcccagagtcttcggagagctgtaaatattcagtctgacgggggtgtcaaggcacagaagcgaagtttggagtttatgctaccgacaatggggatctctaaaaggagttcagaaagatctgaaaatagactcaaagatttcttcaacaaaaggagatgggtgtctgaaaatgatgaagatgtggtccctgactccaaagagctcatcacctactgggagagacagatatgtaaacaaatcattacagaacaatttgtttcattctaaatgtagcacacaaaaagagctggggacagtgaagaggaagccgtcagcgctgcctgcggagaagaaaggaaggctttgtgtaggtgacaactgagcaagatgacag

SEQ ID NO: 337887 - DNA, 1017 bp, Homo sapiens
ggggtcagtgtgatatgtgtaaaaatccttggtaacccaaagggaagatgcagggagtttttttatttgcagaaatgctccagaattaggatatagtagcatgttctagactatctctgcttttgaaaatatggactatgacttcattcatccaaccagatatttatgtatttatttttcgagactgagtctcgctctatcgcccaggctggagtgcagtggtgcgatatcagctcactgcattgtctgcctcccaggttctagtgattctcctgcctcagcctcccaagtagctgggattacaggcacccaccaccatgcctgggtagtttttgtgtttttagtagagacatggtttcaccatgttggctaggctggtctcgaactcctgacctcaagtgatctgcccacttccgcctcccagggtgctgggattacaggcgtaagccactgcgcctggccccaaccagatatttttaatagctaactatatgctaggcattctccttgctggagttttagcagtaaataagcaaacacgcccctgcccttaaggagcatatattcaaatgggagagatagataatatccaagtacacaaatatagaatttggaggctagaagtccaaaatcagcttgtcagcagggctgtgctccctccaaaggctccaaggaagaatcctccattacctcttccagcatctggaggccccaggcattccttagcttgtggtggcatcacatcagtcttcccatggccttttcctctgtgtgtctgtcttctgctctctcttttataaaggacacctgttattggatttagggcctcctaggtaatccaggatgatctcatcttgagatccttaatttcatttgcaaagaccctttttcccataaggagatagtcaaagcttcttgggattaggatgtggacatatcttttgggagccaccagttaaccaggtaaaatatggaacctgggagaataacttcaacagcaggtattaaatcaaaatt

SEQ ID NO: 337888 - DNA, 130 bp, Homo sapiens
atgttcacttgtgcttgtattgagattaacttcggcctccagaggttattttttcaggaattttttttttaagctacttgtccattttgtaaaagttagcttaaattcactctaaattcatcatctgagc

SEQ ID NO: 337889 - DNA, 480 bp, Homo sapiens
cccttcaaaaacaatctgctcctccttcccatatctcacttaaatgtgggcgtctccatccttccaaacacacagactagaaagtcttgagttgttccctattctttatttccctcttcgcacagtaagtcaccaaattctgtggacagttctttggaaaggtctcaaatctctacctctttcccttccatatcactgtcaaaatgatgcctctacaagtctgagcctgtcaatgcttagtttaaaattctctatttactctagcctgattacagcaaactccgtccaaacagcccaatataacctaaaggtagtattatgacctaaagctcattgtactgtgaaaccaacctagctttccagttctgtcttcctcaactctacttcacccccagcatctttcttctaacatccccttttcatacttctgtgaaccacttatactccagaagccttaatgtgaattattagcccagcatg

SEQ ID NO: 337890 - DNA, 396 bp, Homo sapiens
aactccatcttaaaaaaaaaaaaaaaggtttttttgggagtattatattccattaaatttcttcagtttctgatttggttcctcctgtgtttgtcttgtcacatattgtgttatgcctctgactctggaacttttttggatattgagaatctttggcatgagaacttaagggaatctgaggcagagaaattgaatggtgtttctcagatgttgtccgcttttgtttcacttgtgccctcttgttcaccctttcttttttatcactgtaccgtaaagcattgtttgtaaaagcctgagtatacacagacatattgacagtaaacaacactgaaatggactgacttgagaaaatttcatgtatagaaaataagcaaaaacaaagtaagaaacactgca

SEQ ID NO: 337891 - DNA, 294 bp, Homo sapiens
  misc_feature (224)..(224): n is a, c, g, or t
tgataggactctgtctcatcctcagggggtaagtgtgtgtgtgtgtgtgcgcgcacacaggaaacctcttgtttttaaatatttccttctccaaacagcctgccgctgaccttcccggcctctgtgtggctctcaggccacctccttattgctatatcttggagcctggccttcccatgagggagctggaggttctggggctgcacctttgactcagcagcggngtgctgccagccccatcagggcccagttggtggggatcaggggcgtgtcagtgcgaggcaggtgtgagag

SEQ ID NO: 337892 - DNA, 460 bp, Homo sapiens
actagtcttcatttcttgactgaaccccctcacctctgttccttccttctgaaattctccttaccctcactttcccttctttctgtctcttcacttggttaataatcttcacagctcagttcaaatgtcactttcctgggaaatcttcccccagtgctaggtcaggccatcccttgatctattcccatgttttctcctcattgcactcatcacagttgataattgtaaatttagttgtgtggtgatctgtctgcttctcccaccagacattaacccccttgtgggtcgagatggtgccccctttgcttactattgtatcccaacatcctggcatatggccaggctcatggacaatactaaagaatggttgggtgggtgaagggatggatatctcgtgtcaggtgatgcatgaatggcactactgtctaactcacgatgaaaccaaatgttatgcttttgc

SEQ ID NO: 337893 - DNA, 303 bp, Homo sapiens
tgtaagacatgatactattttcttagaccagtgcctgacattgattaaaacttcagtaaacgtatcgaatactgaatgaatggaattaggtttagacctgtgtaggaacatgcagtatgctttattataatgtatgcgattgtatatatttattatccagctttttcacagctgccatcatccagcattacctactataactgtgattccgccttctttgagccagatgtaaaactacactgttgtaacttttaagggttaacgtgcatttgccttcattctagaaataggtttatgcttttg

SEQ ID NO: 337894 - DNA, 627 bp, Homo sapiens
cccgcgcgctttagctccctgtcctttggtcgcatttgtgggcgcgcggcacgcagccgggaggccgaggactcggagttcacctgcaggaaagtatgcctcagactcctcccttttcagcaatgtttgacagcagtggttacaatcgaaacctctatcagtctgcagaggacagctgtggagggttgtattaccatgacaacaacctcctctctggatccctggaagcactcatccagcacttagtacctaatgtggattactatccagatagaacatacatatttaccttcctactcagttctcggttatttatgcatccgtatgagctaatggccaaagtttgccacttatgtgttgagcaccagagactaagtgatcctgatagtgataagaaccagatgagaaaaattgcacccaaaatccttcaactcctcacggaatggacggaaacatttccctatgattttcgggatgaaagaatgatgagaaacttaaaagatctggctcaccgaatagccagtggcgaagagcagacatacagaaagaatgtccagcaaatgatgcagtgtctgatccgcaagcttgctgcgctcagccagtacgaagaagtcctggcaaaaatca

SEQ ID NO: 337895 - DNA, 375 bp, Homo sapiens
tcctggaaattgtgcggaaatgcagttggtttttccctgccccgcaccctgctgagctctcgttagtggtaatagcttctcagtggagtccgcaggactttgtgcacacaggatcctgtcatctgtgattcgagctagttttatttgttccctttcaacctggctgccttttgtcttcttccctaattgtcctggctgagacctctagttcggtgttggctggatgtggtgagccgggcgccctggtcttagggagagcgtgcggtttttgaccatcgagcatgatgttggccgtaggccgtgcgtgccctttgtcagaccctgggccctcccttctgtgcctcggctattccatatttttgtcctgtagaggtg

SEQ ID NO: 337896 - DNA, 1745 bp, Homo sapiens
ggccagctgcccaaggccaggaggggagacagagatcccgggacaaatgtgcagcaggcccctgagcatgtgtagaaatgttgtcatcatttccacatagaaagacttggaggaaatcaaagaagacagtaaaagtcacaagatcctatccaaccttcccttccctgaatgcctgggaagaattcaggggcctcttgcctgtggatggagagccgaaccctggagcgggcctaggtgtggaggagggactgctctgccgggtggttcattctccagaattcaacctgtttcttgactccgtggtgtttgaaagcaacttcatccaggtcaaaaggggcaggaattggagagacgtctacaaagcttccaacaccatggccctgggggtgacctcctcggtaccctgcctgcccctccccaacatcctactcatggccagtgtcaaatggcaccaggggcagaaccagacatggaacagaccatccatagcccccaacatcttcctgaagaggattctcccattgaggtttgtggagctccaggtatgtgaccactatcaacgcatcctgcagttgaggacagtcactgagaagatttattacctaaagctccatcctgaccatcctgagactgtcttccacttctggatccgactggttcaaattctgcaaaaggggctgtccatcaccaccaaagaccctaggattcttgtcacgcactgcctggtacccaagaactgcagcagcccctcaggagattcgaagttagtacagaagaaactccaagcctcccagcccagcgagagtctcattcagctaatgaccaagggggagagtgaagccctgtctcagatttttgccgacttacaccagcagaaccagttgagtttcaggagcagcagaaaggtggagaccaacaagaacagctcagggaaagattcttcccgtgaagacagcatcccttgcacctgtgacctacgttggagggcttcattcacgtacggagagtgggaaagagagaacccctccggcctgcagcccctctcactactcagcactctggcagcctccaccgggccacagctggccccacccataggaaattctatttgagccacccttccgcactggggagaatctatgcaagcctcatcaacaccactttgcagcattcagctgctgagggattatcgggatggagagtaggagaaaactgcaaccaaggaagaatagagtcatctcacggtgacagcagagcctttccagctgtacataaccacgtcctcgccactgcacctcggcatatgccacctccatgccactgccagagctggcctagcaagatgtgctctcagaatggccgggcccaagagatgaaggaaaggagtgaaagggaagtaggaccagagaagtggaaggaagcaaaatggaggtgatgagaaaggtggtgggagaaagtcagcagatgagagacacaaagagaagtggtaataggaaacggaagagacttggtagacgagataaggaggacaagagaagggacacacccctgagagatgctcaccaagcttctatttatctaatttaaaacttgaaagtaaagccataaacaaaaaaaagaaatgttttcttccctgctcagaccattctggacaaatgtgaactgccagacaccttccatttccctttctatctgtttttcttgctagttcctgtcttctgattaaagcttcattccttctttgt

SEQ ID NO: 337897 - DNA, 422 bp, Homo sapiens
ttctcaccggccaggatgcagacataatgatggcaggagctggagcagccacctgaggacccagagctcaaagccacatgttgagaagggcagagataactgtatccactctggactgctgacctttgaactattatgttatttccagggaaatgcaaaccaaaggatgtggtctctgatctaatccttagagaatgtgaccatgaagacacttttcctacctggtaaacaaaagataatgagaaaagtgaggttggaagttggtttactgagccaggagctataacaggtgctggagcaggggtgtgatctgaatgaccagagggaaggactgatggaattggatggtgagagcctccaggccctttaggcttctccctgactttataatgaaatacaaaagtcagcctccaaaaaaatcc

SEQ ID NO: 337898 - DNA, 716 bp, Homo sapiens
ggccagctgcccaaggccaggaggggagacagagatcccgggacaaatgtgcagcaggcccctgagcatgtgtagaaatgttgtcatcatttccacatagaaagacttggaggaaatcaaagaagacagtaaaagtcacaagatcctatccaaccttcccttccctgaatgcctgggaagaattcaggggcctcttgcctgtggatggagagccgaaccctggagcgggcctaggtgtggaggagggactgctctgccgggtggttcattctccagaattcaacctgtttcttgactccgtggtgtttgaaagcaacttcatccaggtattcttgggtggcgcagaatagcactctttgattcttcgaaacctgttcccaagatatgactgagagagtccatccctgaaactggggcagagtgagaattgaggcaaggagaagctagtggacctggaatgcaaggccaccctcactgacctgggctttgctgagccccagacggggcttctcctacagacagctgtcacccagggagaaaggtcaggggtcctctgctctgagtggagaatttggtattctaatcccccagtttacttcagcccccaggctgtcacctgaagtagatgaacaaagaggcagtaaaaagagacgcttcttgagaacaataatgcggattggcgaaagaacagcacctggggtccagagacagctggg

SEQ ID NO: 337899 - DNA, 1643 bp, Homo sapiens
ttctcaccggccaggatgcagacataatgatggcaggagctggagcagccacctgaggacccagagctcaaagccacatgttgagaagggcagagataactgtatccactctggactgctgacctttgaactattatgttatttccagggaaatgcaaaccaaaggatgtggtctctgatctaatccttagagaatgtgaccatgaagacacttttcctacctggtcaaaaggggcaggaattggagagacgtctacaaagcttccaacaccatggccctgggggtgacctcctcggtaccctgcctgcccctccccaacatcctactcatggccagtgtcaaatggcaccaggggcagaaccagacatggaacagaccatccatagcccccaacatcttcctgaagaggattctcccattgaggtttgtggagctccaggtatgtgaccactatcaacgcatcctgcagttgaggacagtcactgagaagatttattacctaaagctccatcctgaccatcctgagactgtcttccacttctggatccgactggttcaaattctgcaaaaggggctgtccatcaccaccaaagaccctaggattcttgtcacgcactgcctggtacccaagaactgcagcagcccctcaggagattcgaagttagtacagaagaaactccaagcctcccagcccagcgagagtctcattcagctaatgaccaagggggagagtgaagccctgtctcagatttttgccgacttacaccagcagaaccagttgagtttcaggagcagcagaaaggtggagaccaacaagaacagctcagggaaagattcttcccgtgaagacagcatcccttgcacctgtgacctacgttggagggcttcattcacgtacggagagtgggaaagagagaacccctccggcctgcagcccctctcactactcagcactctggcagcctccaccgggccacagctggccccacccataggaaattctatttgagccacccttccgcactggggagaatctatgcaagcctcatcaacaccactttgcagcattcagctgctgagggattatcgggatggagagtaggagaaaactgcaaccaaggaagaatagagtcatctcacggtgacagcagagcctttccagctgtacataaccacgtcctcgccactgcacctcggcatatgccacctccatgccactgccagagctggcctagcaagatgtgctctcagaatggccgggcccaagagatgaaggaaaggagtgaaagggaagtaggaccagagaagtggaaggaagcaaaatggaggtgatgagaaaggtggtgggagaaagtcagcagatgagagacacaaagagaagtggtaataggaaacggaagagacttggtagacgagataaggaggacaagagaagggacacacccctgagagatgctcaccaagcttctatttatctaatttaaaacttgaaagtaaagccataaacaaaaaaaagaaatgttttcttccctgctcagaccattctggacaaatgtgaactgccagacaccttccatttccctttctatctgtttttcttgctagttcctgtcttctgattaaagcttcattccttctttgt

SEQ ID NO: 337900 - DNA, 360 bp, Homo sapiens
accaagggggagagtgaagccctgtctcagatttttgccgacttacaccagcagaaccagttgaggtacatgacttaaatcaagccagcctctgacattccctcctgcaacccagatggtctgggctgtgagatccagaaaccaaatagcttggttaatgagcgcagggttttacgtgaccaggcacggtggctcacgcctgtattccccgcactttgggaggtcaaggcagatggattgcttgaggtcaggaatttgagaccagcctggcctcgatatactgccactcactatccagtctttttttttttttttttcctttttgagataggctctcactccgtcgcccagggttcaagc

SEQ ID NO: 337901 - DNA, 1766 bp, Homo sapiens
ttctcaccggccaggatgcagacataatgatggcaggagctggagcagccacctgaggacccagagctcaaagccacatgttgagaagggcagagataactgtatccactctggactgctgacctttgaactattatgttatttccagggaaatgcaaaccaaaggatgtggtctctgatctaatccttagagaatgtgaccatgaagacacttttcctacctggtaaacaaaagataatgagaaaagtgaggttggaagttggtttactgagccaggagctataacaggtgctggagcaggggtgtgatctgaatgaccagagggaaggactgatggaattggatggtcaaaaggggcaggaattggagagacgtctacaaagcttccaacaccatggccctgggggtgacctcctcggtaccctgcctgcccctccccaacatcctactcatggccagtgtcaaatggcaccaggggcagaaccagacatggaacagaccatccatagcccccaacatcttcctgaagaggattctcccattgaggtttgtggagctccaggtatgtgaccactatcaacgcatcctgcagttgaggacagtcactgagaagatttattacctaaagctccatcctgaccatcctgagactgtcttccacttctggatccgactggttcaaattctgcaaaaggggctgtccatcaccaccaaagaccctaggattcttgtcacgcactgcctggtacccaagaactgcagcagcccctcaggagattcgaagttagtacagaagaaactccaagcctcccagcccagcgagagtctcattcagctaatgaccaagggggagagtgaagccctgtctcagatttttgccgacttacaccagcagaaccagttgagtttcaggagcagcagaaaggtggagaccaacaagaacagctcagggaaagattcttcccgtgaagacagcatcccttgcacctgtgacctacgttggagggcttcattcacgtacggagagtgggaaagagagaacccctccggcctgcagcccctctcactactcagcactctggcagcctccaccgggccacagctggccccacccataggaaattctatttgagccacccttccgcactggggagaatctatgcaagcctcatcaacaccactttgcagcattcagctgctgagggattatcgggatggagagtaggagaaaactgcaaccaaggaagaatagagtcatctcacggtgacagcagagcctttccagctgtacataaccacgtcctcgccactgcacctcggcatatgccacctccatgccactgccagagctggcctagcaagatgtgctctcagaatggccgggcccaagagatgaaggaaaggagtgaaagggaagtaggaccagagaagtggaaggaagcaaaatggaggtgatgagaaaggtggtgggagaaagtcagcagatgagagacacaaagagaagtggtaataggaaacggaagagacttggtagacgagataaggaggacaagagaagggacacacccctgagagatgctcaccaagcttctatttatctaatttaaaacttgaaagtaaagccataaacaaaaaaaagaaatgttttcttccctgctcagaccattctggacaaatgtgaactgccagacaccttccatttccctttctatctgtttttcttgctagttcctgtcttctgattaaagcttcattccttctttgt

SEQ ID NO: 337902 - DNA, 505 bp, Homo sapiens
gtttctcatagctatcaaaagctactaaaaggtttacatatattggtaataagcaaaatgacctctgaatgaaattaagagggtaggatctagacacactggtgggtcttaaggtttctcagcattgtctggccatgctgaatttttgctttagtatctcagatgcggtgcagaaaaatggaaggtccacacttttactcctctccatcagcaggagcatctgaacacagggctttatactagatatgaccaactgcattcaaaattttcatgaacagtaaccagtaaaagcattacccacaaaaaaatccccttacattcaaagaatgccagatgaagaataaaatgaacagctgggcgcggcagcgcttgcttgtaatcccagctatgcagaaggctgaggcaggagaaacgcttgaacctagaaggcagaggttgcagtgagcggagatcgctccactgcacttcagcctgggtgacagagcaggactccatctcaaaaaaa

SEQ ID NO: 337903 - DNA, 1411 bp, Homo sapiens
acccggctgcgttctgatcgccgccgcgcctcagcctctgccgcgatgatcccccctgagcagccgcagcagcagctgcagccgccgtcgccagccccgccgaaccatgtggtgaccaccatcgagaacctgccggccgagggcagcggcggcggcgggagcctgtccgcctcctcccgggctggcgtgcgccagaggatccgcaaagtgctgaacagggagatgttaatctctgtggccctaggccaggtgttatccctccttatttgtggaattggcttgactagcaagtatctgtcagaagatttccacgccaacacaccagtcttccagagtttcctcaattacattcttctcttcttggtctataccaccacactagccgtcagacaaggagaagaaaacctcctggcaattttacgacgaagatggtggaagtacatgattttgggactcatagacctggaagcaaattatctggtggtcaaggcttaccaatacacaactctgaccagtatccagctcctggactgttttgtgatcccagtcgtgattttgctctcctggttcttcctgctgatccggtacaaggctgtgcatttcatcggcatcgttgtctgcatcctgggaatgggctgcatggtgggagcagatgtgcttgtgggaagacatcagggagcaggggaaaataagctggtaggggaccttctggtcttaggaggagccacactctatggtatttctaacgtctgggaagaatacatcatccgaactctgagccgagtggaattcctgggaatgattggtctctttggagcatttttcagtggaattcaattagctataatggagcataaggaactgttgaaggtgccctgggactggcaaataggactgctctacgttggctttagtgcctgcatgtttggtctctacagctttatgccagtcgtcataaagaaaaccagtgccacttcagtcaacctctccttgctcacagcagacttgtacagcctgttctgtggattgtttctcttccactacaagttttcaggactttatctcctgtctttcttcaccatcctcattgggctggtgctctactcctccacctccacctacatagcccaggacccccgagtgtataagcagttccgcaatccttcaggacctgttgtggacttaccgaccacagctcaggtggaaccctcagtcacctacaccagcctgggccaggagaccgaagaggagcctcatgttcgtgtggcctagggtgaggcccgccctgccaactgaggccaactcattggccatgtttttgcccatcatctctgtattgtacatagagaaaggtatttactaggtgcagtttacacaggtggactgcaaggtagcaaatcctccaaaagct

SEQ ID NO: 337904 - DNA, 485 bp, Homo sapiens
atgctcccagtgatgcacttcttaacacttcacaaagccccagtacacagtgttaacccaactactgttttctcatctgtataatttttattatgctcatctttctcattatctgtgaggattaagtgtttagaatgattaaggagataagattcggcctaagcgaggccttgatgccattcagggattaaaggagataaaacatttaaggcgttggcacggggcctggtagttataagtgctcaataaatatcaggtttttttttttaaaaaaaagtagttgacatcttaacccaaagtaaatgagggtggatgtctacacatagacttgtacaccaatattcactgcagcagattcaaaacagccccagactggaaacagcccaaatggccaaccatggccaggtggataaatgcatcattgtacatccagatggtgggatactcagccctaaaaatggtgaaccactgctgatccgcacgac

SEQ ID NO: 337905 - DNA, 797 bp, Homo sapiens
gtcagagcccaggggtttgtcttttgagtcctgaactcctcatcagcaaatggaaaatggtatttgtaaaccacacgacataggttctgtctgagggggtctaagcgtcattatctaggacagagcctgtagaacagctaatcattccagaatgtcagctgagagccagccataaagaggccgggcacaggcctatggccactgattcctatctgggcccctgagtcaaaaagtgaccccagcaatgactcccttcacagtctccgagcaaactctcctaagccctgggcacagggcggttaaaggttcttcctctcagaagacttaacatggttattaaattttgatcctaaccaatctctcttcttaaggttttttcatgacacgttgagtatgccaatttttaatgttttatttttctaaattttccaagaagctgccttacaacgcagtgcacagcaagactgtgtaccactgagcccatccatcaatgctagctctcgcaagggaatcgctggaaacattctcatgctgttggctcaatcaagatggttcttttcaaagtgtctaagctgtaattctttgacaactctgactttctcaggctttcagcaaaacactgctaaaattcaagggaaaccacaactcaaaaggccttctcactgctttggcacagagcgcccccaaagtcctgcaagccatcaaaagactcagcttgcaaacccaggctctgtctggagagggagagagggagagagggagagcacactttctggcaggggagcagctggggagtt

SEQ ID NO: 337906 - DNA, 2372 bp, Homo sapiens
atttttaaaagcctcggaaaggtgataccatctgacagtcattttctcacgttggtcttctaaagtcacctatttcttgtgtgtgcacatcacaccatttcctgtttctttataacccgacaagggtaggagtgcctgtttcccctgctgggcacaccagacaatcgtaatcacaaaacagacactgagccagggcccaaagggtgtgatcatgagagttaccgggacagcagtaggcatgacagtcaccaggaaggacaagggtgctctgttgttagtggccacacaccaatttgacaaggagtgttgcgaaatttttatttatttatttatttattttgagatggagtttcactcttgttgcccaggctggagtgcggtggtacaatctcggctcactgcaacctccacctcccaggttcaagcgattctcctgcctcagcctcccaagtacctgggactacaggtgcgtgccaccacacccagctaaattttgtgtttttagtagagatggggtttcaccatgttggccaggatggtcttgaacccctgacctcatgatctgcctgcctcggcctcccaaagtgctgggattacaggcatgagccaccacgcccagccaaaatatttttttaaagtcattttccttaagctgcttgggctacatgtgaaatacactggacggtcaacattcctgtctcctcccatttgggctgatgcagcagatccagggaatgttacctgtttctgctgctagaagatccaggaaattgggaaggttacctgacgcacacatggatgaaggccatcatctagaaatggggtcaaccacaatgtgttaattccgtagtgtcagggattcttcgggaaggtcaacagtatgaaggattctgacccctgtgcctcccatttatgtgatcaggtgacagttaataaccgtggaggtcacactcagccatccaacagccttacagtgaccctacacaaaagcccccaaattccaaagactttttcttaacctaaaggaagaaattatttgttaattccagtagagcaactgaatatactgggctatttgtacttttttatagagaactttaataataattctttaaaaatgagtttttagaacaaagcaactgacgatttcctaagattccaatgccctggagcttgtaggaggacttagcctgggtcagctggagcacccccgacctgatctcccactgccagattttcccatgctcctagggtatggagtccacgtgggaatgactgcaagttcaggtggaacttggccgactgatgctctgcgagtttttaatagacactggggacaactgcttaaggtttagaaacttccaaaccacaggaaagacatttttagtgtcccccatccagaggcagccctggaataggattcccaggggtttctgggacccctttccttgctccgtgaggctctgtggccatcttttggcaggaggaggatgcttccttggctctgtgcccagacccgcctggtccccaggtctctcaccttgggtgaagattcagagatgccctgtaaggattttgcccactgggcaactcagaaatacttcgatctcccaagatataagaggcagcagcaaacgtgcctattgacgtctgtttcatagttaccacttacgcgagtagacagaactcggcttttcagaaaataggtgtcaagtccactttataagaacctttttttctaaaataagataaaaggtggctttgcattttctgattaaacgactgtgtctttgtcacctctgcttaactttaggagtatccattcctgtgattgtagacttttgttgatattcttcctggaagaatatcattcttttcttgaagggttggtttactagaatattcaaaatcaatcatgaaggcagttactattttgagtctaaaggttttctaaaaattaacctcacatcccttctgttagggtctttcagaatatcttttataaacagaagcatttgaagtcattgcttttgctacatgatttgtgtgtgtgaaggacataccacgtttaaatcattaattgaaaaacatcatataagccccaactttgtttggaggaagagacggaggttgaggtttttccttctgtataagcacctactgacaaaatgtagaggccattcaaccgtcaaacaccatttggttatatcgcagaggagacggatgtgtaaattactgcattgctttttttttcagtttgtataacctctaatctccgtttgcatgatacgctttgttagaaacattaattgtagtttggaagcaagtgtgtatgaataaagataatgatcattcctttgtgtagttggcct

SEQ ID NO: 337907 - DNA, 2319 bp, Homo sapiens
atttttaaaagcctcggaaaggtgataccatctgacagtcattttctcacgttggtcttctaaagtcacctatttcttgtgtgtgcacatcacaccatttcctgtttctttataacccgacaagggtaggagtgcctgtttcccctgctgggcacaccagacaatcgtaatcacaaaacagacactgagccagggcccaaagggtgtgatcatgagagttaccgggacagcagtaggcatgacagtcaccaggaaggacaagggtgctctgttgttagtggccacacaccaatttgacaaggagtgttgcgaaatttttatttatttatttatttattttgagatggagtttcactcttgttgcccaggctggagtgcggtggtacaatctcggctcactgcaacctccacctcccaggttcaagcgattctcctgcctcagcctcccaagtacctgggactacaggtgcgtgccaccacacccagctaaattttgtgtttttagtagagatggggtttcaccatgttggccaggatggtcttgaacccctgacctcatgatctgcctgcctcggcctcccaaagtgctgggattacaggcatgagccaccacgcccagccaaaatatttttttaaagtcattttccttaagctgcttgggctacatgtgaaatacactggacggtcaacattcctgtctcctcccatttgggctgatgcagcagatccagggaatgttacctgtttctgctgctagaagatccaggaaattgggaaggttacctgacgcacacatggatgaaggccatcatctagaaatggggtcaaccacaatgtgttaattccgtagtgtcagggattcttcgggaaggtcaacagtatgaaggattctgacccctgtgcctcccatttatgtgatcaggtgacagttaataaccgtggaggtcacactcagccatccaacagccttacagtgaccctacacaaaagcccccaaattccaaagactttttcttaacctaaaggaagaaattatttgttaattccagtagagcaactgaatatactgggctatttgtacttttttatagagaactttaataataattctttaaaaatgagtttttagaacaaagcaactgacgatttcctaagattccaatgccctggagcttgtaggaggacttagcctgggtcagctggagcacccccgacctgatctcccactgccagattttcccatgctcctagggtatggagtccacgtgggaatgactgcaagttcaggtggaacttggccgactgatgctctgcgagtttttaatagacactggggacaactgcttaaggtttagaaacttccaaaccacaggaaagacatttttagtgtcccccatccagaggcagccctggaataggattcccaggggtttctgggacccctttccttgctccgtgaggctctgtggccatcttttggcaggaggaggatgcttccttggctctgtgcccagacccgcctggtccccaggtctctcaccttgggtgaagattcagagatgccctgtaaggattttgcccactgggcaactcagaaatacttcgatctcccaagatataagaggcagcagcaaacgtgcctattgacgtctgtttcatagttaccacttacgcgagtagacagaactcggcttttcagaaaataggtgtcaagtccactttataagaacctttttttctaaaataagataaaaggtggctttgcattttctgattaaacgactgtgtctttgtcacctctgcttaactttaggagtatccattcctgtgattgtagacttttgttgatattcttcctggaagaatatcattcttttcttgaagggttggtttactagaatattcaaaatcaatcatgaaggcagttactattttgagtctaaaggttttctaaaaattaacctcacatcccttctgttagggtctttcagaatatcttttataaacagaagcatttgaagtcattgcttttgctacatgatttgtgtgtgtgaaggacataccacgtttaaatcattaattgaaaaacatcatataagccccaactttgtttggaggaagagacggaggttgaggtttttccttctgtataagcacgggctggcaccatccatacccctccccagtgtcaggggtcaggaggtaaccttacataagagttggattgtgtttattgtatagagagccccaggcaggggtaggtacagcttttaaataaaaggcgcctggtcatgttcgatttgttcaacaaaaaaaaaa

SEQ ID NO: 337908 - DNA, 314 bp, Homo sapiens
ctgattattcactcatcaaacactgatgtctaaaatctgtacccagatttttagggggtacaaaggggatgataggaacgcaacatatttcctttggtgggttcccagacccgtgtgagagacagacactggtcaagtgcagtaagcgtgtgagcagcccctgctcacctgaagctcactggtgttctcattcctgtctccctcaggtgctggctgcattctgtggtgggcagggcctgggatggggctggccaaggggcctgagctgtgctggctgccctccgcatggtgaggctataggtcttgcctgattt

SEQ ID NO: 337909 - DNA, 213 bp, Homo sapiens
atgttgaatgcatgttcttgtgatgattgtacaaatgaggaagtcacagtaagtttagagttgagcgtgtgggtttcaagtcttctctgtaacccataatgatcagccttcaacaagtcagcaatcccctctgaacttcagtttccttatgtataaaatggaaataatagggccagacacggtagctcacacctgtaatctcagcactttggg

SEQ ID NO: 337910 - DNA, 471 bp, Homo sapiens
aaaaaggaaagagatagtttgcttttaaggaacttcactgtgtggcaaaaactagtgtaaacaatgacaatacagaatactaagtggtctggtaggtgttatgtatgcagtactttgggagtgtggaggaaggcatgcctagaataatcagggaggacttcacagagtggttatttatagtttaagcagagacataccagtaagagggaatagcatatgcaagtggccagaaatccttggctagctatctgggaggagtggggttgtcaggagataaaggtataaagataggcttatatgccgcgctgtatagttgaatgtttttactattacaaaattttacagatgccctcagtttctccctttattcatttttctatgacatctttattgttggtcttcatttagtctttccttccagtctatcctgtgtaaaattacttcctacttccaaaatgagaaatactgggt

SEQ ID NO: 337911 - DNA, 262 bp, Homo sapiens
aaaaaggaaagagatagtttgcttttaaggaacttcactgtgtggcaaaaactagtgtaaacaatgacaatacagaatactaagtggtctggtaggtgttatgtatgcagtactttgggagtgtggaggaaggcatgcctagaataatcagggaggacttcacagagtggctaatttttgtatttttagaagagatggggtttcaccacgttggttaagctggtcttgaactcctgaccttatggtccgcctgcctcagcct

SEQ ID NO: 337912 - DNA, 363 bp, Homo sapiens
ctctacttaaatttgtaacctaaatgcctcacacctcattttctgaacaaataaagcccaaattcagtgtcctttttgataggatcctgtcctgacctttccaaatctgatgctagagccttgtgtaccctgagttcagccaaactgaactcttaatggtcccttgctccatactctccccttgctcatgcctttattctcctggtctgattcatctttgcatcttaacagtgtatagcatggtgccttctttttactggggacatatcgagttaatgaatgaatgatgctattacagaggtacagtttgggaaggggagtgagtacattttagaaaggtgataagtggattgtcagccttca

SEQ ID NO: 337913 - DNA, 1282 bp, Homo sapiens
atataaaaccccctgccataacccaataccaaacgcccctcttcgtctgatccgtcctaatcacagcagtcctacttctcctatctctcccagtcctagctgctggcatcactatactactaacagaccgcaacctcaacaccaccttcttcaaccccgccggaggaggagaccccattctataccaacacctattctgatttttcggtcaccctgaagtttatattcttatcctaccaggcttcggaataatctcccatattgtaacttactactccggaaaaaaagaaccatttggatacataggtatggtctgagctatgatatcaattggcttcctagggtttatcgtgtgagcacaccatatatttacagtaggaatagacgtagacacacgagcatatttcacctccgctaccataatcatcgctatccccaccggcgtcaaagtatttagctgactcgccacactccacggaagcaatatgaaatgatctgctgcagtgctctgagccctaggattcatctttcttttcaccgtaggtggcctgactggcattgtattagcaaactcatcactagacatcgtactacacgacacgtactacgttgtagctcacttccactatgtcctatcaataggagctgtatttgccatcataggaggcttcattcactgatttcccctattctcaggctacaccctagaccaaacctacgccaaaatccatttcactatcgctaaacctagccccaaacccactccaccttactaccagacaaccttagccaaaccatttacccaaataaagtataggcgatagaaattgaaacctggcgcaatagatatagtaccgcaagggaaagatgaaaaattataaccaagcataatatagcaaggactaacccctataccttctgcataatgaattaactagaaataactttgcaaggagagccaaagctaagacccccgaaaccagacgagctacctaagaacagctaaaagagcacacccgtctatgtagcaaaatagtgggaagatttataggtagaggcgacaaacctaccgagcctggtgatagctggttgtccatgaaatctggttaggctggtgttagggttctttgtttttggggtttggcagagatgtgtttaagtgctgtggccagaagcggggggagggggggtttggtggaaattttttgttatgatgtctgtgtggaaagcggctgtgcagacattcaattgttattattatgtcctacaagcattaattaat

SEQ ID NO: 337914 - DNA, 1463 bp, Homo sapiens
  misc_feature (558)..(558): n is a, c, g, or t
  misc_feature (573)..(573): n is a, c, g, or t
  misc_feature (606)..(606): n is a, c, g, or t
  misc_feature (635)..(635): n is a, c, g, or t
  misc_feature (643)..(643): n is a, c, g, or t
  misc_feature (903)..(903): n is a, c, g, or t
  misc_feature (906)..(906): n is a, c, g, or t
  misc_feature (908)..(909): n is a, c, g, or t
  misc_feature (912)..(912): n is a, c, g, or t
  misc_feature (915)..(917): n is a, c, g, or t
  misc_feature (919)..(920): n is a, c, g, or t
  misc_feature (922)..(922): n is a, c, g, or t
  misc_feature (928)..(928): n is a, c, g, or t
ctcattatgctcatccctccttactaccagacaacttagccaaaccatttacccaaataaagtataggcgatagaaattgaaacctggcgcaatagatatagtaccgcaagggaaagatgaaaaattataaccaagcataatatagcaaggactaacccctataccttctgcataatgaattaactagaaataactttgcaaggagagccaaagctaagaccccaaacccactccaccttactaccagacaaccttagccaaaccatttacccaaataaagtataggcgatagaaattgaaacctggcgcaatagatatagtaccgcaagggaaagatgaaaaattataaccaagcataatatagcaaggactaacccctataccttctgcataatgaattaactagaaataactttgcaaggagagccaaagctaagacccccgaaaccagacgagctacctaagaacagctaaaagagcacacccgtctatgtagcaaaatagtgggaagatttataggtagaggcgacaaacctaccagacaaccttagccaaancatttacccagatanagtataggcgatagaaattgaaacctggcgcantagatatagtaccgcaagggaaagatganaaattatnaccaagcataatatagcaaggactaacccctataccttctgcataatgaattaactagaaataactttgcaaggagagccaaagctaagacccccgaaaccagacgagctacctaagaacagctaaaagagcacacccgtctatgtagcaaaatagtgggaagatttataggtagaggcgacaaacctaccgagcctggtgatagctggttgtccaagatagaatcttagttcaactttaatttgccacagaacctctanatncnnctnggnnnanntntaacgngttagtccaaagaggaacagctcttgggacactaggaaaaaacctggtagagagagtaaaaaatttaacacccatagtaggcctaaaagcagccaccaattaagaaagcgtcaagctcaaaacccattacctaaaaaatcccaaacttttaactgaactcctcacacccaatgtggaccaatctatcaccctatagaagaacctatgtcacgtcatcagtaccatgacaacttttctcctccgaaataagcctgcgtcagattaaacactgacatggacattaaacaggcccattatctaccatcaaccaacaagttcttattaccctccctggtgaacccaataagggcgtgccatacaggagacgcgtcccacaccggctaaaggaacgccggcaacttaacccggcgtgttgccaaaaaataacgcataagcaccagattaaagaacccgccacaacagatatagacgcagaccacacgggaaaggggacacacggctgctacacaaaaaacacaaaaagcggggaaaacag

SEQ ID NO: 337915 - DNA, 1483 bp, Homo sapiens
  misc_feature (578)..(578): n is a, c, g, or t
  misc_feature (593)..(593): n is a, c, g, or t
  misc_feature (626)..(626): n is a, c, g, or t
  misc_feature (655)..(655): n is a, c, g, or t
  misc_feature (663)..(663): n is a, c, g, or t
  misc_feature (923)..(923): n is a, c, g, or t
  misc_feature (926)..(926): n is a, c, g, or t
  misc_feature (928)..(929): n is a, c, g, or t
  misc_feature (932)..(932): n is a, c, g, or t
  misc_feature (935)..(937): n is a, c, g, or t
  misc_feature (939)..(940): n is a, c, g, or t
  misc_feature (942)..(942): n is a, c, g, or t
  misc_feature (948)..(948): n is a, c, g, or t
ctcattatgctcatccctccttactaccagacaacttagccaaaccatttacccaaataaagtataggcgatagaaattgaaacctggcgcaatagatatagtaccgcaagggaaagatgaaaaattataaccaagcataatatagcaaggactaacccctataccttctgcataatgaattaactagaaataactttgcaaggagagccaaagctaagaccccaaacccactccaccttactaccagacaaccttagccaaaccatttacccaaataaagtataggcgatagaaattgaaacctggcgcaatagatatagtaccgcaagggaaagatgaaaaattataaccaagcataatatagcaaggactaacccctataccttctgcataatgaattaactagaaataactttgcaaggagagccaaagctaagacccccgaaaccagacgagctacctaagaacagctaaaagagcacacccgtctatgtagcaaaatagtgggaagatttataggtagaggcgacaaacctaccgagcacgccaacttactaccagacaaccttagccaaancatttacccagatanagtataggcgatagaaattgaaacctggcgcantagatatagtaccgcaagggaaagatganaaattatnaccaagcataatatagcaaggactaacccctataccttctgcataatgaattaactagaaataactttgcaaggagagccaaagctaagacccccgaaaccagacgagctacctaagaacagctaaaagagcacacccgtctatgtagcaaaatagtgggaagatttataggtagaggcgacaaacctaccgagcctggtgatagctggttgtccaagatagaatcttagttcaactttaatttgccacagaacctctanatncnnctnggnnnanntntaacgngttagtccaaagaggaacagctcttgggacactaggaaaaaacctggtagagagagtaaaaaatttaacacccatagtaggcctaaaagcagccaccaattaagaaagcgtcaagctcaaaacccattacctaaaaaatcccaaacttttaactgaactcctcacacccaatgtggaccaatctatcaccctatagaagaacctatgtcacgtcatcagtaccatgacaacttttctcctccgaaataagcctgcgtcagattaaacactgacatggacattaaacaggcccattatctaccatcaaccaacaagttcttattaccctccctggtgaacccaataagggcgtgccatacaggagacgcgtcccacaccggctaaaggaacgccggcaacttaacccggcgtgttgccaaaaaataacgcataagcaccagattaaagaacccgccacaacagatatagacgcagaccacacgggaaaggggacacacggctgctacacaaaaaacacaaaaagcggggaaaacag

SEQ ID NO: 337916 - DNA, 1169 bp, Homo sapiens
  misc_feature (609)..(609): n is a, c, g, or t
  misc_feature (612)..(612): n is a, c, g, or t
  misc_feature (614)..(615): n is a, c, g, or t
  misc_feature (618)..(618): n is a, c, g, or t
  misc_feature (621)..(623): n is a, c, g, or t
  misc_feature (625)..(626): n is a, c, g, or t
  misc_feature (628)..(628): n is a, c, g, or t
  misc_feature (634)..(634): n is a, c, g, or t
ctcattatgctcatccctccttactaccagacaacttagccaaaccatttacccaaataaagtataggcgatagaaattgaaacctggcgcaatagatatagtaccgcaagggaaagatgaaaaattataaccaagcataatatagcaaggactaacccctataccttctgcataatgaattaactagaaataactttgcaaggagagccaaagctaagaccccaaacccactccaccttactaccagacaaccttagccaaaccatttacccaaataaagtataggcgatagaaattgaaacctggcgcaatagatatagtaccgcaagggaaagatgaaaaattataaccaagcataatatagcaaggactaacccctataccttctgcataatgaattaactagaaataactttgcaaggagagccaaagctaagacccccgaaaccagacgagctacctaagaacagctaaaagagcacacccgtctatgtagcaaaatagtgggaagatttataggtagaggcgacaaacctaccgagcctggtgatagctggttgtccaagatagaatcttagttcaactttaatttgccacagaacctctanatncnnctnggnnnanntntaacgngttagtccaaagaggaacagctcttgggacactaggaaaaaacctggtagagagagtaaaaaatttaacacccatagtaggcctaaaagcagccaccaattaagaaagcgtcaagctcaaaacccattacctaaaaaatcccaaacttttaactgaactcctcacacccaatgtggaccaatctatcaccctatagaagaacctatgtcacgtcatcagtaccatgacaacttttctcctccgaaataagcctgcgtcagattaaacactgacatggacattaaacaggcccattatctaccatcaaccaacaagttcttattaccctccctggtgaacccaataagggcgtgccatacaggagacgcgtcccacaccggctaaaggaacgccggcaacttaacccggcgtgttgccaaaaaataacgcataagcaccagattaaagaacccgccacaacagatatagacgcagaccacacgggaaaggggacacacggctgctacacaaaaaacacaaaaagcggggaaaacag

SEQ ID NO: 337917 - DNA, 1034 bp, Homo sapiens
accccatttaggctaaagcagcacaattaagaaagcgttcaagctcaacacccactacctaaaaatcccaaacatatactgaactcctcacacccaattggaccaatctatcaccctatagaagaactaatgttagtataagtataggcgatagaaattgaaacctggcgcaatagatatagtaccgcaagggaaagatgaaaaattataaccaagcagatgaccccaatacgcaaaactaaccccctaataaaattaattaaccactcattcatcgacctccccaccccatccaacatctccgcatgatgaaacttcggctcactccttggcgcctgcctgatcctccaaatcaccacaggactattcctagccatgcactactcaccagacgcctcaaccgccttttcatcaatcgcccacatcactcgagacgtaaattatggctgaatcatccgctaccttcacgccaatggcgcctcaatattctttatctgcctcttcctacacatccgggcgaggcctatattacggatcatttctctactcagaaacctgaaacatcggcattatcctcctgcttgcaaatatagcaacagccttcataggctatgtcctcccgtgaggccaaatatcattctgaggggcccacagtaattacaaatttatattcgccatcccattacatttggcgacagaccttagttcaatgaaatctgaggaggctactcagtagaacagtcccacctcacacgaattcttaactttcacttcatcttggcccttcattattgccagcctaagaagaatcaactcctattcttgcacgaaacgggatcaaaaacccctaggaatcacctccaatccgataaatcccctttcaacccttagtaacaatccaagacggcccctcggttaattcttaccttgctccttatgacatttacactaatctcacagaactcctaaggaaccagaaattatacctaaaaccttaaaaccttccaataaggccaaggaataccaatggatac

SEQ ID NO: 337918 - DNA, 452 bp, Homo sapiens
tgatggctggtaggatgtcagctgtcgccgagtctgtgttgctatgaagaaatacctgaggctgggtaatttataagagaagtttaattggctcatgtttctgtaggctttataggaagcacggtgttggcatctgcttggcttccagggaggcctcaggaagctttcaattatgacggagggcaaaggaggagcaggtgtctcacgcagtgcgagtgggagcaagatggggtgaggtcatgccacacacttaaccagatctcttgagaaatcactcactctcatgagaacagcaccaaagagatggtgctaaccatttatgagaaatctgtccccatgatttaatcacccgtcacccatccccacctcccacattggggattacatttcaatgtgaggtttacaggcaacatcatccaacatatcagagtgcagctcacattactgtctgg

SEQ ID NO: 337919 - DNA, 195 bp, Homo sapiens
cgtcaatgaagaggcaagatgaggctggatgttggaaaaagtctccttggaagagctgctctgctgagtgcagttaagcagaaaactgaaagatgaaaatgtaggggtcagaaaagggattttcttatatgacaggtttaagtgttttgagtgctcatggggtgtaagatgtagatctggaataagtggcggggg

SEQ ID NO: 337920 - DNA, 626 bp, Homo sapiens
ttcaagtgatcctcttgcttcagcctctggagtagctaggactaggagcacaggtcacctctcctggctttctttttcataattcttgcagttttaatccctcccttcccgtactaccagagcagttttgaaacctctattattacgttttatcagggtctgccatatactagtttatctgagtgtttgtcttccagattagagttatggttcctcgacaggcagataatcatgtcttctttgtttagagatgaataaacacctagcatggtgctctgaatatagtatgtgcttaacaaatgcttgttggattgaaccagtatgaatttaagttcttttgttggacagagaggtatgcctgctttagagctgtttcctctcctcctgagatctttctgtgctgttttactgagcagggaagaatagcgttgctaaatgcatgtttaccaaaatgacattttatttttgggacttttatgattccttatggacttcttagtgtgagaattatggagagtttatagctttgaaatggtggtatagagtttttgagatggagtttagctcttgtctcccaggctggagtgcaatggcacaatctcagctcattgcaacctttgcctccc

SEQ ID NO: 337921 - DNA, 355 bp, Homo sapiens
tactactactaaattcgcggccgcgtcgacttcattctctgctttagtctcaggggagaatggtttgactgttggtttctgaatcagatatgggctgtaccatcctgctttcccatggacagaaacagcctgctctctgggttcaccttctgaagcctgcaatagagaaaggtaataatgagtctcttttctgtacctgcctccctactctcttcctctgtcctttaccttctccagcctcatccatacatgaatgcctgtaaccaagacagcagcttcctgagtgcctccaatttccccagccttttgggaccaccttccagctgacagtgcaatagaatggcttgaatctttt

SEQ ID NO: 337922 - DNA, 487 bp, Homo sapiens
acaaggataatagctgaagttataagaatcagtatcagaggaaaacaaagtttgtagccaaagtcgttttgcaaaaaatatgtcatgaccctggtcaaaggattttaatagcactcagactcttgagtttttttccatagccttctccctcaacccactgcttcaggcatatttgtcttctttctattccctgaactctccaaccacttgtcacttgaccatcttggccttgggtgacctttgatcttggaatgctcttctccaggtagtcacattgctgaattgcctatcacttccttagaaagtcttccctgatccgcacgaagtgaagtaatcaaaaggtcatatttactcatatgggtcatatttactcatatgactgtgttttaattctttgaatagcatttctgcaatcttattttattactttgattgattgactgatttactggctattttcctccataactccccccgtggaaaagta

SEQ ID NO: 337923 - DNA, 475 bp, Homo sapiens
ctctctgagtactgggctccacaacttcacatttagagtaagaatgcatacttcccagggtcatggagagaaatcagtgagagtgtatgtgaaaaccctttgaacatcataaggcacaacgcaaatgtgaaattatttattattggcatgggaaggtcaaggatgcagtggtagctcagaagcagaaggtttcaaggtaatggggctgagctgccagagtttgctggggaaaactagacccctccttgagcaggccgagggaagcaggctgcaaaaacatcacaaccgggcaaagttctcttccttgggcctggacagaccattacaaggtactgttgagagtgaaagaatgggaccctcggcccattgggcaccccatgggttattttctgtgctctgttctgttttgcttcatttttaattctgggtttttctcagtttatggctttaacaattatgcgtgatgctgagcctg

SEQ ID NO: 337924 - DNA, 348 bp, Homo sapiens
agacaactttcatttatttaagacagagctttttccgaagcaaataaccttttgttacatctccagagaaatgacatttcctttcccttttcctgctttgcaaggacagcagatgcgtggggggagaaactgaaacaaatggaaagtaaggcaggcacaggctccttcgcgttccttctccatgagcatccctcaccgagcatgctgaaggcatggctgtgcttccttcaatttgtcacacatcagagacagcgcacagcctctgatctctagaggaagttatccattccactctgtctgacctaaataataaattctaggccgtgcagcctggaatgattcctgtct

SEQ ID NO: 337925 - DNA, 9801 bp, Homo sapiens
  misc_feature (2572)..(2572): n is a, c, g, or t
  misc_feature (2605)..(2605): n is a, c, g, or t
  misc_feature (2633)..(2633): n is a, c, g, or t
  misc_feature (2839)..(2839): n is a, c, g, or t
  misc_feature (3546)..(3546): n is a, c, g, or t
  misc_feature (4857)..(4857): n is a, c, g, or t
  misc_feature (5026)..(5026): n is a, c, g, or t
  misc_feature (5254)..(5254): n is a, c, g, or t
  misc_feature (5722)..(5722): n is a, c, g, or t
  misc_feature (6161)..(6161): n is a, c, g, or t
ggcacgaggagctgcctcacccccggccccgggaagggcatggccccggcaaactcccggccgtgactcgcgcgccccggctcggtggatgctcccggcgcaccgctcccgtgtgcggcggcttcccaaggacaggtatccgagaatcaggcaccccgacaagatgcccaagcgcgcgcactggggggccctctccgtggtgctgatcctgctttggggccatccgcgagtggcgctggcctgcccgcatccttgtgcctgctacgtccccagcgaggtccactgcacgttccgatccctggcttccgtgcccgctggcattgctaaacacgtggaaagaatcaatttggggtttaatagcatacaggccctgtcagaaacctcatttgcaggactgaccaagttggagctacttatgattcacggcaatgagatcccaagcatccccgatggagctttaagagacctcagctctcttcaggttttcaagttcagctacaacaagctgagagtgatcacaggacagaccctccagggtctctctaacttaatgaggctgcacattgaccacaacaagatcgagtttatccaccctcaagctttcaacggcttaacgtctctgaggctactccatttggaaggaaatctcctccaccagctgcaccccagcaccttctccacgttcacatttttggattatttcagactctccaccataaggcacctctacttagcagagaacatggttagaactcttcctgccagcatgcttcggaacatgccgcttctggagaatctttacttgcagggaaatccgtggacctgcgattgtgagatgagatggtttttggaatgggatgcaaaatccagaggaattctgaagtgtaaaaaggacaaagcttatgaaggcggtcagttgtgtgcaatgtgcttcagtccaaagaagttgtacaaacatgagatacacaagctgaaggacatgacttgtctgaagccttcaatagagtcccctctgagacagaacaggagcaggagtattgaggaggagcaagaacaggaagaggatggtggcagccagctcatcctggagaaattccaactgccccagtggagcatctctttgaatatgaccgacgagcacgggaacatggtgaacttggtctgtgacatcaagaaaccaatggatgtgtacaagattcacttgaaccaaacggatcctccagatattgacataaatgcaacagttgccttggactttgagtgtccaatgacccgagaaaactatgaaaagctatggaaattgatagcatactacagtgaagttcccgtgaagctacacagagagctcatgctcagcaaagaccccagagtcagctaccagtacaggcaggatgctgatgaggaagctctttactacacaggtgtgagagcccagattcttgcagaaccagaatgggtcatgcagccatccatagatatccagctgaaccgacgtcagagtacggccaagaaggtgctactttcctactacacccagtattctcaaacaatatccaccaaagatacaaggcaggctcggggcagaagctgggtaatgattgagcctagtggagctgtgcaaagagatcagactgtcctggaagggggtccatgccagttgagctgcaacgtgaaagcttctgagagtccatctatcttctgggtgcttccagatggctccatcctgaaagcgcccatggatgacccagacagcaagttctccattctcagcagtggctggctgaggatcaagtccatggagccatctgactcaggcttgtaccagtgcattgctcaagtgagggatgaaatggaccgcatggtatatagggtacttgtgcagtctccctccactcagccagccgagaaagacacagtgacaattggcaagaacccaggggagtcggtgacattgccttgcaatgctttagcaatacccgaagcccaccttagctggattcttccaaacagaaggataattaatgatttggctaacacatcacatgtatacatgttgccaaatggaactctttccatcccaaaggtccaagtcagtgacagtggttactacagatgtgtggctgtcaaccagcaaggggcagaccattttacggtgggaatcacagtgaccaagaaagggtctggcttgccatccaaaagaggcagacgcccaggtgcaaaggctctttccagagtcagagaagacatcgtggaggatgaagggggctcgggcatgggagatgaagagaacacttcaaggagacttctgcatccaaaggaccaagaggtgttcctcaaaacaaaggatgatgccatcaatggagacaagaaagccaagaaagggagaagaaagctgaaactctggaagcattcggaaaaagaaccagagaccaatgttgcagaaggtcgcagagtgtttgaatctagacgaaggataaacatggcaaacaaacagattaatccggagcgctgggctgatattttagccaaagtccgtgggaaaaatctccctaagggcacagaagtacccccnttgattaaaaccacaagtcctccatccttgagnctagaagtcacaccaccttttcctgctntttctcccccctcagcatctcctgtgcagacagtaaccagtgctgaagaatcctcagcagatgtacctctacttggtgaagaagagcacgttttgggtaccatttcctcagccagcatggggctagaacacaaccacaatggagttattcttgttgaacctgaagtaacaagcacacctctggaggaagttgttgatgacctttcngagaagactgaggagataacttccactgaaggagacctgaaggggacagcagcccctacacttatatctgagccttatgaaccatctcctactctgcacacattagacacagtctatgaaaagcccacccatgaagagacggcaacagagggttggtctgcagcagatgttggatcgtcaccagagcccacatccagtgagtatgagcctccattggatgctgtctccttggctgagtctgagcccatgcaatactttgacccagatttggagactaagtcacaaccagatgaggataagatgaaagaagacacctttgcacaccttactccaacccccaccatctgggttaatgactccagtacatcacagttatttgaggattctactataggggaaccaggtgtcccaggccaatcacatctacaaggactgacagacaacatccaccttgtgaaaagtagtctaagcactcaagacaccttactgattaaaaagggtatgaaagagatgtctcagacactacagggaggaaatatgctagagggagaccccacacactccagaagttctgagagtgagggccaagagagcaaatccatcactttgcctgactccacactgggtataatgagcagtatgtctccagttaagaagcctgcggaaaccacagttggtaccctcctagacaaagacaccacaacagnaacaacaacaccaaggcaaaaagttgctccgtcatccaccatgagcactcacccttctcgaaggagacccaacgggagaaggagattacgccccaacaaattccgccaccggcacaagcaaaccccacccacaacttttgccccatcagagactttttctactcaaccaactcaagcacctgacattaagatttcaagtcaagtggagagttctctggttcctacagcttgggtggataacacagttaatacccccaaacagttggaaatggagaagaatgcagaacccacatccaagggaacaccacggagaaaacacgggaagaggccaaacaaacatcgatataccccttctacagtgagctcaagagcgtccggatccaagcccagcccttctccagaaaataaacatagaaacattgttactcccagttcagaaactatacttttgcctagaactgtttctctgaaaactgagggcccttatgattccttagattacatgacaaccaccagaaaaatatattcatcttaccctaaagtccaagagacacttccagtcacatataaacccacatcagatggaaaagaaattaaggatgatgttgccacaaatgttgacaaacataaaagtgacattttagtcactggtgaatcaattactaatgccataccaacttctcgctccttggtctccactatgggagaatttaaggaagaatcctctcctgtaggctttccaggaactccaacctggaatccctcaaggacggcccagcctgggaggctacagacagacatacctgttaccacttctggggaaaatcttacagaccctccccttcttaaagagcttgaggatgtggatttcacttccgagtttttgtcctctttgacagtctccacaccatttcaccaggaagaagctggttcttccacaactctctcaagcataaaagtggaggtggcttcaagtcaggcagaaaccaccacccttgatcaagatcatcttgaaaccactgtggctattctcctttctgaaactagaccacagaatcacacccctactgctgcccggatgaaggagccagcatcctcgtccccatccacaattctcatgtctttgggacaaaccaccaccactaagccagcacttcccagtccaagaatatctcaagcatctagagattccaaggaaaatgttttcttgaattatgtggggaatccagaaacagaagcaaccccagtgaacaatgaaggaacacagcatatgtcagggccaaatgaattatcaacaccctcgtccaaccnggatgcatttaacttgtctacaaagctggaattggaaaagcaagtatttggtagtaggagtctaccacgtggcccagatagccaacgccaggatggaagagttcatgcttctcatcaactaaccagagtccctgccaaacccatcctaccaacagcaacagtgaggctncctgaaatgtccacacaaagcgcttccagatactttgtaacttcccagtcacctcgtcactggaccaacaaaccggaaataactacatatccttctggggctttgccagagaacaaacagtttacaactccaagattatcaagtacaacaattcctctcccattgcacatgtccaaacccagcattcctagtaagtttactgaccgaagaactgaccaattcaatggntactccaaagtgtttggaaataacaacatccctgaggcaagaaacccagttggaaagcctcccagtccaagaattcctcattattccaatggaagactccctttctttaccaacaagactctttcttttccacagttgggagtcacccggagaccccagatacccacttctcctgccccagtaatgagagagagaaaagttattccaggttcctacaacaggatacattcccatagcaccttccatctggactttggccctccggcacctccgttgttgcacactccgcagaccacgggatcaccctcaactaacttacagaatatccctatggtctcttccacccagagttctatctcctttataacatcttctgtccagtcctcaggaagcttccaccagagcagctcaaagttctttgcaggaggacctcctgcatccaaattctggtctcttggggaaaagccncaaatcctcaccaagtccccacagactgtgtccgtcaccgctgagacagacactgtgttcccctgtgaggcaacaggaaaaccaaagcctttcgttacttggacaaaggtttccacaggagctcttatgactccgaataccaggatacaacggtttgaggttctcaagaacggtaccttagtgatacggaaggttcaagtacaagatcgaggccagtatatgtgcaccgccagcaacctgcacggcctggacaggatggtggtcttgctttcggtcaccgtgcagcaacctcaaatcctagcctcccactaccaggacgtcactgtctacctgggagacaccattgcaatggagtgtctggccaaagggaccccagccccccaaatttcctggatcttccctgacaggagggtgtggcaaactgtgtcccccgtggagngccgcatcaccctgcacgaaaaccggaccctttccatcaaggaggcgtccttctcagacagaggcgtctataagtgcgtggccagcaatgcagccggggcggacagcctggccatccgcctgcacgtggcggcactgccccccgttatccaccaggagaagctggagaacatctcgctgcccccggggctcagcattcacattcactgcactgccaaggctgcgcccctgcccagcgtgcgctgggtgctcggggacggtacccagatccgcccctcgcagttcctccacgggaacttgtttgttttccccaacgggacgctctacatccgcaacctcgcgcccaaggacagcgggcgctatgagtgcgtggccgccaacctggtaggctccgcgcgcaggacggtgcagctgaacgtgcagcgtgcagcagccaacgcgcgcatcacgggcacctccccgcggaggacggacgtcaggtacggaggaaccctcaagctggactgcagcgcctcgggggacccctggccgcgcatcctctggaggctgccgtccaagaggatgatcgacgcgctcttcagttttgatagcagaatcaaggtgtttgccaatgggaccctggtggtgaaatcagtgacggacaaagatgccggagattacctgtgcgtagctcgaaataaggttggtgatgactacgtggtgctcaaagtggatgtggtgatgaaaccggccaagattgaacacaaggaggagaacgaccacaaagtcttctacgggggtgacctgaaagtggactgtgtggccaccgggcttcccaatcccgagatctcctggagcctcccagacgggagtctggtgaactccttcatgcagtcggatgacagcggtggacgcaccaagcgctatgtcgtcttcaacaatgggacactctactttaacgaagtggggatgagggaggaaggagactacacctgctttgctgaaaatcaggtcgggaaggacgagatgagagtcagagtcaaggtggtgacagcgcccgccaccatccggaacaagacttacttggcggttcaggtgccctatggagacgtggtcactgtagcctgtgaggccaaaggagaacccatgcccaaggtgacttggttgtccccaaccaacaaggtgatccccacctcctctgagaagtatcagatataccaagatggcactctccttattcagaaagcccagcgttctgacagcggcaactacacctgcttggtcaggaacagcgcgggagaggataggaagacggtgtggattcacgtcaacgtccagccacccaagatcaacggtaaccccaaccccatcaccactgtgcgggagatagcagccgggggcagtcggaaactgattgactgcaaagctgaaggcatccccaccccgagggtgttatgggcttttcccgagggtgtggttctgccagctccatactatggaaaccggatcactgtccatggcaacggttccctggacatcaggagtttgaggaagagcgactccgtccagctggtatgcatggcacgcaacgagggaggggaggccaggttgatcctgcagctcactgtcctggagcccatggagaaacccatcttccacgacccgatcagcgagaagatcacggccatggcgggccacaccatcagcctcaactgctctgccgcggggaccccgacacccagcctggtgtgggtccttcccaatggcaccgatctgcagagtggacagcagctgcagcgcttctaccacaaggctgacggcatgctacacattagcggtctctcctcggtggacgccggggcctaccgctgcgtggcccgcaatgccgctggccacacggagaggctggtctccctgaaggtgggactgaagccagaagcaaacaagcagtatcataacctggtcagcatcatcaatggtgagaccctgaagctcccctgcacccctcccggggctgggcagggacgtttctcctggacgctccccaatggcatgcatctggagggcccccaaaccctgggacgcgtttctcttctggacaatggcaccctcacggttcgtgaggcctcggtgtttgacaggggtacctatgtatgcaggatggagacggagtacggcccttcggtcaccagcatccccgtgattgtgatcgcctatcctccccggatcaccagcgagcccaccccggtcatctacacccggcccgggaacaccgtgaaactgaactgcatggctatggggattcccaaagctgacatcacgtgggagttaccggataagtcgcatctgaaggcaggggttcaggctcgtctgtatggaaacagatttcttcacccccagggatcactgaccatccagcatgccacacagagagatgccggcttctacaagtgcatggcaaaaaacattctcggcagtgactccaaaacaacttacatccacgtcttctgaaatgtggattccagaatgattgcttaggaactgacaacaaagcggggtttgtaagggaagccaggttggggaataggagctcttaaataatgtgtcacagtgcatggtggcctctggtgggtttcaagttgaggttgatcttgatctacaattgttgggaaaaggaagcaatgcagacacgagaaggagggctcagccttgctgagacactttcttttgtgtttacatcatgccaggggcttcattcagggtgtctgtgctctgactgcaatttttctttttttgcaaatgccactcgactgccttcataagcgtccataggatatctgaggaacattcatcaaaaataagccatagacatgaacaacacctcactaccccattgaagacgcatcacctagttaacctgctgcagtttttacatgatagactttgttccagattgacaagtcatctttcagttatttcctctgtcacttcaaaactccagcttgcccaataaggatttagaaccagagtgactgatatatatatatattttaattcagagttacatacatacagctaccattttatatgaaaaaagaaaaacatttcttcctggaactcactttttatataatgttttatatatatattttttcctttcaaatcagacgatgagactagaaggagaaatactttctgtcttattaaaattaataaattattggtctttacaagacttggatacattacagcagacatggaaatataattttaaaaaatttctctccaacctccttcaaattcagtcaccactgttatattaccttctccaggaaccctccagtggggaaggctgcgatattagatttccttgtatgcaaagtttttgttgaaagctgtgctcagaggaggtgagaggagaggaaggagaaaactgcatcataactttacagaattgaatctagagtcttccccgaaaagcccagaaacttctctgcagtatctggcttgtccatctggtctaaggtggctgcttcttccccagccatgagtcagtttgtgcccatgaataatacacgacctgttatttccatgactgctttactgtatttttaaggtcaatatactgtacatttgataataaaataatattctcccaaaaa

SEQ ID NO: 337926 - DNA, 9695 bp, Homo sapiens
  misc_feature (2572)..(2572): n is a, c, g, or t
  misc_feature (2605)..(2605): n is a, c, g, or t
  misc_feature (2633)..(2633): n is a, c, g, or t
  misc_feature (2839)..(2839): n is a, c, g, or t
  misc_feature (3546)..(3546): n is a, c, g, or t
  misc_feature (4857)..(4857): n is a, c, g, or t
  misc_feature (5026)..(5026): n is a, c, g, or t
  misc_feature (5254)..(5254): n is a, c, g, or t
  misc_feature (5722)..(5722): n is a, c, g, or t
  misc_feature (6161)..(6161): n is a, c, g, or t
ggcacgaggagctgcctcacccccggccccgggaagggcatggccccggcaaactcccggccgtgactcgcgcgccccggctcggtggatgctcccggcgcaccgctcccgtgtgcggcggcttcccaaggacaggtatccgagaatcaggcaccccgacaagatgcccaagcgcgcgcactggggggccctctccgtggtgctgatcctgctttggggccatccgcgagtggcgctggcctgcccgcatccttgtgcctgctacgtccccagcgaggtccactgcacgttccgatccctggcttccgtgcccgctggcattgctaaacacgtggaaagaatcaatttggggtttaatagcatacaggccctgtcagaaacctcatttgcaggactgaccaagttggagctacttatgattcacggcaatgagatcccaagcatccccgatggagctttaagagacctcagctctcttcaggttttcaagttcagctacaacaagctgagagtgatcacaggacagaccctccagggtctctctaacttaatgaggctgcacattgaccacaacaagatcgagtttatccaccctcaagctttcaacggcttaacgtctctgaggctactccatttggaaggaaatctcctccaccagctgcaccccagcaccttctccacgttcacatttttggattatttcagactctccaccataaggcacctctacttagcagagaacatggttagaactcttcctgccagcatgcttcggaacatgccgcttctggagaatctttacttgcagggaaatccgtggacctgcgattgtgagatgagatggtttttggaatgggatgcaaaatccagaggaattctgaagtgtaaaaaggacaaagcttatgaaggcggtcagttgtgtgcaatgtgcttcagtccaaagaagttgtacaaacatgagatacacaagctgaaggacatgacttgtctgaagccttcaatagagtcccctctgagacagaacaggagcaggagtattgaggaggagcaagaacaggaagaggatggtggcagccagctcatcctggagaaattccaactgccccagtggagcatctctttgaatatgaccgacgagcacgggaacatggtgaacttggtctgtgacatcaagaaaccaatggatgtgtacaagattcacttgaaccaaacggatcctccagatattgacataaatgcaacagttgccttggactttgagtgtccaatgacccgagaaaactatgaaaagctatggaaattgatagcatactacagtgaagttcccgtgaagctacacagagagctcatgctcagcaaagaccccagagtcagctaccagtacaggcaggatgctgatgaggaagctctttactacacaggtgtgagagcccagattcttgcagaaccagaatgggtcatgcagccatccatagatatccagctgaaccgacgtcagagtacggccaagaaggtgctactttcctactacacccagtattctcaaacaatatccaccaaagatacaaggcaggctcggggcagaagctgggtaatgattgagcctagtggagctgtgcaaagagatcagactgtcctggaagggggtccatgccagttgagctgcaacgtgaaagcttctgagagtccatctatcttctgggtgcttccagatggctccatcctgaaagcgcccatggatgacccagacagcaagttctccattctcagcagtggctggctgaggatcaagtccatggagccatctgactcaggcttgtaccagtgcattgctcaagtgagggatgaaatggaccgcatggtatatagggtacttgtgcagtctccctccactcagccagccgagaaagacacagtgacaattggcaagaacccaggggagtcggtgacattgccttgcaatgctttagcaatacccgaagcccaccttagctggattcttccaaacagaaggataattaatgatttggctaacacatcacatgtatacatgttgccaaatggaactctttccatcccaaaggtccaagtcagtgacagtggttactacagatgtgtggctgtcaaccagcaaggggcagaccattttacggtgggaatcacagtgaccaagaaagggtctggcttgccatccaaaagaggcagacgcccaggtgcaaaggctctttccagagtcagagaagacatcgtggaggatgaagggggctcgggcatgggagatgaagagaacacttcaaggagacttctgcatccaaaggaccaagaggtgttcctcaaaacaaaggatgatgccatcaatggagacaagaaagccaagaaagggagaagaaagctgaaactctggaagcattcggaaaaagaaccagagaccaatgttgcagaaggtcgcagagtgtttgaatctagacgaaggataaacatggcaaacaaacagattaatccggagcgctgggctgatattttagccaaagtccgtgggaaaaatctccctaagggcacagaagtacccccnttgattaaaaccacaagtcctccatccttgagnctagaagtcacaccaccttttcctgctntttctcccccctcagcatctcctgtgcagacagtaaccagtgctgaagaatcctcagcagatgtacctctacttggtgaagaagagcacgttttgggtaccatttcctcagccagcatggggctagaacacaaccacaatggagttattcttgttgaacctgaagtaacaagcacacctctggaggaagttgttgatgacctttcngagaagactgaggagataacttccactgaaggagacctgaaggggacagcagcccctacacttatatctgagccttatgaaccatctcctactctgcacacattagacacagtctatgaaaagcccacccatgaagagacggcaacagagggttggtctgcagcagatgttggatcgtcaccagagcccacatccagtgagtatgagcctccattggatgctgtctccttggctgagtctgagcccatgcaatactttgacccagatttggagactaagtcacaaccagatgaggataagatgaaagaagacacctttgcacaccttactccaacccccaccatctgggttaatgactccagtacatcacagttatttgaggattctactataggggaaccaggtgtcccaggccaatcacatctacaaggactgacagacaacatccaccttgtgaaaagtagtctaagcactcaagacaccttactgattaaaaagggtatgaaagagatgtctcagacactacagggaggaaatatgctagagggagaccccacacactccagaagttctgagagtgagggccaagagagcaaatccatcactttgcctgactccacactgggtataatgagcagtatgtctccagttaagaagcctgcggaaaccacagttggtaccctcctagacaaagacaccacaacagnaacaacaacaccaaggcaaaaagttgctccgtcatccaccatgagcactcacccttctcgaaggagacccaacgggagaaggagattacgccccaacaaattccgccaccggcacaagcaaaccccacccacaacttttgccccatcagagactttttctactcaaccaactcaagcacctgacattaagatttcaagtcaagtggagagttctctggttcctacagcttgggtggataacacagttaatacccccaaacagttggaaatggagaagaatgcagaacccacatccaagggaacaccacggagaaaacacgggaagaggccaaacaaacatcgatataccccttctacagtgagctcaagagcgtccggatccaagcccagcccttctccagaaaataaacatagaaacattgttactcccagttcagaaactatacttttgcctagaactgtttctctgaaaactgagggcccttatgattccttagattacatgacaaccaccagaaaaatatattcatcttaccctaaagtccaagagacacttccagtcacatataaacccacatcagatggaaaagaaattaaggatgatgttgccacaaatgttgacaaacataaaagtgacattttagtcactggtgaatcaattactaatgccataccaacttctcgctccttggtctccactatgggagaatttaaggaagaatcctctcctgtaggctttccaggaactccaacctggaatccctcaaggacggcccagcctgggaggctacagacagacatacctgttaccacttctggggaaaatcttacagaccctccccttcttaaagagcttgaggatgtggatttcacttccgagtttttgtcctctttgacagtctccacaccatttcaccaggaagaagctggttcttccacaactctctcaagcataaaagtggaggtggcttcaagtcaggcagaaaccaccacccttgatcaagatcatcttgaaaccactgtggctattctcctttctgaaactagaccacagaatcacacccctactgctgcccggatgaaggagccagcatcctcgtccccatccacaattctcatgtctttgggacaaaccaccaccactaagccagcacttcccagtccaagaatatctcaagcatctagagattccaaggaaaatgttttcttgaattatgtggggaatccagaaacagaagcaaccccagtgaacaatgaaggaacacagcatatgtcagggccaaatgaattatcaacaccctcgtccaaccnggatgcatttaacttgtctacaaagctggaattggaaaagcaagtatttggtagtaggagtctaccacgtggcccagatagccaacgccaggatggaagagttcatgcttctcatcaactaaccagagtccctgccaaacccatcctaccaacagcaacagtgaggctncctgaaatgtccacacaaagcgcttccagatactttgtaacttcccagtcacctcgtcactggaccaacaaaccggaaataactacatatccttctggggctttgccagagaacaaacagtttacaactccaagattatcaagtacaacaattcctctcccattgcacatgtccaaacccagcattcctagtaagtttactgaccgaagaactgaccaattcaatggntactccaaagtgtttggaaataacaacatccctgaggcaagaaacccagttggaaagcctcccagtccaagaattcctcattattccaatggaagactccctttctttaccaacaagactctttcttttccacagttgggagtcacccggagaccccagatacccacttctcctgccccagtaatgagagagagaaaagttattccaggttcctacaacaggatacattcccatagcaccttccatctggactttggccctccggcacctccgttgttgcacactccgcagaccacgggatcaccctcaactaacttacagaatatccctatggtctcttccacccagagttctatctcctttataacatcttctgtccagtcctcaggaagcttccaccagagcagctcaaagttctttgcaggaggacctcctgcatccaaattctggtctcttggggaaaagccncaaatcctcaccaagtccccacagactgtgtccgtcaccgctgagacagacactgtgttcccctgtgaggcaacaggaaaaccaaagcctttcgttacttggacaaaggtttccacaggagctcttatgactccgaataccaggatacaacggtttgaggttctcaagaacggtaccttagtgatacggaaggttcaagtacaagatcgaggccagtatatgtgcaccgccagcaacctgcacggcctggacaggatggtggtcttgctttcggtcaccgtgcagcaacctcaaatcctagcctcccactaccaggacgtcactgtctacctgggagacaccattgcaatggagtgtctggccaaagggaccccagccccccaaatttcctggatcttccctgacaggagggtgtggcaaactgtgtcccccgtggagngccgcatcaccctgcacgaaaaccggaccctttccatcaaggaggcgtccttctcagacagaggcgtctataagtgcgtggccagcaatgcagccggggcggacagcctggccatccgcctgcacgtggcggcactgccccccgttatccaccaggagaagctggagaacatctcgctgcccccggggctcagcattcacattcactgcactgccaaggctgcgcccctgcccagcgtgcgctgggtgctcggggacggtacccagatccgcccctcgcagttcctccacgggaacttgtttgttttccccaacgggacgctctacatccgcaacctcgcgcccaaggacagcgggcgctatgagtgcgtggccgccaacctggtaggctccgcgcgcaggacggtgcagctgaacgtgcagcgtgcagcagccaacgcgcgcatcacgggcacctccccgcggaggacggacgtcaggtacggaggaaccctcaagctggactgcagcgcctcgggggacccctggccgcgcatcctctggaggctgccgtccaagaggatgatcgacgcgctcttcagttttgatagcagaatcaaggtgtttgccaatgggaccctggtggtgaaatcagtgacggacaaagatgccggagattacctgtgcgtagctcgaaataaggttggtgatgactacgtggtgctcaaagtggatgtggtgatgaaaccggccaagattgaacacaaggaggagaacgaccacaaagtcttctacgggggtgacctgaaagtggactgtgtggccaccgggcttcccaatcccgagatctcctggagcctcccagacgggagtctggtgaactccttcatgcagtcggatgacagcggtggacgcaccaagcgctatgtcgtcttcaacaatgggacactctactttaacgaagtggggatgagggaggaaggagactacacctgctttgctgaaaatcaggtcgggaaggacgagatgagagtcagagtcaaggtggtgacagcgcccgccaccatccggaacaagacttacttggcggttcaggtgccctatggagacgtggtcactgtagcctgtgaggccaaaggagaacccatgcccaaggtgacttggttgtccccaaccaacaaggtgatccccacctcctctgagaagtatcagatataccaagatggcactctccttattcagaaagcccagcgttctgacagcggcaactacacctgcttggtcaggaacagcgcgggagaggataggaagacggtgtggattcacgtcaacgtccagccacccaagatcaacggtaaccccaaccccatcaccactgtgcgggagatagcagccgggggcagtcggaaactgattgactgcaaagctgaaggcatccccaccccgagggtgttatgggcttttcccgagggtgtggttctgccagctccatactatggaaaccggatcactgtccatggcaacggttccctggacatcaggagtttgaggaagagcgactccgtccagctggtatgcatggcacgcaacgagggaggggaggccaggttgatcctgcagctcactgtcctggagcccatggagaaacccatcttccacgacccgatctgcagagtggacagcagctgcagcgcttctaccacaaggctgacggcatgctacacattagcggtctctcctcggtggacgccggggcctaccgctgcgtggcccgcaatgccgctggccacacggagaggctggtctccctgaaggtgggactgaagccagaagcaaacaagcagtatcataacctggtcagcatcatcaatggtgagaccctgaagctcccctgcacccctcccggggctgggcagggacgtttctcctggacgctccccaatggcatgcatctggagggcccccaaaccctgggacgcgtttctcttctggacaatggcaccctcacggttcgtgaggcctcggtgtttgacaggggtacctatgtatgcaggatggagacggagtacggcccttcggtcaccagcatccccgtgattgtgatcgcctatcctccccggatcaccagcgagcccaccccggtcatctacacccggcccgggaacaccgtgaaactgaactgcatggctatggggattcccaaagctgacatcacgtgggagttaccggataagtcgcatctgaaggcaggggttcaggctcgtctgtatggaaacagatttcttcacccccagggatcactgaccatccagcatgccacacagagagatgccggcttctacaagtgcatggcaaaaaacattctcggcagtgactccaaaacaacttacatccacgtcttctgaaatgtggattccagaatgattgcttaggaactgacaacaaagcggggtttgtaagggaagccaggttggggaataggagctcttaaataatgtgtcacagtgcatggtggcctctggtgggtttcaagttgaggttgatcttgatctacaattgttgggaaaaggaagcaatgcagacacgagaaggagggctcagccttgctgagacactttcttttgtgtttacatcatgccaggggcttcattcagggtgtctgtgctctgactgcaatttttctttttttgcaaatgccactcgactgccttcataagcgtccataggatatctgaggaacattcatcaaaaataagccatagacatgaacaacacctcactaccccattgaagacgcatcacctagttaacctgctgcagtttttacatgatagactttgttccagattgacaagtcatctttcagttatttcctctgtcacttcaaaactccagcttgcccaataaggatttagaaccagagtgactgatatatatatatattttaattcagagttacatacatacagctaccattttatatgaaaaaagaaaaacatttcttcctggaactcactttttatataatgttttatatatatattttttcctttcaaatcagacgatgagactagaaggagaaatactttctgtcttattaaaattaataaattattggtctttacaagacttggatacattacagcagacatggaaatataattttaaaaaatttctctccaacctccttcaaattcagtcaccactgttatattaccttctccaggaaccctccagtggggaaggctgcgatattagatttccttgtatgcaaagtttttgttgaaagctgtgctcagaggaggtgagaggagaggaaggagaaaactgcatcataactttacagaattgaatctagagtcttccccgaaaagcccagaaacttctctgcagtatctggcttgtccatctggtctaaggtggctgcttcttccccagccatgagtcagtttgtgcccatgaataatacacgacctgttatttccatgactgctttactgtatttttaaggtcaatatactgtacatttgataataaaataatattctcccaaaaa

SEQ ID NO: 337927 - DNA, 292 bp, Homo sapiens
ccgcccaccttggcctttcaaagtgttgggattacgggagtgagccaccacgcccaggccacaactttttaaatatattaaacgccatggaaatgtgtactttgaaaggtgattgtttttcatatgtgaattatctatcaatttaaaaaacaatcaaacctctgcacttccagctatctctttctcttctttcaacatttccagccaggttaatctaatacgtgtctgggacaaaacacttgtattattcatgcttctgcacctttaatctaagctagtcccagtcctctct

SEQ ID NO: 337928 - DNA, 312 bp, Homo sapiens
tcaagaatctaaatgctagatgtttaggcaatatagttttggggtcaggggtacttacttttctttcctttttatgtttaatctttttggtgtctaatactacttagtaccacatttttcaccgagcagtttcggagtaaaaagatattctggcaagttcatatcagcttgatttttattttcagatgaacaggttgccaaccccttaagtggcttgctatcatagaaacagaccatttcggtgatagatctgtcccttagttgattgattggcgtagaggaattagcagtctgtgaaatgctcttcagaag

SEQ ID NO: 337929 - DNA, 1032 bp, Homo sapiens
gccaggtgcggtgacgcatttctatattcctagctacttggaaggctgaggtgggaggatcacttgggcccaagagttggaggctgcagtgagctatgatacaccttgcactccagcctgggtgacaaaggaccctgtttctgaaaaataaataaatagaaacaaaatagaatattacatacctgttaaaagaaaaatgtagcctgggtgcgatggctcacacctataatcccagcactttaggaggctgaggcaagaggatcacttgagaccagcctgggcaacactgtgagacctcttctctatagaagaataaacaaaattagccgggcatggtggctcactcctgtagtaccagctactcaggaggcccaggtgggaggattgcttgagcctaggaagtcaaggctgcagtgagctaagattgtgccactgtcctctaacctggttgacagagcgagaccctgtctcagaaaagaaaaggccaggcgcagtggctcatgcctgtaatcccagcactttgggaggccgaggcaggtggatcacaaggtcaggagtttgagaccagcctggccaagatggtaaaaccctgtctctactaaaaataaaaataaaaaattagccaggcatggtggcaggtgcctgtaatcccagctgcttgggaggctgaggcaggagaattgcttgaattcgggaggtggaggttgcagtaagccaagatcacgccactgtactccagtctgggtgacagagtgggactccatctgaaaaaacaaaaaagaaaataaaaaaaatgcagggcataaactttgattcggaatgtccataatacatcattaaatgatgaagtcaacttagaaaactattctagtttgatcccatttttgtgaaaacttacatttacacacagaagcatacatagcaataataattctaggtagttggtggcagtagaactaggatgaaacattgatacagctgtgggtttgaatgtcttagtaaaaaacatacatttctatcaaaacttaaaat

SEQ ID NO: 337930 - DNA, 244 bp, Homo sapiens
cactgtgattctaggcgtgagccactgcgtctggcctgatttttttcccttttcatgcgtgttttctctgcgtggtgccatcctggagggtcttcccctttcagtggtcctttttcccaaacctagcctggtgtgccctctgggctggtccgttctccctgccgtctgtctccctcctcttcccacatctcactctttcttcccccacttcctctcccaccggcctctggggtagcgctgtcca

SEQ ID NO: 337931 - DNA, 646 bp, Homo sapiens
gaatccagagtattattttttaatacaataaaactcacttaaaagcaggtggggtgggggtagtggtggtggtgatagtaagggatctggcaccttttgctaacactcactgtagcgattcagcaacagtaagtaataataaaaacaaattctataaaaagcaggctgaagttttaccactcaatgacattttgatcctatgtgtacctcaatgaataaaggaaaattattagaagtcagttgctttccctaaacaattttagccacagatagagccttttcaaaaggtttgaaaactgtgacaaaagtgcatttagccctgaaggtttaagatgctcctgcagtctgcatttctccaataaataaaaagggaacaattaaaaagccacttataagtacctcaaaagcactgatccttaatttattgattctttggagactaataaaaatggtgaaaggaaaagaacatacataccagcagaaaaacactgattaatttgattaaaataatccaatattctaaaacaatttcgtttaagttcttcaagttctcaaaattatatggctaaacaattaacaagggctgggtgtggtacctcatgcctgtagttctagcactttgggaagccaaggtgggaggactgct

SEQ ID NO: 337932 - DNA, 134 bp, Homo sapiens
agtataaaaaaatgtgtggtgtagagtcaagttataaaacatgtttaattggaattctaacaatagagaagaaaatgaacataggcaatatttgaagaaacaatagctcaaaggtttccaaaattgatgaaaga

SEQ ID NO: 337933 - DNA, 806 bp, Homo sapiens
gcagtgagccatcattgcactacctgcactccagcctgatgacagagcaagaccctgtctcaagaaaaaaaataaagaaagaaaatacttgtttcattaacaattctttgcatgtggggagcccttgtatttaacctattaaataaacaaatcttaattatgactaccagcatttccccaatcttgtctctgctattataataccattttttaaataaaatgattatacagttaggatgccttcttccttgcagcaacacttattttgcaaatttgcagttgtatttaggctaccaccagcaactctcttggcaaacattgagcaactcctaccacaaaaattaatgagtagagagacaaggtctgcacacctactcattttgttcttccattatcaagttgtgggactctggggaagtgatccaggggacatctacagaaaccaaaaatggagttttgtaacactgtgagttgtttattcttgtaaataataggatcttcttgactggactggaagcttcaaggaagctgtgtcttctgtttttcgtgtgcatccttcgtggttctaaatatgatgctacatgaatataaggtgtttcctgtcgttgtgggctggtggagctgtgagggcttcagtgggataaactggaagaaggagcctgggttatgaagttcagtggatgcttcttgggttttctcttccttgacctccccggaccgtaaattcctccttgaaatacttgcttctgaatcacaaagtttctctcctgcctccctggccgccttttctcagctgcctttgtgtg

SEQ ID NO: 337934 - DNA, 343 bp, Homo sapiens
ccaggcatcactgatctcctttttgtctctatagattttccttttctagatatttcaaataacttgaatcacaatatgtaatcttttgtgtctggcttcctttacttagcataatgtttttgaggtccgtctgtgttgtagcatgtttcaatagttaattcctgtttattgtagaatagtattctattgtgtagaaatacaacatttcatttttctatttacaagttgatgaacacttggattattcccacatttggtctatgatgaataattctgctttgaacatttgtgtaaaagtcttgcagtggacagacagaggccttgttaatttttattagatgtg

SEQ ID NO: 337935 - DNA, 392 bp, Homo sapiens
atcttggagacatcatttaaactgtaaacctttggaatttctagacttgtgtgggcaaagagagataatgaagtgggaaattattaaaagacccagcatttcggcatggtctctgtctccccagtaagccccttgaacccagggactggattttactcccatttctttatatttacagccccttgtacaccgctcagcccagagtaaactctcaaaaaattttttgataatgttcttaaggtcacaccgtcatgtgattgtttcaccatttctacccctttagcctgcccccaacccctgtgttgggaggtgtttccaaggctggcttagttattagatctgatcctgcttagaagtagatgaagaaaaagtaaggaaatgtgtcattcagc

SEQ ID NO: 337936 - DNA, 490 bp, Homo sapiens
caagggcagaccaacaagcatataggatctccagcctcatgtgttaatggatgtgtttaaaaatggaccccccaaaaagcctagaatgaggtttctttttggcaaataattaaaccagtatactgaaataattaaagctttgtctttaaataaagcatcagatcaacagaacaaaaacaaagataaaaattgcacacacatatgcatgtgcgcacacacgctatgacacacacagatacgcaaaactagtgggtgaggggagaaggaaattaaataaaagaaaacaaacagagtcctaacaggccattctccgaaaaggaatctaaataaaaagtcatatgatatctgatagtgcaggacacgtcgccaagaactggagcggattgcctacaggaagaaagggccagtgtattccagctcaaagagcttttctttcctcctcctctattttttttcccttttctcctcgactgtgaatgtgtcactctca

SEQ ID NO: 337937 - DNA, 532 bp, Homo sapiens
agtggtttcttagttatgacaattgaccagtcatgtgagatgagaacatcaggagaagcaaactgggggaggggaatacaagaactctctgttgtcttcattaattctctgtgcgtctaaaattattccaaaataaaaagtttattgagaaaatacattagcaacatggaaaatgcttatgatataatattaaatgaaaaaaaggatgacaggtatctgctcagggtaaaaaagaagataaatggggagagaaggaggaagtgagagttggcttcctcctacctgtcccacctcgtctcaactccctgattccattcttgctgatgcagccgcccaaaggagtatctgccactttatttcctgccagttcaaatcccatcccatcagctctcattaagaaaccctttccggccgggcatgatggctcatacctgtaatcccagcactttgggaggccaaggcggacggatcacctgagggcggatcacctgaggagttcgagagcaggctggccaacatggtgaaaccccgt

SEQ ID NO: 337938 - DNA, 574 bp, Homo sapiens
  misc_feature (314)..(314): n is a, c, g, or t
  misc_feature (318)..(318): n is a, c, g, or t
  misc_feature (324)..(324): n is a, c, g, or t
  misc_feature (326)..(326): n is a, c, g, or t
  misc_feature (335)..(335): n is a, c, g, or t
  misc_feature (344)..(345): n is a, c, g, or t
gattatgcacttctgcctcctgactgattctttcacctaatacttcctgagtttagtatcttaggtaactctctttgaataacagcagccctacacacaagaacaccgtggctttacagtggagatgggaaaagagttcaaaaccacctgcttatttctttctataacatattttcaccttagccacagaaaaaagaagacccacagctacctcggaaaagctccccgaaatccacagcgcctgtcatggatttgttgggccttgatgctcctgtggcctgctccattgcaaatagtaagaccagcaatacccnaganaaggantnagatctgtnggcctctgnnccatccccttcttcttccatatgccttctttagctggtttcactcattcctgtggctctgtcacctctatgcttattgctgccaagtgtgcatcaccatcccatctgaatattttctcctacacatcacactcttttatccagatgcctactggacataactggttcaatgcccacagacatcacaaaattcaatgtatacaaaaccgacctcagtcccttctccctaa

SEQ ID NO: 337939 - DNA, 345 bp, Homo sapiens
ttttgccaaggattccttctcagtgccactctcctctgatttccagaccccctcaatatcctcctcagatttgccctgcacttcttgttccatgcttggggtcctaagaacaagccatctgatgcctctactatcattacctctattgggacccagaaaccaataccccaaaatatggtgcatggacatgctgaactgaagaagatgcctcaaggcaagttctctctggcctccccactcgactccccaccccactctctatcgtttgtctctctcaaaacacaggatgaagttgttctctgaagttcctttatctacctaaagtgtggacataccaaaggggga

SEQ ID NO: 337940 - DNA, 525 bp, Homo sapiens
aggttgaccacctgtttcatgcagcttagggtcagaagaatctgtagctctgtcaagaagacgcagggctacagataggaaacaggagggaataatccagccagaaattatcttgcccaaccacagagggcatcatctacattctgctgggatccataccagaggaggacagaaacagaaaataggatcgggactggaaactagagctgtggttgtcttctggatggatcagaatgctctagatcaatggaacgtggcagctccaattccagtcatcgtaacgcgtgtcctccaagccctcggaactgtggctgtggctctgggggctctaggagctgcctactacatcactgaatccttgtgaacaagcccctaggcccacagtctggcagacctccaccagccccaggagttgataggtgatggcgctgggagaagatgttcagaatatctcaaaagccaagtccagaagatccagtttccatcaaagggacctctcttgtcaccaaaatttaaaaaaagaaa

SEQ ID NO: 337941 - DNA, 841 bp, Homo sapiens
ggtccagctggaggcccaagccaggctcctagggcagagggcaaacggcccctccaggagggagccgggagattacgcagctccatgtaggtccacgtttaggttgggaggatctaccatgaagaaggtcaagaagaaaaggtcagaggccagacgccaccgagactccacctcccagcatgctagctccaattccacctctcagcagcctagtcctgaatccacaccacagcagcctagccctgaatccacaccacagcattccagccttgaaaccacctcccggcagccagcattccaagcccttccagcacccgaaatccgccgctcctcttgctgccttttatctccagatgctaacgtgaaggcagcccctcaatccaggaaagcagggcctctgattcgcgccggcccgcattcctgctcctgtgccacttgcccctgcagctccgcttgctggcgtcgtctggggctatgccatagccgcatcttcgatgtccttctgcctcgggactggcagatggcgccagggagaggactccccaacctgctcaccttctacagaaaatcttcaagaaaaccctccagtcatcgtaacgcgtgtcctccaagccctcggaactgtggctgtggctctgggggctctaggagctgcctactacatcactgaatccttgtgaacaagcccctaggcccacagtctggcagacctccaccagccccaggagttgataggtgatggcgctgggagaagatgttcagaatatctcaaaagccaagtccagaagatccagtttccatcaaagggacctctcttgtcaccaaaatttaaaaaaagaaa

SEQ ID NO: 337942 - DNA, 590 bp, Homo sapiens
ggtccagctggaggcccaagccaggctcctagggcagagggcaaacggcccctccaggagggagccgggagattacgcagctccatgtaggtccacgtttaggttgggaggatctaccatgaagaaggtcaagaagaaaagggcctctgattcgcgccggcccgcattcctgctcctgtgccacttgcccctgcagctccgcttgctggcgtcgtctggggctatgccatagccgcatcttcgatgtccttctgcctcgggactggcagatggcgccagggagaggactccccaacctgctcaccttctacagaaaatcttcaagaaaaccctccagtcatcgtaacgcgtgtcctccaagccctcggaactgtggctgtggctctgggggctctaggagctgcctactacatcactgaatccttgtgaacaagcccctaggcccacagtctggcagacctccaccagccccaggagttgataggtgatggcgctgggagaagatgttcagaatatctcaaaagccaagtccagaagatccagtttccatcaaagggacctctcttgtcaccaaaatttaaaaaaagaaa

SEQ ID NO: 337943 - DNA, 868 bp, Homo sapiens
ggtccagctggaggcccaagccaggctcctagggcagagggcaaacggcccctccaggagggagccgggagattacgcagctccatgtaggtccacgtttaggttgggaggatctaccatgaagaaggtcaagaagaaaaggtcagaggccagacgccaccgagactccacctcccagcatgctagctccaattccacctctcagcagcctagccctgaatccacaccacagcagcctagtcctgaatccacaccacagcagcctagccctgaatccacaccacagcattccagccttgaaaccacctcccggcagccagcattccaagcccttccagcacccgaaatccgccgctcctcttgctgccttttatctccagatgctaacgtgaaggcagcccctcaatccaggaaagcagggcctctgattcgcgccggcccgcattcctgctcctgtgccacttgcccctgcagctccgcttgctggcgtcgtctggggctatgccatagccgcatcttcgatgtccttctgcctcgggactggcagatggcgccagggagaggactccccaacctgctcaccttctacagaaaatcttcaagaaaaccctccagtcatcgtaacgcgtgtcctccaagccctcggaactgtggctgtggctctgggggctctaggagctgcctactacatcactgaatccttgtgaacaagcccctaggcccacagtctggcagacctccaccagccccaggagttgataggtgatggcgctgggagaagatgttcagaatatctcaaaagccaagtccagaagatccagtttccatcaaagggacctctcttgtcaccaaaatttaaaaaaagaaa

SEQ ID NO: 337944 - DNA, 894 bp, Homo sapiens
ggtccagctggaggcccaagccaggctcctagggcagagggcaaacggcccctccaggagggagccgggagattacgcagctccatgtaggtccacgtttaggttgggaggatctaccatgaagaaggtcaagaagaaaaggtcagaggccagacgccaccgagactccacctcccagcatgctagctccaattccacctctcagcagcctagtcctgaatccacaccacagcagcctagccctgaatccacaccacagcattccagccttgaaaccacctcccggcagccagcattccaagcccttccagcacccgaaatccgccgctcctcttgctgccttttatctccagatgctaacgtgaaggcagcccctcaatccaggaaagcagggcctctgattcgcgccggcccgcattcctgctcctgtgccacttgcccctgcagctccgcttgctggcgtcgtctggggctatgccatagccgcatcttcgatgtccttctgcctcgggactggcagatggcgccagggagaggactccccaacctgctcaccttctacagaaaatcttcaagaaaaccctccagtcatcgtaacgcgtgtcctccaagccctcggaactgtggctgtggctctgggggctctaggagctgcctactacatcactgaatccttgtgaacaagcccctaggcccacagtctggcaggaggtgcttttaatgtgctgataaaccaacctcaggaaggtattatgtacagaagattcccaaggctgctgttgctgaaagagacttgggctactgccagggaactagaaacgtgctgagaagaggactgcaatgactgctttcaaaaaacaccagaataaatacatacgtagtgtaagcaagcga

SEQ ID NO: 337945 - DNA, 616 bp, Homo sapiens
ggtccagctggaggcccaagccaggctcctagggcagagggcaaacggcccctccaggagggagccgggagattacgcagctccatgtaggtccacgtttaggttgggaggatctaccatgaagaaggtcaagaagaaaaggtcagaggccagacgccaccgagactccacctcccagcatgctagctccaattccacctctcagcagcctagccctgaatccacaccacagcagcctagtcctgaatccacaccacagcagcctagccctgaatccacaccacagcattccagccttgaaaccacctcccggcagccagcattccaagcccttccagcacccgaaatccgccgctcctcttgctgccttttatctccagatgctaacgtgaaggcagcccctcaatccaggaaagcagaaaatcttcaagaaaaccctccagtcatcgtaacgcgtgtcctccaagccctcggaactgtggctgtggctctgggggctctaggagctgcctactacatcactgaatccttgtgaacaagcccctaggcccacagtctggcagatccagtttccatcaaagggacctctcttgtcaccaaaatttaaaaaaagaaa

SEQ ID NO: 337946 - DNA, 272 bp, Homo sapiens
gcctggccaggcgcctggcaaaaggcattacagcctgaggtgtgtggctgaaagaaggagtgggtgcaaggaatggaagaaatttgaatcctaaataatttatttctccacggaaggatcacagctgctgaagcctcacctgtgaggctgtgaaactggaaagccaccaggattccaggtcacacggggtattgtctaagctgattggctctgtccttgtttttcttacagatccagtttccatcaaagggacctctcttgtcaccaaaatt

SEQ ID NO: 337947 - DNA, 328 bp, Homo sapiens
cattctagctgatgtcctgttggccacaccctgagttaacacagaattatataccggaagggatagttcactggggctactaatgtaacaacctaccattgtctgccctctgactcttaataattcatatctgcttgcaaaatagggtcatccctaaaggcaaaaacagaacttccaaagtatctttctgtgacaacattaggttcaggcttgaagtccctgatttcgccatcaaagtcagatccaggggggacgatgctattcaggtaaggttccccaagtgttgttcctaggagcagagacctatgaactaaaaagaccagttatc

SEQ ID NO: 337948 - DNA, 1075 bp, Homo sapiens
ggtccagctggaggcccaagccaggctcctagggcagagggcaaacggcccctccaggagggagccgggagattacgcagctccatgtaggtccacgtttaggttgggaggatctaccatgaagaaggtcaagaagaaaaggtcagaggccagacgccaccgagactccacctcccagcatgctagctccaattccacctctcagcagcctagtcctgaatccacaccacagcagcctagccctgaatccacaccacagcattccagccttgaaaccacctcccggcagccagcattccaagcccttccagcacccgaaatccgccgctcctcttgctgccttttatctccagatgctaacgtgaaggcagcccctcaatccaggaaagcagggcctctgattcgcgccggcccgcattcctgctcctgtgccacttgcccctgcagctccgcttgctggcgtcgtctggggctatgccatagccgcatcttcgatgtccttctgcctcgggactggcagatggcgccagggagaggactccccaacctgctcaccttctacagaaaatcttcaagaaaaccctccagtcatcgtaacgcgtgtcctccaagccctcggaactgtggctgtggctctgggggctctaggagctgcctactacatcactgaatccttgtgaacaagcccctaggcccacagtctggcagaccccctcaatatcctcctcagatttgccctgcacttcttgttccatgcttggggtcctaagaacaagccatctgatgcctctactatcattacctctattgggacccagaaaccaataccccaaaatatggtgcatggacatgctgaactgaagaagatgcctcaagggtcatccctaaaggcaaaaacagaacttccaaagtatctttctgtgacaacattaggttcaggcttgaagtccctgatttcgccatcaaagtcagatccaggggggacgatgctattcagaaacgtgctgagaagaggactgcaatgactgctttcaaaaaacaccagaataaatacatacgtagtgtaagcaagcga

SEQ ID NO: 337949 - DNA, 696 bp, Homo sapiens
ggtccagctggaggcccaagccaggctcctagggcagagggcaaacggcccctccaggagggagccgggagattacgcagctccatgtaggtccacgtttaggttgggaggatctaccatgaagaaggtcaagaagaaaaggtcagaggccagacgccaccgagactccacctcccagcatgctagctccaattccacctctcagcagcctagccctgaatccacaccacagcagcctagtcctgaatccacaccacagcagcctagccctgaatccacaccacagcattccagccttgaaaccacctcccggcagccagcattccaagcccttccagcacccgaaatccgccgctcctcttgctgccttttatctccagatgctaacgtgaaggcagcccctcaatccaggaaagcagaaaatcttcaagaaaaccctccagtcatcgtaacgcgtgtcctccaagccctcggaactgtggctgtggctctgggggctctaggagctgcctactacatcactgaatccttgtgaacaagcccctaggcccacagtctggcagacctccaccagccccaggagttgataggtgatggcgctgggagaagatgttcagaatatctcaaaagccaagtccagaagatccagtttccatcaaagggacctctcttgtcaccaaaatttaaaaaaagaaa

SEQ ID NO: 337950 - DNA, 123 bp, Homo sapiens
gccacaaccgtaaccagcaaaacaaaggtctcaggcagataccaagacacaagaaagggtgctggcagcagagcaggcagtaagctgggtccaggagggcagaagaaaagacaggagactaag

SEQ ID NO: 337951 - DNA, 343 bp, Homo sapiens
ctgtagtcccagctacttgggaggctgaggcagaagaatcgcttgaacccgggaggcagaggttgcagtgagccaagattgcgccactgcactccagtctgggcgacagagtgagactctgtgtacaaaacaaaaacaaaaacaaaaaaaacccagaattttatagacaattgcagaagggttcccagggcacacctatagccatggccttggaccctagggtaataacagccaaggccatgtggagacactatgcagaggagatgcaaagggcagttaagaggatgcctggttagctgtgtttcagggagaaggaagagactgccaagtgaacatgatggag

SEQ ID NO: 337952 - DNA, 3948 bp, Homo sapiens
ggcgagtgggggaggggcgggcggggggcggcggttgggcagcgtcgcttcttaggaggaggaggaagaggaggaaggagggcgagcgaggaggatggcggagtcggggctcctgacggaactctaatgaatcattgattgaccagcactattttaccagttggaatgaatgatcagaaatgggcatagtgcttttagatccaacatgtaacagatggatgttactccatgctgattacttcttcaagccagtacttttttgattgtgtaggatctttgtctcttcatctttgaattcaattactggaaaataaaaggagttcatgtagtttttgtccaggcttgagtcaccatgagtagtagtttaggaaaagaaaaagactctaaagaaaaagatcccaaagtaccatcagccaaggaaagagaaaaggaggcaaaagcctctggaggttttgggaaagagagcaaagaaaaagaacctaagaccaaagggaaagatgccaaagatggaaagaaggactccagtgctgcccaaccaggggtggcattttcagttgacaatacgatcaaacggccaaacccagcacctgggactagaaaaaaatccagcaatgcagaggtgattaaagagctcaacaaatgccgggaagagaattcaatgcgtttggacttatccaagagatctatacacatattgccatcatcaatcaaagagttgactcaattaacagaactttatttatacagtaacaaattgcagtccctcccagcagaggtgggatgtttagtaaatctcatgacactggctctaagtgaaaattcacttaccagtttgcctgactctcttgataacttgaagaagctgcggatgcttgatttacggcataataaactgagagaaattccttcagtggtgtataggctggattctctcaccactctttaccttcgctttaatcgtataactactgtggaaaaggacatcaaaaacttgtcaaaactcagcatgcttagcattcgagagaacaaaattaaacaactacctgctgaaattggtgaattatgtaacctcattacgctggatgtagctcacaatcaacttgaacaccttccaaaggagattggaaactgtacacagataaccaaccttgacttgcagcacaatgaactgctagacctcccagatactataggaaacctgtccagtttaagtcgtcttggtctgagatataacagactgtcagcaatacccagatcattagcaaaatgcagtgcacttgaagaattaaatttagagaacaataacatttctactttaccagagagtcttttatcaagtcttgtgaaactgaatagtttgaccttagctagaaattgcttccagttgtatccagtgggtggtccatctcagttttctaccatctattccctcaacatggaacacaatcgaatcaacaaaattccatttggaattttctccagagcaaaagtattaagtaagctgaatatgaaggacaatcagttaacatcacttcccttggattttggaacttggaccagtatggtagaattgaatttagccactaatcagctcacaaagatccctgaggatgtgtctggtctcgtttctcttgaggttcttatcttatcaaacaatcttctaaagaagcttccccatggtcttggaaaccttaggaagttaagagagttggatctagaagagaacaaattggaatccttgccaaatgaaattgcatatcttaaggatttacagaaattagtcttgacaaacaaccagttgaccactcttcccagaggcattggtcaccttactaatctcacacatctgggccttggagagaacctacttactcaccttcctgaagaaattggtacactggagaacctagaagaactgtatttgaatgacaaccccaacctgcatagccttccctttgagctggcactctgcagcaagctttcaatcatgagtattgagaactgtccactcagtcaccttccacctcagattgttgctggggggccttctttcatcattcagttcttaaagatgcagggtccatatcgtgccatggtctgatataaatctgctggtcccacacactgttcaaaaatagactgccattaatgtttcttatctatatctgtatctatttatgtagatattggtatatggcagatttataaaaattgcattatgtgtttctgctaatagaggaatcatagccatttagaattttttttaaattctgtacaaaaggcttatataagttttctttgctgaatttgatggatgtttttctgttgtgtaatctgatatgccagtttgcttaaaacatttgccaacacattatgaagttattaaatttaagggacagaggtagtatagttagatatactttctcttaggaaaaataatgggcaaaaatttttgttgcaacttttcatatatattttccccttaccaattgttttatccttatagtattgtaggccctgaaagtagaatttttctttaacttattttgagatttgagatttaaattttatgtattgtttacagtcagagtaaatcactggatttcttttgtttgttttgatttgctctgttttattcagtcaaatctagagtttgaatcctctgctaaagaatttgcatccactggtgtaaacagtgaaaggtatttgcttgttgaaaaaaaaaactggcaaagtgaaaagatacagtcaaaaatctagaatttctttaattttgcttctctgacgagttgtgaagcaaaatacctgaagtgagtctttgggtaggggaagggtattgagaccttttctagtatgaatattttttaagtttgggggaagagaaacttgcagtgaaaaggagttttttcattcctgaaagttgcagatccacaaaactaacaggataattgggcaaataaattacatataaacacacacaatctatatatgtatatacaatgctatatagatatgtatttattatatcataaactacagtaggtaactttaaggatttcttcctatccttgtacaatgacatgaatgtctttctttgaaaactgcaatgtatgtatgtttcaaggttatttaacagtgtactatggttttatatcttgacttgccttgtacatctttcaattctggaatatctgtgtctaagcacaatatcttcacactgtgctgtattgctgctgaactaaatgcacttttccccacatatggggcactggcttcaaacaattcagttcagtatcattacttttaatctcatctttcctttcttggtagttgttaatacagttatggaaaagaggcacattgcatagaagccattggggagttcagtggaagttctgtaagatgtgcatgtactatttgatgcgttttctttgcttcactgcttttaatacttagcagtattgttggtctaagtcaatttgattattgaggagtctcagagcaaggtgcgttctagatgtcatcctaaaaaacacttcatatataattaatcactattttgtataattacatattgctgcttgtgtgtttttttttttttccatttagttgggcgttgtgttttacacaaaaccatttttgaattaaggctatgatattaagatagaaatttggactgttgttctgcttttcctggcactcaaattcatgactagttttgaggtcaaacctatgttcgtaatgagagattttataaggatcaactaagaaatggaaggcaggtgaagatataaaaccctagaatgcttaaatgtgctgtaaaactattgtagatgtcactggattttaccaagtaatatcctttcttttttttttccccccatctgctgtggcttttcagttaaaattttgtttataaaaggaatttgtttattacagctctaccta

SEQ ID NO: 337953 - DNA, 4133 bp, Homo sapiens
ggcgagtgggggaggggcgggcggggggcggcggttgggcagcgtcgcttcttaggaggaggaggaagaggaggaaggagggcgagcgaggaggatggcggagtcggggctcctgacgcattgtttacaataaccaagatatgaaatcaacctatgtcttcattgatggaagaatacacacagaaaatgtgacgttcagccttcaaatctaggaaatcctgatattggtgacatgatctgatcttggcccactgcaacctctgcctcccaggttcaagcgatcctcccacctcagcctcccaggaactctaatgaatcattgattgaccagcactattttaccagttggaatgaatgatcagaaatgggcatagtgcttttagatccaacatgtaacagatggatgttactccatgctgattacttcttcaagccagtacttttttgattgtgtaggatctttgtctcttcatctttgaattcaattactggaaaataaaaggagttcatgtagtttttgtccaggcttgagtcaccatgagtagtagtttaggaaaagaaaaagactctaaagaaaaagatcccaaagtaccatcagccaaggaaagagaaaaggaggcaaaagcctctggaggttttgggaaagagagcaaagaaaaagaacctaagaccaaagggaaagatgccaaagatggaaagaaggactccagtgctgcccaaccaggggtggcattttcagttgacaatacgatcaaacggccaaacccagcacctgggactagaaaaaaatccagcaatgcagaggtgattaaagagctcaacaaatgccgggaagagaattcaatgcgtttggacttatccaagagatctatacacatattgccatcatcaatcaaagagttgactcaattaacagaactttatttatacagtaacaaattgcagtccctcccagcagaggtgggatgtttagtaaatctcatgacactggctctaagtgaaaattcacttaccagtttgcctgactctcttgataacttgaagaagctgcggatgcttgatttacggcataataaactgagagaaattccttcagtggtgtataggctggattctctcaccactctttaccttcgctttaatcgtataactactgtggaaaaggacatcaaaaacttgtcaaaactcagcatgcttagcattcgagagaacaaaattaaacaactacctgctgaaattggtgaattatgtaacctcattacgctggatgtagctcacaatcaacttgaacaccttccaaaggagattggaaactgtacacagataaccaaccttgacttgcagcacaatgaactgctagacctcccagatactataggaaacctgtccagtttaagtcgtcttggtctgagatataacagactgtcagcaatacccagatcattagcaaaatgcagtgcacttgaagaattaaatttagagaacaataacatttctactttaccagagagtcttttatcaagtcttgtgaaactgaatagtttgaccttagctagaaattgcttccagttgtatccagtgggtggtccatctcagttttctaccatctattccctcaacatggaacacaatcgaatcaacaaaattccatttggaattttctccagagcaaaagtattaagtaagctgaatatgaaggacaatcagttaacatcacttcccttggattttggaacttggaccagtatggtagaattgaatttagccactaatcagctcacaaagatccctgaggatgtgtctggtctcgtttctcttgaggttcttatcttatcaaacaatcttctaaagaagcttccccatggtcttggaaaccttaggaagttaagagagttggatctagaagagaacaaattggaatccttgccaaatgaaattgcatatcttaaggatttacagaaattagtcttgacaaacaaccagttgaccactcttcccagaggcattggtcaccttactaatctcacacatctgggccttggagagaacctacttactcaccttcctgaagaaattggtacactggagaacctagaagaactgtatttgaatgacaaccccaacctgcatagccttccctttgagctggcactctgcagcaagctttcaatcatgagtattgagaactgtccactcagtcaccttccacctcagattgttgctggggggccttctttcatcattcagttcttaaagatgcagggtccatatcgtgccatggtctgatataaatctgctggtcccacacactgttcaaaaatagactgccattaatgtttcttatctatatctgtatctatttatgtagatattggtatatggcagatttataaaaattgcattatgtgtttctgctaatagaggaatcatagccatttagaattttttttaaattctgtacaaaaggcttatataagttttctttgctgaatttgatggatgtttttctgttgtgtaatctgatatgccagtttgcttaaaacatttgccaacacattatgaagttattaaatttaagggacagaggtagtatagttagatatactttctcttaggaaaaataatgggcaaaaatttttgttgcaacttttcatatatattttccccttaccaattgttttatccttatagtattgtaggccctgaaagtagaatttttctttaacttattttgagatttgagatttaaattttatgtattgtttacagtcagagtaaatcactggatttcttttgtttgttttgatttgctctgttttattcagtcaaatctagagtttgaatcctctgctaaagaatttgcatccactggtgtaaacagtgaaaggtatttgcttgttgaaaaaaaaaactggcaaagtgaaaagatacagtcaaaaatctagaatttctttaattttgcttctctgacgagttgtgaagcaaaatacctgaagtgagtctttgggtaggggaagggtattgagaccttttctagtatgaatattttttaagtttgggggaagagaaacttgcagtgaaaaggagttttttcattcctgaaagttgcagatccacaaaactaacaggataattgggcaaataaattacatataaacacacacaatctatatatgtatatacaatgctatatagatatgtatttattatatcataaactacagtaggtaactttaaggatttcttcctatccttgtacaatgacatgaatgtctttctttgaaaactgcaatgtatgtatgtttcaaggttatttaacagtgtactatggttttatatcttgacttgccttgtacatctttcaattctggaatatctgtgtctaagcacaatatcttcacactgtgctgtattgctgctgaactaaatgcacttttccccacatatggggcactggcttcaaacaattcagttcagtatcattacttttaatctcatctttcctttcttggtagttgttaatacagttatggaaaagaggcacattgcatagaagccattggggagttcagtggaagttctgtaagatgtgcatgtactatttgatgcgttttctttgcttcactgcttttaatacttagcagtattgttggtctaagtcaatttgattattgaggagtctcagagcaaggtgcgttctagatgtcatcctaaaaaacacttcatatataattaatcactattttgtataattacatattgctgcttgtgtgtttttttttttttccatttagttgggcgttgtgttttacacaaaaccatttttgaattaaggctatgatattaagatagaaatttggactgttgttctgcttttcctggcactcaaattcatgactagttttgaggtcaaacctatgttcgtaatgagagattttataaggatcaactaagaaatggaaggcaggtgaagatataaaaccctagaatgcttaaatgtgctgtaaaactattgtagatgtcactggattttaccaagtaatatcctttcttttttttttccccccatctgctgtggcttttcagttaaaattttgtttataaaaggaatttgtttattacagctctaccta

SEQ ID NO: 337954 - DNA, 3894 bp, Homo sapiens
ggcgagtgggggaggggcgggcggggggcggcggttgggcagcgtcgcttcttaggaggaggaggaagaggaggaaggagggcgagcgaggaggatggcggagtcggggctcctgacggaactctaatgaatcattgattgaccagcactattttaccagttggaatgaatgatcagaaatgggcatagtgcttttagatccaacatgtaacagatggatgttactccatgctgattacttcttcaagccagtacttttttgattgtgtaggatctttgtctcttcatctttgaattcaattactggaaaataaaaggagttcatgtagtttttgtccaggcttgagtcaccatgagtagtagtttaggaaaagaaaaagactctaaagaaaaagatcccaaagtaccatcagccaaggaaagagaaaaggaggcaaaagcctctggaggttttgggaaagagagcaaagaaaaagaacctaagaccaaagggaaagatgccaaagatggaaagaaggactccagtgctgcccaaccaggggtggcattttcagttgacaatacgatcaaacggccaaacccagcacctgggactagaaaaaaatccagcaatgcagaggtgattaaagagctcaacaaatgccgggaagagaattcaatgcgtttggacttatccaagagatctatacacatattgccatcatcaatcaaagagttgactcaattaacagaactttatttatacagtaacaaattgcagtccctcccagcagaggtgggatgtttagtaaatctcatgacactggctctaagtgaaaattcacttaccagtttgcctgactctcttgataacttgaagaagctgcggatgcttgatttacggcataataaactgagagaaattccttcagtggtgtataggctggattctctcaccactctttaccttcgctttaatcgtataactactgtggaaaaggacatcaaaaacttgtcaaaactcagcatgcttagcattcgagagaacgatgtagctcacaatcaacttgaacaccttccaaaggagattggaaactgtacacagataaccaaccttgacttgcagcacaatgaactgctagacctcccagatactataggaaacctgtccagtttaagtcgtcttggtctgagatataacagactgtcagcaatacccagatcattagcaaaatgcagtgcacttgaagaattaaatttagagaacaataacatttctactttaccagagagtcttttatcaagtcttgtgaaactgaatagtttgaccttagctagaaattgcttccagttgtatccagtgggtggtccatctcagttttctaccatctattccctcaacatggaacacaatcgaatcaacaaaattccatttggaattttctccagagcaaaagtattaagtaagctgaatatgaaggacaatcagttaacatcacttcccttggattttggaacttggaccagtatggtagaattgaatttagccactaatcagctcacaaagatccctgaggatgtgtctggtctcgtttctcttgaggttcttatcttatcaaacaatcttctaaagaagcttccccatggtcttggaaaccttaggaagttaagagagttggatctagaagagaacaaattggaatccttgccaaatgaaattgcatatcttaaggatttacagaaattagtcttgacaaacaaccagttgaccactcttcccagaggcattggtcaccttactaatctcacacatctgggccttggagagaacctacttactcaccttcctgaagaaattggtacactggagaacctagaagaactgtatttgaatgacaaccccaacctgcatagccttccctttgagctggcactctgcagcaagctttcaatcatgagtattgagaactgtccactcagtcaccttccacctcagattgttgctggggggccttctttcatcattcagttcttaaagatgcagggtccatatcgtgccatggtctgatataaatctgctggtcccacacactgttcaaaaatagactgccattaatgtttcttatctatatctgtatctatttatgtagatattggtatatggcagatttataaaaattgcattatgtgtttctgctaatagaggaatcatagccatttagaattttttttaaattctgtacaaaaggcttatataagttttctttgctgaatttgatggatgtttttctgttgtgtaatctgatatgccagtttgcttaaaacatttgccaacacattatgaagttattaaatttaagggacagaggtagtatagttagatatactttctcttaggaaaaataatgggcaaaaatttttgttgcaacttttcatatatattttccccttaccaattgttttatccttatagtattgtaggccctgaaagtagaatttttctttaacttattttgagatttgagatttaaattttatgtattgtttacagtcagagtaaatcactggatttcttttgtttgttttgatttgctctgttttattcagtcaaatctagagtttgaatcctctgctaaagaatttgcatccactggtgtaaacagtgaaaggtatttgcttgttgaaaaaaaaaactggcaaagtgaaaagatacagtcaaaaatctagaatttctttaattttgcttctctgacgagttgtgaagcaaaatacctgaagtgagtctttgggtaggggaagggtattgagaccttttctagtatgaatattttttaagtttgggggaagagaaacttgcagtgaaaaggagttttttcattcctgaaagttgcagatccacaaaactaacaggataattgggcaaataaattacatataaacacacacaatctatatatgtatatacaatgctatatagatatgtatttattatatcataaactacagtaggtaactttaaggatttcttcctatccttgtacaatgacatgaatgtctttctttgaaaactgcaatgtatgtatgtttcaaggttatttaacagtgtactatggttttatatcttgacttgccttgtacatctttcaattctggaatatctgtgtctaagcacaatatcttcacactgtgctgtattgctgctgaactaaatgcacttttccccacatatggggcactggcttcaaacaattcagttcagtatcattacttttaatctcatctttcctttcttggtagttgttaatacagttatggaaaagaggcacattgcatagaagccattggggagttcagtggaagttctgtaagatgtgcatgtactatttgatgcgttttctttgcttcactgcttttaatacttagcagtattgttggtctaagtcaatttgattattgaggagtctcagagcaaggtgcgttctagatgtcatcctaaaaaacacttcatatataattaatcactattttgtataattacatattgctgcttgtgtgtttttttttttttccatttagttgggcgttgtgttttacacaaaaccatttttgaattaaggctatgatattaagatagaaatttggactgttgttctgcttttcctggcactcaaattcatgactagttttgaggtcaaacctatgttcgtaatgagagattttataaggatcaactaagaaatggaaggcaggtgaagatataaaaccctagaatgcttaaatgtgctgtaaaactattgtagatgtcactggattttaccaagtaatatcctttcttttttttttccccccatctgctgtggcttttcagttaaaattttgtttataaaaggaatttgtttattacagctctaccta

SEQ ID NO: 337955 - DNA, 2873 bp, Homo sapiens
ggcgagtgggggaggggcgggcggggggcggcggttgggcagcgtcgcttcttaggaggaggaggaagaggaggaaggagggcgagcgaggaggatggcggagtcggggctcctgacggaaacctgtccagtttaagtcgtcttggtctgagatataacagactgtcagcaatacccagatcattagcaaaatgcagtgcacttgaagaattaaatttagagaacaataacatttctactttaccagagagtcttttatcaagtcttgtgaaactgaatagtttgaccttagctagaaattgcttccagttgtatccagtgggtggtccatctcagttttctaccatctattccctcaacatggaacacaatcgaatcaacaaaattccatttggaattttctccagagcaaaagtattaagtaagctgaatatgaaggacaatcagttaacatcacttcccttggattttggaacttggaccagtatggtagaattgaatttagccactaatcagctcacaaagatccctgaggatgtgtctggtctcgtttctcttgaggttcttatcttatcaaacaatcttctaaagaagcttccccatggtcttggaaaccttaggaagttaagagagttggatctagaagagaacaaattggaatccttgccaaatgaaattgcatatcttaaggatttacagaaattagtcttgacaaacaaccagttgaccactcttcccagaggcattggtcaccttactaatctcacacatctgggccttggagagaacctacttactcaccttcctgaagaaattggtacactggagaacctagaagaactgtatttgaatgacaaccccaacctgcatagccttccctttgagctggcactctgcagcaagctttcaatcatgagtattgagaactgtccactcagtcaccttccacctcagattgttgctggggggccttctttcatcattcagttcttaaagatgcagggtccatatcgtgccatggtctgatataaatctgctggtcccacacactgttcaaaaatagactgccattaatgtttcttatctatatctgtatctatttatgtagatattggtatatggcagatttataaaaattgcattatgtgtttctgctaatagaggaatcatagccatttagaattttttttaaattctgtacaaaaggcttatataagttttctttgctgaatttgatggatgtttttctgttgtgtaatctgatatgccagtttgcttaaaacatttgccaacacattatgaagttattaaatttaagggacagaggtagtatagttagatatactttctcttaggaaaaataatgggcaaaaatttttgttgcaacttttcatatatattttccccttaccaattgttttatccttatagtattgtaggccctgaaagtagaatttttctttaacttattttgagatttgagatttaaattttatgtattgtttacagtcagagtaaatcactggatttcttttgtttgttttgatttgctctgttttattcagtcaaatctagagtttgaatcctctgctaaagaatttgcatccactggtgtaaacagtgaaaggtatttgcttgttgaaaaaaaaaactggcaaagtgaaaagatacagtcaaaaatctagaatttctttaattttgcttctctgacgagttgtgaagcaaaatacctgaagtgagtctttgggtaggggaagggtattgagaccttttctagtatgaatattttttaagtttgggggaagagaaacttgcagtgaaaaggagttttttcattcctgaaagttgcagatccacaaaactaacaggataattgggcaaataaattacatataaacacacacaatctatatatgtatatacaatgctatatagatatgtatttattatatcataaactacagtaggtaactttaaggatttcttcctatccttgtacaatgacatgaatgtctttctttgaaaactgcaatgtatgtatgtttcaaggttatttaacagtgtactatggttttatatcttgacttgccttgtacatctttcaattctggaatatctgtgtctaagcacaatatcttcacactgtgctgtattgctgctgaactaaatgcacttttccccacatatggggcactggcttcaaacaattcagttcagtatcattacttttaatctcatctttcctttcttggtagttgttaatacagttatggaaaagaggcacattgcatagaagccattggggagttcagtggaagttctgtaagatgtgcatgtactatttgatgcgttttctttgcttcactgcttttaatacttagcagtattgttggtctaagtcaatttgattattgaggagtctcagagcaaggtgcgttctagatgtcatcctaaaaaacacttcatatataattaatcactattttgtataattacatattgctgcttgtgtgtttttttttttttccatttagttgggcgttgtgttttacacaaaaccatttttgaattaaggctatgatattaagatagaaatttggactgttgttctgcttttcctggcactcaaattcatgactagttttgaggtcaaacctatgttcgtaatgagagattttataaggatcaactaagaaatggaaggcaggtgaagatataaaaccctagaatgcttaaatgtgctgtaaaactattgtagatgtcactggattttaccaagtaatatcctttcttttttttttccccccatctgctgtggcttttcagttaaaattttgtttataaaaggaatttgtttattacagctctaccta

SEQ ID NO: 337956 - DNA, 1350 bp, Homo sapiens
ggcgagtgggggaggggcgggcggggggcggcggttgggcagcgtcgcttcttaggaggaggaggaagaggaggaaggagggcgagcgaggaggatggcggagtcggggctcctgacggaactctaatgaatcattgattgaccagcactattttaccagttggaatgaatgatcagaaatgggcatagtgcttttagatccaacatgtaacagatggatgttactccatgctgattacttcttcaagccagtacttttttgattgtgtaggatctttgtctcttcatctttgaattcaattactggaaaataaaaggagttcatgtagtttttgtccaggcttgagtcaccatgagtagtagtttaggaaaagaaaaagactctaaagaaaaagatcccaaagtaccatcagccaaggaaagagaaaaggaggcaaaagcctctggaggttttgggaaagagagcaaagaaaaagaacctaagaccaaagggaaagatgccaaagatggaaagaaggactccagtgctgcccaaccaggggtggcattttcagttgacaatacgatcaaacggccaaacccagcacctgggactagaaaaaaatccagcaatgcagaggtgattaaagagctcaacaaatgccgggaagagaattcaatgcgtttggacttatccaagagatctatacacatattgccatcatcaatcaaagagttgactcaattaacagaactttatttatacagtaacaaattgcagtccctcccagcagaggtgggatgtttagtaaatctcatgacactggctctaagtgaaaattcacttaccagtttgcctgactctcttgataacttgaagaagctgcggatgcttgatttacggcataataaactgagagaaattccttcagtggtgtataggctggattctctcaccactctttaccttcgctttaatcgtataactactgtggaaaaggacatcaaaaacttgtcaaaactcagcatgcttagcattcgagagaacaaaattaaacaactacctgctgaaattggtgaattatgtaacctcattacgctggatgtagctcacaatcaacttgaacaccttccaaaggagattggaaactgtacacagataaccaaccttgacttgcagcacaatgaactgctagacctcccagatactataggtatgagaggagaaaggagatattgatagctgttaatagctaactggatattaataggactatttttgatccatttggtaatgaaaattcaggagtaaaattcacaattaccaaagttgtaaaacttttaagataatattttaaaatcatttttcat

SEQ ID NO: 337957 - DNA, 1094 bp, Homo sapiens
  misc_feature (835)..(835): n is a, c, g, or t
ggcgagtgggggaggggcgggcggggggcggcggttgggcagcgtcgcttcttaggaggaggaggaagaggaggaaggagggcgagcgaggaggatggcggagtcggggctcctgacggaaacctgtccagtttaagtcgtcttggtctgagatataacagactgtcagcaatacccagatcattagcaaaatgcagtgcacttgaagaattaaatttagagaacaataacatttctactttaccagagagtcttttatcaagtcttgtgaaactgaatagtttgaccttagctagaaattgcttccagttgtatccagtgggtggtccatctcagttttctaccatctattccctcaacatggaacacaatcgaatcaacaaaattccatttggaattttctccagagcaaaagtattaagtaagctgaatatgaaggacaatcagttaacatcacttcccttggattttggaacttggaccagtatggtagaattgaatttagccactaatcagctcacaaagatccctgaggatgtgtctggtctcgtttctcttgaggttcttatcttatcaaacaatcttctaaagaagcttccccatggtcttggaaaccttaggaagttaagagagttggatctagaagagaacaaattggaatccttgccaaatgaaattgcatatcttaaggatttacagaaattagtcttgacaaacaaccagttgaccactcttcccagaggcattggtcaccttactaatctcacacatctgggccttggagagaacctacttactcaccttcctgaagaaattggtacactggagaaccttngaagaacctgtatttggaaatggacaagcccaaacctggattagctttccactattgaagcctgggactcctgagaggaaagcgttttcaaaccagtgaagtagtgacgacaactgtgccacatcatagtaataccttccaacagccagaatatgctgagcaggggaggcgcacattcatatcatacagagagttaaaaagatagacgggggccaaatcgaggacaaggggctggagtaaaacatgcggggccacacaa

SEQ ID NO: 337958 - DNA, 572 bp, Homo sapiens
  misc_feature (419)..(419): n is a, c, g, or t
  misc_feature (445)..(445): n is a, c, g, or t
  misc_feature (510)..(510): n is a, c, g, or t
  misc_feature (536)..(536): n is a, c, g, or t
ggcgagtgggggaggggcgggcggggggcggcggttgggcagcgtcgcttcttaggaggaggaggaagaggaggaaggagggcgagcgaggaggatggcggagtcggggctcctgacggaactctaatgaatcattgattgaccagcactattttaccagttggaatgaatgatcagaaatgggcatagtgcttttagatccaacatgtaacagatggatgttactccatgctgattacttcttcaagccagtacttttttgattgtgtaggatctttgtctcttcatctttgaattcaattactggaaaataaaaggagttcatgtagtttttgtccaggcttgagtcaccatgagtagtagtttaggaaaagaaaaagactctaaagaaaaagatcccaaagtaccatcagaaaaanaaaaaaaaaaaaaaaaaagcggccgncgatcctgcagccggggtccctattctaagcggcgcaccgcgtggagctccacttgtccttaggnggtaatcgacttgcgaacaggcaagngttccgggaatgtatcgccacatccccaccggcggc

SEQ ID NO: 337959 - DNA, 3974 bp, Homo sapiens
agccggcgcgagggcgcgggccgggggcccccggcggacagtctctctcctctcggctccctgggcccccgggcccagtccgcagggcgccccgagtcgtgtaaatcgttggcgagggcccgggcgcagcggcggtcatacagggaactctaatgaatcattgattgaccagcactattttaccagttggaatgaatgatcagaaatgggcatagtgcttttagatccaacatgtaacagatggatgttactccatgctgattacttcttcaagccagtacttttttgattgtgtaggatctttgtctcttcatctttgaattcaattactggaaaataaaaggagttcatgtagtttttgtccaggcttgagtcaccatgagtagtagtttaggaaaagaaaaagactctaaagaaaaagatcccaaagtaccatcagccaaggaaagagaaaaggaggcaaaagcctctggaggttttgggaaagagagcaaagaaaaagaacctaagaccaaagggaaagatgccaaagatggaaagaaggactccagtgctgcccaaccaggggtggcattttcagttgacaatacgatcaaacggccaaacccagcacctgggactagaaaaaaatccagcaatgcagaggtgattaaagagctcaacaaatgccgggaagagaattcaatgcgtttggacttatccaagagatctatacacatattgccatcatcaatcaaagagttgactcaattaacagaactttatttatacagtaacaaattgcagtccctcccagcagaggtgggatgtttagtaaatctcatgacactggctctaagtgaaaattcacttaccagtttgcctgactctcttgataacttgaagaagctgcggatgcttgatttacggcataataaactgagagaaattccttcagtggtgtataggctggattctctcaccactctttaccttcgctttaatcgtataactactgtggaaaaggacatcaaaaacttgtcaaaactcagcatgcttagcattcgagagaacaaaattaaacaactacctgctgaaattggtgaattatgtaacctcattacgctggatgtagctcacaatcaacttgaacaccttccaaaggagattggaaactgtacacagataaccaaccttgacttgcagcacaatgaactgctagacctcccagatactataggaaacctgtccagtttaagtcgtcttggtctgagatataacagactgtcagcaatacccagatcattagcaaaatgcagtgcacttgaagaattaaatttagagaacaataacatttctactttaccagagagtcttttatcaagtcttgtgaaactgaatagtttgaccttagctagaaattgcttccagttgtatccagtgggtggtccatctcagttttctaccatctattccctcaacatggaacacaatcgaatcaacaaaattccatttggaattttctccagagcaaaagtattaagtaagctgaatatgaaggacaatcagttaacatcacttcccttggattttggaacttggaccagtatggtagaattgaatttagccactaatcagctcacaaagatccctgaggatgtgtctggtctcgtttctcttgaggttcttatcttatcaaacaatcttctaaagaagcttccccatggtcttggaaaccttaggaagttaagagagttggatctagaagagaacaaattggaatccttgccaaatgaaattgcatatcttaaggatttacagaaattagtcttgacaaacaaccagttgaccactcttcccagaggcattggtcaccttactaatctcacacatctgggccttggagagaacctacttactcaccttcctgaagaaattggtacactggagaacctagaagaactgtatttgaatgacaaccccaacctgcatagccttccctttgagctggcactctgcagcaagctttcaatcatgagtattgagaactgtccactcagtcaccttccacctcagattgttgctggggggccttctttcatcattcagttcttaaagatgcagggtccatatcgtgccatggtctgatataaatctgctggtcccacacactgttcaaaaatagactgccattaatgtttcttatctatatctgtatctatttatgtagatattggtatatggcagatttataaaaattgcattatgtgtttctgctaatagaggaatcatagccatttagaattttttttaaattctgtacaaaaggcttatataagttttctttgctgaatttgatggatgtttttctgttgtgtaatctgatatgccagtttgcttaaaacatttgccaacacattatgaagttattaaatttaagggacagaggtagtatagttagatatactttctcttaggaaaaataatgggcaaaaatttttgttgcaacttttcatatatattttccccttaccaattgttttatccttatagtattgtaggccctgaaagtagaatttttctttaacttattttgagatttgagatttaaattttatgtattgtttacagtcagagtaaatcactggatttcttttgtttgttttgatttgctctgttttattcagtcaaatctagagtttgaatcctctgctaaagaatttgcatccactggtgtaaacagtgaaaggtatttgcttgttgaaaaaaaaaactggcaaagtgaaaagatacagtcaaaaatctagaatttctttaattttgcttctctgacgagttgtgaagcaaaatacctgaagtgagtctttgggtaggggaagggtattgagaccttttctagtatgaatattttttaagtttgggggaagagaaacttgcagtgaaaaggagttttttcattcctgaaagttgcagatccacaaaactaacaggataattgggcaaataaattacatataaacacacacaatctatatatgtatatacaatgctatatagatatgtatttattatatcataaactacagtaggtaactttaaggatttcttcctatccttgtacaatgacatgaatgtctttctttgaaaactgcaatgtatgtatgtttcaaggttatttaacagtgtactatggttttatatcttgacttgccttgtacatctttcaattctggaatatctgtgtctaagcacaatatcttcacactgtgctgtattgctgctgaactaaatgcacttttccccacatatggggcactggcttcaaacaattcagttcagtatcattacttttaatctcatctttcctttcttggtagttgttaatacagttatggaaaagaggcacattgcatagaagccattggggagttcagtggaagttctgtaagatgtgcatgtactatttgatgcgttttctttgcttcactgcttttaatacttagcagtattgttggtctaagtcaatttgattattgaggagtctcagagcaaggtgcgttctagatgtcatcctaaaaaacacttcatatataattaatcactattttgtataattacatattgctgcttgtgtgtttttttttttttccatttagttgggcgttgtgttttacacaaaaccatttttgaattaaggctatgatattaagatagaaatttggactgttgttctgcttttcctggcactcaaattcatgactagttttgaggtcaaacctatgttcgtaatgagagattttataaggatcaactaagaaatggaaggcaggtgaagatataaaaccctagaatgcttaaatgtgctgtaaaactattgtagatgtcactggattttaccaagtaatatcctttcttttttttttccccccatctgctgtggcttttcagttaaaattttgtttataaaaggaatttgtttattacagctctaccta

SEQ ID NO: 337960 - DNA, 5312 bp, Homo sapiens
  misc_feature (3954)..(3954): n is a, c, g, or t
  misc_feature (4206)..(4206): n is a, c, g, or t
ggcgagtgggggaggggcgggcggggggcggcggttgggcagcgtcgcttcttaggaggaggaggaagaggaggaaggagggcgagcgaggaggatggcggagtcggggctcctgacggaactctaatgaatcattgattgaccagcactattttaccagttggaatgaatgatcagaaatgggcatagtgcttttagatccaacatgtaacagatggatgttactccatgctgattacttcttcaagccagtacttttttgattgtgtaggatctttgtctcttcatctttgaattcaattactggaaaataaaaggagttcatgtagtttttgtccaggcttgagtcaccatgagtagtagtttaggaaaagaaaaagactctaaagaaaaagatcccaaagtaccatcagccaaggaaagagaaaaggaggcaaaagcctctggaggttttgggaaagagagcaaagaaaaagaacctaagaccaaagggaaagatgccaaagatggaaagaaggactccagtgctgcccaaccaggggtggcattttcagttgacaatacgatcaaacggccaaacccagcacctgggactagaaaaaaatccagcaatgcagaggtgattaaagagctcaacaaatgccgggaagagaattcaatgcgtttggacttatccaagagatctatacacatattgccatcatcaatcaaagagttgactcaattaacagaactttatttatacagtaacaaattgcagtccctcccagcagaggtgggatgtttagtaaatctcatgacactggctctaagtgaaaattcacttaccagtttgcctgactctcttgataacttgaagaagctgcggatgcttgatttacggcataataaactgagagaaattccttcagtggtgtataggctggattctctcaccactctttaccttcgctttaatcgtataactactgtggaaaaggacatcaaaaacttgtcaaaactcagcatgcttagcattcgagagaacaaaattaaacaactacctgctgaaattggtgaattatgtaacctcattacgctggatgtagctcacaatcaacttgaacaccttccaaaggagattggaaactgtacacagataaccaaccttgacttgcagcacaatgaactgctagacctcccagatactataggaaacctgtccagtttaagtcgtcttggtctgagatataacagactgtcagcaatacccagatcattagcaaaatgcagtgcacttgaagaattaaatttagagaacaataacatttctactttaccagagagtcttttatcaagtcttgtgaaactgaatagtttgaccttagctagaaattgcttccagttgtatccagtgggtggtccatctcagttttctaccatctattccctcaacatggaacacaatcgaatcaacaaaattccatttggaattttctccagagcaaaagtattaagtaagctgaatatgaaggacaatcagttaacatcacttcccttggattttggaacttggaccagtatggtagaattgaatttagccactaatcagctcacaaagatccctgaggatgtgtctggtctcgtttctcttgaggttcttatcttatcaaacaatcttctaaagaagcttccccatggtcttggaaaccttaggaagttaagagagttggatctagaagagaacaaattggaatccttgccaaatgaaattgcatatcttaaggatttacagaaattagtcttgacaaacaaccagttgaccactcttcccagaggcattggtcaccttactaatctcacacatctgggccttggagagaacctacttactcaccttcctgaagaaattggtacactggagaacctagaagaactgtatttgaatgacaaccccaacctgcatagccttccctttgagctggcactctgcagcaagctttcaatcatgagtattgagaactgtccactcagtcaccttccacctcagattgttgctggggggccttctttcatcattcagttcttaaagatgcagggtccatatcgtgccatggtctgatataaatctgctggtcccacacactgttcaaaaatagactgccattaatgtttcttatctatatctgtatctatttatgtagatattggtatatggcagatttataaaaattgcattatgtgtttctgctaatagaggaatcatagccatttagaattttttttaaattctgtacaaaaggcttatataagttttctttgctgaatttgatggatgtttttctgttgtgtaatctgatatgccagtttgcttaaaacatttgccaacacattatgaagttattaaatttaagggacagaggtagtatagttagatatactttctcttaggaaaaataatgggcaaaaatttttgttgcaacttttcatatatattttccccttaccaattgttttatccttatagtattgtaggccctgaaagtagaatttttctttaacttattttgagatttgagatttaaattttatgtattgtttacagtcagagtaaatcactggatttcttttgtttgttttgatttgctctgttttattcagtcaaatctagagtttgaatcctctgctaaagaatttgcatccactggtgtaaacagtgaaaggtatttgcttgttgaaaaaaaaaactggcaaagtgaaaagatacagtcaaaaatctagaatttctttaattttgcttctctgacgagttgtgaagcaaaatacctgaagtgagtctttgggtaggggaagggtattgagaccttttctagtatgaatattttttaagtttgggggaagagaaacttgcagtgaaaaggagttttttcattcctgaaagttgcagatccacaaaactaacaggataattgggcaaataaattacatataaacacacacaatctatatatgtatatacaatgctatatagatatgtatttattatatcataaactacagtaggtaactttaaggatttcttcctatccttgtacaatgacatgaatgtctttctttgaaaactgcaatgtatgtatgtttcaaggttatttaacagtgtactatggttttatatcttgacttgccttgtacatctttcaattctggaatatctgtgtctaagcacaatatcttcacactgtgctgtattgctgctgaactaaatgcacttttccccacatatggggcactggcttcaaacaattcagttcagtatcattacttttaatctcatctttcctttcttggtagttgttaatacagttatggaaaagaggcacattgcatagaagccattggggagttcagtggaagttctgtaagatgtgcatgtactatttgatgcgttttctttgcttcactgcttttaatacttagcagtattgttggtctaagtcaatttgattattgaggagtctcagagcaaggtgcgttctagatgtcatcctaaaaaacacttcatatataattaatcactattttgtataattacatattgctgcttgtgtgtttttttttttttccatttagttgggcgttgtgttttacacaaaaccatttttgaattaaggctatgatattaagatagaaatttggactgttgttctgcttttcctggcactcaaattcatgactagttttgaggtcaaacctatgttcgtaatgagagattttataaggatcaactaagaaatggaaggcaggtgaagatataaaaccctagaatgcttaaatgtgctgtaaaactattgtagatgtcactggattttaccaagtaatatcctttcttttttttttccccccatctgctgtggcttttcagttaaaattttgtttataaaaggaatttgtttattacagctctacctaaaaaanaaaaaaaaaaaaaaaaaaacttggtgtgcggcgcgcgcgcccaggggccaccagagaaaaaggtcttctataagagaacccatccgcggttgaggcgcgcgcgggggggccccacagtaagtgcaaacgagcaaaccactgggcgccaaaacggggtggtcccaaaggagaacactccggggcgcaatagcgaacaacgggcgcgggcggtccccccaccaaataaaaaaaaagagcgccgcggggaggcancaaccaagcggcgtcggttccggagaaacaaatccccgagaaggcgggcgcacgaagggggaacaaaacgggggactacaatcaccaacgagagacgtcccaagggaggagccaggaatataaaaatataacgcccggcagcagagggggagcacaaccatcacagcaacaacaagcagaacgcaagagcagaggacgcggcgaaggcgagacaggagcagagaggggagagagcaaaaagcggacaagaaacgaagggcagaagaaggagggaagcgagccagagaggaaggcagaggcgagacaccgacgaggacaacccagacgagagacgagagaaaggagacagagcacaagcgaacaaccgcggcaaagagaagcgagagagagcagagaaggacgagcagaggaggagagcagaagcagagagggggagcgagaagcgcaagcagaagccaaaaaagcaagacgcaaccacaatagcagaacaacagcacaagaaccgacagacaacaagaagacacaaaaagaaagagacgaaacccagccagacgaaccacacacaaggagcaagacagacaagaagacagtcagcccgacgatacgcgagagagagcaaagacacagaaacgacaaagcaagaacagagaacagcagagcaaaacaaagaagagacacaaaacaacagaaagaagaaccaccgacacaaaccaagagagacgaccagcaagacaaacctaaaagcgcgagacacacgagcgaagaccacacgaagcagaaagcggaccagaccacgagaccacagaagcagcagacaccgaggcagcggcagacgagcgacgggagaagagcagacagagacaaagacaaggaagaagcaagacgaacagaagaagcaaacgcagagaaagaacagcaacaaaagaaggaagacgagaggacacgcgacagcaaactaggcaaagcaagacagcgaaggaagcagacagcagaaaagcaaccagagaaagacgaacagacacagagaagaagcgagaagcagacgaggaaccagagaagcacagagaagagcgaaacaagaaacacacagagaaaacaaccgacac

SEQ ID NO: 337961 - DNA, 4005 bp, Homo sapiens
ggcgagtgggggaggggcgggcggggggcggcggttgggcagcgtcgcttcttaggaggaggaggaagaggaggaaggagggcgagcgaggaggatggcggagtcggggctcctgacggaactctaatgaatcattgattgaccagcactattttaccagttggaatgaatgatcagaaatgggcatagtgcttttagatccaacatgtaacagatggatgttactccatgctgattacttcttcaagccagtacttttttgattgtgtaggatctttgtctcttcatctttgaattcaattactggaaaataaaaggagttcatgtagtttttgtccaggcttgagtcaccatgagtagtagtttaggaaaagaaaaagactctaaagaaaaagatcccaaagtaccatcagccaaggaaagagaaaaggaggcaaaagcctctggaggttttgggaaagagagcaaagaaaaagaacctaagaccaaagggaaagatgccaaagatggaaagaaggactccagtgctgcccaaccaggggtggcattttcagttgacaatacgatcaaacggccaaacccagcacctgggactagaaaaaaatccagcaatgcagaggtgattaaagagctcaacaaatgccgggaagagaattcaatgcgtttggacttatccaagagatctatacacatattgccatcatcaatcaaagagttgactcaattaacagaactttatttatacagtaacaaattgcagtccctcccagcagaggtgggatgtttagtaaatctcatgacactggctctaagtgaaaattcacttaccagtttgcctgactctcttgataacttgaagaagctgcggatgcttgatttacggcataataaactgagagaaattccttcagtggtgtataggctggattctctcaccactctttaccttcgctttaatcgtataactactgtggaaaaggacatcaaaaacttgtcaaaactcagcatgcttagcattcgagagaacaaaattaaacaactacctgctgaaattggtgaattatgtaacctcattacgctggatgtagctcacaatcaacttgaacaccttccaaaggagattggaaactgtacacagataaccaaccttgacttgcagcacaatgaactgctagacctcccagatactataggaaacctgtccagtttaagtcgtcttggtctgagatataacagactgtcagcaatacccagatcattagcaaaatgcagtgcacttgaagaattaaatttagagaacaataacatttctactttaccagagagtcttttatcaagtcttgtgaaactgaatagtttgaccttagctagaaattgcttccagttgtatccagtgggtggtccatctcagttttctaccatctattccctcaacatggaacacaatcgaatcaacaaaattccatttggaattttctccagagcaaaagtattaagtaagctgaatatgaaggacaatcagttaacatcacttcccttggattttggaacttggaccagtatggtagaattgaatttagccactaatcagctcacaaagatccctgaggatgtgtctggtctcgtttctcttgaggttcttatcttatcaaacaatcttctaaagaagcttccccatggtcttggaaaccttaggaagttaagagagttggatctagaagagaacaaattggaatccttgccaaatgaaattgcatatcttaaggatttacagaaattagtcttgacaaacaaccagttgaccactcttcccagaggcattggtcaccttactaatctcacacatctgggccttggagagaacctacttactcaccttcctgaagaaattggtacactggagaacctagaagaactgtatttgaatgacaaccccaacctgcatagccttccctttgagctggcactctgcagcaagctttcaatcatgagtattgagaactgtccactcagtcaccttccacctcagattgttgctggggggccttctttcatcattcagttcttaaagatgcagggtccatatcgtgccatggtctgatataaatctgctggtcccacacactgttcaaaaatagactgccattaatgtttcttatctatatctgtatctatttatgtagatattggtatatggcagatttataaaaattgcattatgtgtttctgctaatagaggaatcatagccatttagaattttttttaaattctgtacaaaaggcttatataagttttctttgctgaatttgatggatgtttttctgttgtgtaatctgatatgccagtttgcttaaaacatttgccaacacattatgaagttattaaatttaagggacagaggtagtatagttagatatactttctcttaggaaaaataatgggcaaaaatttttgttgcaacttttcatatatattttccccttaccaattgttttatccttatagtattgtaggccctgaaagtagaatttttctttaacttattttgagatttgagatttaaattttatgtattgtttacagtcagagtaaatcactggatttcttttgtttgttttgatttgctctgttttattcagtcaaatctagagtttgaatcctctgctaaagaatttgcatccactggtgtaaacagtgaaaggtatttgcttgttgaaaaaaaaaactggcaaagtgaaaagatacagtcaaaaatctagaatttctttaattttgcttctctgacgagttgtgaagcaaaatacctgaagtgagtctttgggtaggggaagggtattgagaccttttctagtatgaatattttttaagtttgggggaagagaaacttgcagtgaaaaggagttttttcattcctgaaagttgcagatccacaaaactaacaggataattgggcaaataaattacatataaacacacacaatctatatatgtatatacaatgctatatagatatgtatttattatatcataaactacagtaggtaactttaaggatttcttcctatccttgtacaatgacatgaatgtctttctttgaaaactgcaatgtatgtatgtttcaaggttatttaacagtgtactatggttttatatcttgacttgccttgtacatctttcaattctggaatatctgtgtctaagcacaatatcttcacactgtgctgtattgctgctgaactaaatgcacttttccccacatatggggcactggcttcaaacaattcagttcagtatcattacttttaatctcatctttcctttcttggtagttgttaatacagttatggaaaagaggcacattgcatagaagccattggggagttcagtggaagttctgtaagatgtgcatgtactatttgatgcgttttctttgcttcactgcttttaatacttagcagtattgttggtctaagtcaatttgattattgaggagtctcagagcaaggtgcgttctagatgtcatcctaaaaaacacttcatatataattaatcactattttgtataattacatattgctgcttgtgtgtttttttttttttccatttagttgggcgttgtgttttacacaaaaccatttttgaattaaggctatgatattaagatagaaatttggactgttgttctgcttttcctggcactcaaattcatgactagttttgaggtcaaacctatgttcgtaatgagagattttataaggatcaactaagaaatggaaggcaggtgaagatataaaaccctagaatgcttaaatgtgctgtaaaactattgtagatgtcactggattttaccaagtaatatcctttcttttttttttccccccatctgctgtggcttttcagttaaaattttgtttataaaaggaatttgtttattacagctctacctaaaaatacaacaaaaaagtcgaccgccgccgaatttagcagtagtagtagtagtaggc

SEQ ID NO: 337962 - DNA, 306 bp, Homo sapiens
ttctggccaatggatgtaagcaaaatattgtatgcaccttccaggaagtgttcttaaactgaagggtcatgcactttctcagtccttcctgctccctttggaaaacactggaaggcctatttctccataaaattctaggaatctccaaggaatgcttgtattttctaaaattcatattggtagtcacttgtcctgttcgccaagtgccctcactcaaggccattcaagctccagagctctgcagatccttcttgcaacctgacaaacagactatcagagctctgtgtctcctctgctcttttgtct

SEQ ID NO: 337963 - DNA, 451 bp, Homo sapiens
cctcaggtcactttttccctaattatagcctactgcattgctatgtgcatttcctcattctaacaccgcataatgaggtagaagccccatattgtggcaagttggggctctcttaaatttactgacttagtagactataccttaatcatatgggatatttctaaccttgcaaaatttatataattacactttcttttttttgagacggagtcttgctctgttgcccagggtgcagtgtagtagtgtggtcttggcttactgcaacctctgcctcctggttcaagcgattctcctgcctcagcctcccaagtatctgggattacaggcatgtgacaccaggcccggctaatttttgtacttttagtggagacgaggtttcactatgttggccaggctggtctcgaactcctgacctcaggtgatctgcccaccttggcctcccaaagtgctg

SEQ ID NO: 337964 - DNA, 107 bp, Homo sapiens
tctacctggcaaaggtcattttgaattgtcaagagtatattggagaccccttaaccactgaattccattctcaccaagacccctcaatatctttcacaggctcctct

SEQ ID NO: 337965 - DNA, 205 bp, Homo sapiens
ttcagattagtcttcctaaaacgtgtttaattgggtttaaaacacagtttaaattcctctgttttaaaacatttgtttcttcccagttgcctacagaaaagatctcaaattcctcagtctgacagtttgcctggacaagacctatctcgtcttactccagttatttttatttttataaggaccatctgctactatcaaaaggaat

SEQ ID NO: 337966 - DNA, 192 bp, Homo sapiens
tcagtagggaaagttatccggacccagttaccatttagcataaacctgagatgaattgtattatatttttttcacaaggcaaaagtcctgtgaaattgaaagtgtgacataacacaaatgtaattgaaccatgagtaaccagaagctaactaattagagcttcagttgtctggaaatatttttatagttcgt

SEQ ID NO: 337967 - DNA, 599 bp, Homo sapiens
tgtaatttgaccagaaacaacggctggactttgggccaaatatcagtcgcacttaacttaatattgcttggcataaaatgtagtttgcagtgttctgaaccaatccattggaacttcaagtcctgtcagctctatttttctagatacatcttggatccctcctcctgtctgcacattagttcaactctctgttccaagcactattcttgtcactgggaatataatgatgaaaaagacagacaaggctaccgtccttatcgtttattgcttcaactatggcaaaactcctgatttgtttcactctatctagtttctccattctattttaacactgtggccagactgatatttttcccagactacaaaaatgatggcgtcattctcccaattatattccacaaaatccctcaatattaacccttacctatatataccaatatcaatccctacccactcttccctaccagagccatgcttaatctcttgtcactttctgaacatacaacttcagctttcttgcctttgcacatgtcctttctgccagaatatatctttcccatctcaccctagaaaaaaaaatcccttgttatggttcaacg

SEQ ID NO: 337968 - DNA, 385 bp, Homo sapiens
acccatttctaagggatgcctaatgccctcctgactcagtcccctcctgatggccatacctctcaatactgttgcattggggatcacatttcaacaagaattttggaagggacaaaagcattcaaaccgtagcagtatgtctgtaccacattttgtttatccattcattcctcagtagacccaggggttgcttccacactagggctttctttcagttttaaaactgggatggtcttgggcaaactaggacaagatggttttattctggtaccaaactgcagcctctgtttggagttggccaagttactactttcaaaaaagttcccagtgggtaggggttgaccagaagcttagaaaatctatgcatcagttttggtgcaatatc

SEQ ID NO: 337969 - DNA, 293 bp, Homo sapiens
tcctgttggtcctctttgtgggatagtccctcatcattttcttcctgagcttttctttactatgtgcttttatttactatttgtgtgtgtgtatgaatacaaatttataagaacttatttttaaagaatcgtatggaaaatttcaaatgtataaaaaagtagagagtagaatgataaattcctgtaatacctatcacccggattcaataattactaattttgggccagttcaataattgttcttgttttctgactgatttttttttttttttaaagagacaggggtcttgcca

SEQ ID NO: 337970 - DNA, 100 bp, Homo sapiens
ccatcatgctcagctgagtgatcacattctttagaagactaggtcatttctgaataacacctgacccttaccagatgagaataggaggagagagtgtttg

SEQ ID NO: 337971 - DNA, 623 bp, Homo sapiens
atcattacatagactaagtggcttataaacaccataaatgtatatcgcacagttctggaggcttgaagacgaagatcagggtaccaacgtgatcagattctggtgagggccctcttttaggttgaaaacaaacaactaccccttgtaacctcacatgaaggaaaggcagggagctagctctctgctctattcctataagggcacttaatcccattcatgagggctcaatccacatgactcaatcacctcccaaatgcctcacttcctaataatttcacattgagggtatggaatgaattgtaaacaggccttatctttcaaagcatccagcagccctgagttccacgactctttatacctgaggtgagagttggccagatagggaattgatcctatgtcctactgaaaaccagtgttggtattagcaatggtcttggtaaaatacaatgaagaagaataacgattttaaaatgaaaaaaaaaacttgaaagaaatggaaaattataaaggacacagttgcaggctcaatataacttaaattaggggttgacagactttctctgtaaaaggagtggagtttgactgaatgtttgtctcccctacaaattcatatgttaaaatct

SEQ ID NO: 337972 - DNA, 312 bp, Homo sapiens
ggttagagatagaaaacaggcatttggttagtgactaatttcatattctccaaaattatagcagaggttccctctgaacaaaagctctcaaaatgttacagaaattccctcctgccttttgcaaacatacaaagtctgtaggaaaacaaatcaaatagcctaaaagtttattggaaaggaaaaagaaaattccaacttatcctagcaaatatttctttaagaataaaaatggaaaaaattaaaggaggttgctaagggcccttttatatcgaacatgcttttagtgtctacagagtcagcacagcgaatata

SEQ ID NO: 337973 - DNA, 969 bp, Homo sapiens
tcctctgtgggagggttgctggtctctgttaaaagccccccgggtgacgtgcatgctgccagggcctgtgcccccggtagacattctggggaggggccaccacaaggaaacctcagtccaagctgtccagcggaggctgggcatggctgtgccagcacaggaaggcaggtaggggtctctggggcaggcagctctccccctggcccagccccctgtgtgaagtgctcagcctgggtaggaacgtgcttcccactcagcctcctccaagccgctggaggtcccactggttccccaaatggcttctgtcctgagccgtgggctcctgaccacgcatctaccttgcacggtctgaacaagagtctgcgccagggaccccgatcgggaggggcacagaggaagccaagggcccacacaggtgagggggtctcgggtctgagcctcacccagcccaggctcagcagcagcctcagaatttcctggcatctgcttgcctgtgttgcaacccaagtgggatgtgcacgccgcctgagagagaaaacactcggggaggattatgtaagcgctttcctccccagcacagggccgtcctgggcacattgaggccagaccatgtgcaaaagcactcgggagagtggcaggagctgagccaccagagggggattaaccccttccgggatgctggcagcttgtcctggggaacatggggctggtcaggattgcaggacacggaggggcggagtgtgaatgtggaggcaccggtgctgcgtgattttccacaagttgtctaacctctctgtgccttcattgcctgactcggctgtttccaatgcaactgattttaacggcacctgtttcatgaggccacagccaggattctgggaggcaaagcacagaaagccctcaatgcggtttcaggctccaggcaaggctcagctgacagtagctgaaaacagcaatttcagccgcaga

SEQ ID NO: 337974 - DNA, 325 bp, Homo sapiens
caaggtcttctgtctgaatttatctgaccactccttctgtctcatctctcttcttcctgcctcttctgtgctggaggcctcatgtgattacgttgggctcacccagataacccaggataatctccctaaaatcatttgataagtgatcttaattcatttgcaaaaactcctcacagcagtacctagattggtgtttgtgtaaccatgggtagggatattaaacttcagtattctgcccaccccagaagcctttctcaagtgtctagtaatcattggctggctgttcctatgtttaatgctggggctttttttttttttttttttt

SEQ ID NO: 337975 - DNA, 552 bp, Homo sapiens
ctctatcatgatgtatattaaagtgaccagcacagtaccttactctagcggttaatgcctcaatttcatgaccaaatctggaactgcaagtgcgtagcctagtcagcaagaactactgattggacaaaaattagttatgttaaaaattctagagaaaggcagaaatttgtgggggagttgtgggaagtggcaagagtttcttcacttttgattagagttttgcatgcatgataacaaatgtcagggtaacactctcaagactaggtaataatatcatcatataaacacccaaaactttgggcaaaacagaccacctcagatctatcagtggacactgctgatattactgtgcatcctggaatcatgaagctggggacctggggtagcagtgtatgctgacaaggtttctgtttctacatttattattatttctctactggtgagtactgcagacttcttacagccatgattcaaaccttaacacctgagtcagctagaactaaataacatgcagaatttgagctcaattcgtctcatgggggtgaaatagct

SEQ ID NO: 337976 - DNA, 177 bp, Homo sapiens
ctgtattcccacctaacttgggaggctgaggcaagagggtcacttgagttcagtttcattgcactctaggcaacatgatgaaaccctgttcctaaaatataaaataaaaatcaattttgtacactggatgggatctgtgaaaaataagtacattttaaaaatattaatctatagcta

SEQ ID NO: 337977 - DNA, 300 bp, Homo sapiens
ttcgccttccttctcctttttgattaatatttataattagaattgatcaaaaatacgggtcatgttcacagactagaaccacgcccgtgaggatagctctgtgaccgggccatggggaacacacacagacagcagcttccccagaatcccccgagggcccacagccccgacctggctctttcctccctgattttcccccaaagggtgcaacaattcctgttttcccagctctgcaatctttcccatctatcaaatgggagttaagatgcaattacttatttatgaatgaaattagaagag

SEQ ID NO: 337978 - DNA, 180 bp, Homo sapiens
tgtcacagttttcaccatctaacaaataaaatagcttgtatacagcagagtcacagtcaacctgacataaaaggaaatgtcaatgaaaagtaaacctttgtatgtgttgctgctaagattttggggcttttgttactgtagcataacctagcgaaagctcagcgagacagcctgtagaat

SEQ ID NO: 337979 - DNA, 349 bp, Homo sapiens
aaagcttcataacactggatttggcaatgatttattagatatgatgcccaaatcacaagcaacaagcaaaaaaatacagcatcaaaagatactactgatagagtgaaaagaaccagcgggcatgatggctcaggcctgtcatcccagtgctttgggaggccgaggcaggtcctagtttgagaagttgcaagtagcaagagagatcagatggttactgtgtctgtgcagaaagaagtagacataggagactccattgtgttatgtactaagaaaaattcttcggccttgagattctgttaatctataaccttacccccaaccctgtgctattgacacttctaaaactagg

SEQ ID NO: 337980 - DNA, 488 bp, Homo sapiens
agtaatcagagaaagccgcatgaagaataaattaataagtatttattgaatgtctaccatgaaccagggagtaggtgatgtgctgagaagacaaagatattgtccttgtctctctatgatcttactgttaaatggaggaaacatattggcaaactgacagttactgtctattgtagggagggctatcatatagataaatgctgatgctgtggtagtgaagaggagtacccagtatagccagagtgagaaagtgtccaggaaggcatccaagagtaagtgaaacctgaactgttacctaaaggatgtgggaccctgagcaaaaagtttggggaaagagcattctgggcagcatgaacagaagtaaggggatgagcaagcttgagagggggaatattgggcattgataaggttggagcataggatgtgagggaaggagagatgagatgagatagggagagggggcagggactgcttcagttgtcgactgg

SEQ ID NO: 337981 - DNA, 204 bp, Homo sapiens
aaaaacaaaaaacaaaccaacaaaaaaacctactttctagggttgctaggaaccagtagctatccaaaaggaaatgccagatttatagcttccttttccttcggcattagtgctaagatatccttactggctcttactctcgccatctcaaccatcagtcatgcatttaaaaggatattttctatctgtctatccatctatcaa

SEQ ID NO: 337982 - DNA, 136 bp, Homo sapiens
cagtttacattttattctaatcacaatgagaattcattagaaagttttaaacaagaagagtaatatctaatttaagtttttaaaagattgttctggccaggcacaggggctcatgcctgtaatcccggtactttgg

SEQ ID NO: 337983 - DNA, 500 bp, Homo sapiens
acagttcccttcataaagacagtacatgactggctattcttagataaaaaccagcaaaaacatggggacagccactaagcatcccaggttttctagggcatttaaaaaactttgtcctaacttccccacggtgaaagatatgcctctcatttgaggcctgctagttgaggatgcccgctgtagtggacactgtcggtgccggaccccgccccctttaccatgcttctgtacccattcccctgtgtgctgggatcatctgcacctgcccccatctccagaaaagtggccaaatgggaactgcttctcccaggagactatgacatcttaacgccaacagcccaccttgcagcagacctcaccactgcttgactggcacaggggtgctaaaggccaccctgctggctgtgcagtgaagctgcgctccagggctccctgtggaatcagcctgaagcgagtctccagccgaggctacatccatgctcagccccttcccttgcaat

SEQ ID NO: 337984 - DNA, 386 bp, Homo sapiens
gagtgggttgatatggaacagtgggctgactagtgggggcagggcagccttcgagttacaagtgaatcccaaggccttggaacaggcagcaacctgtggggtatgtgaagcccagaggggtatgtttgggagggagatcgtgagtgtgtgtgaaaaggggtgctgtctctaaggattggagcatgggagtgcgagacccaagttaagagtcccgagatcgcagagttaagagacctgagaactggtggtggagtgggagggcaaggcgcgatggactaggaggaggcactggtgggttggaggcgcctccgactggagcaactggaacaagagggctggtgagggcgccgcgagacccagggcagggtgcacagaccaggtaggcg

SEQ ID NO: 337985 - DNA, 375 bp, Homo sapiens
aaaactttgtgcatattcattaagcaatttctctatgtcaggcattgctccagatattggtgatacatcaattaaaaagatgctaatctctgcactggtgaagattttattttatctagaagttaaagacttccagagatttttttcattatatatgtgtatgatatttagtcataaaacattctgtaaaactccacaaaataaatgttctcaatctcagggtctcctcttctactatttgggttaatagactaataattttttctttttcttttttcaatcttaggaagatatttttccctcaatgtttaccatccttttaaaactgtagaaggttaattatacccatctccccatagcctatgttgaaacatg

SEQ ID NO: 337986 - DNA, 268 bp, Homo sapiens
gcaaattcgtgatttaacttaagggcaaagagaaggaatagttttcaggacatcatgggggaaatatagatagtcaagagaaaagatttctgtaccctcatttttctttccctgttctctaagctaccccctgatgccctaaggatgaaaagctagagctgctgggattggtacttttggaccgtgattaattgtctagtgaatcctgtcttgggagagcctatcctaaattcaccactgactttttctactcttacagcctacctgg

SEQ ID NO: 337987 - DNA, 328 bp, Homo sapiens
accgagaaaaagtaaaaatgttacgaaagactatatagaggctattcactatactaatagcatgatctcatttttataaaaacccaaaactatactgcatatatgcatatatctttcctaaagaagattaacgaggacacacaattttctatatatatcttttattttacactagcatcactttttgtttttattaaagagaattttaaagagaccagatatacacatatatatctgtttcgataacacaaagcaccttctaggcacacaatatttagaaaagaaattctctgcgtattgtttcttgggaaggtaggaagggtgagca

SEQ ID NO: 337988 - DNA, 227 bp, Homo sapiens
gttagctgtggacttttaatatatggactttattgtgttgaggtaagttccatctatgcctattttgctgagcattttaattataagtgaatgttaaataatgctctttctgcatctattgagatgattatgtgtgtttttttcctttcattttgttattgtgttgtatcacattgattgtttgagtatactcaaacaatcaatgtgatacaacacaataacaaaat

SEQ ID NO: 337989 - DNA, 392 bp, Homo sapiens
acaacagttcatcaaggacatatgtataaaggttataaaccatattgttgatatgaattctagaataggattgcactgttatccctggggaaacttgtgttgatctaagtttgggtcagttaatgatactggtatattctgactggctaagtctaagttaaatcattccagagttttttttgtgtgtgtgctctcaggtctccccaactaaaaattattattcattcacttttgagttattggtaactaatttccataccaattttgttgaccagaatgcacaagagtaagaggatgagtgtattggtgcaggcttgagggggccaccattggatcttggcaggaaaggaaagaatatgaagctagaggttgggtgatggtaggggaagagc

SEQ ID NO: 337990 - DNA, 445 bp, Homo sapiens
tgcttctggcatatacgtgcaaaatctggcagctcctttttggttacatgcttggcaaccccatagccagcggggtggcaaggagtggtggcaccagggagatctcaatggctgttccagctgtaacctcaggttggggtcaggagtgggattctggtgtgtgggagggacctgctaagaacctgtcagagccctcagccttggaggagctatagtgcagacaggttgccacagcagaaacctagggatcagaaatagcagcagctcgcccatcagaactgcatcctggctaggctggccacaacatgacataaggtcaagccagcctgccagcgtagaggttctgcacagggagagggctacctccctgaagagcatctctttaggagcactacagtatcccaagaagtttcattgacccttgtattcatttcctagggctgcc

SEQ ID NO: 337991 - DNA, 171 bp, Homo sapiens
gaatgtttcagatgttcatttacttcagaaactttcaggtactaaatacggggtagctgggaaagggcatcatctgagttagacatgagactcggcttcagcccacactgctaaggagatgactcaatgtgaaagccttgtggcctgcagctgtgtgattgtcccagggcc

SEQ ID NO: 337992 - DNA, 298 bp, Homo sapiens
ctcacaggtgagggaaattggagcgagctgggctgcactgcagcaccctagcctgttctgaagtgctctggtattaagtgatcccaggtggagctgaggttaaaaaactttgtgtactgggggaatcttggaagaacacccagggcacacacggttttcccacttgagtatacagagcccaaatacatttctaaaagttacctaaagctttcttatctgaaacatcccatttaccctgagttgttttgagcattagaactaggagatgagtcaacaatgtggcaaaaatcagcctgct

SEQ ID NO: 337993 - DNA, 518 bp, Homo sapiens
ccctctccacctccgagccctgacctcctcctcctcctccttactcctcacttcatcctcacagtggtatcttaggtgctcaagccgtcccccatcctgtgagcttctgagcctgggcctcactccttactccacacccccagaggactggcccacaatctttgagggtgttccaggactaagtttggaaaaggacatgataaaaatgaaaggaatgagagaagaaggaagggagaaacagaccaacagacagagagagagagggcgagggaaggctctgcctcaagccaacccagcctcagtcgtggtatacttccccgaattccttcccgcagcaccactctgtgcttagaaccaagagctaggagagcaagggagcctgggactggcacttttcagctagggggagctggtggtggcagggcagagaggcccattgcgcagctggtaacaggctgtgcctggccaggcctcccagctgcccctctgtctcaggcccttattgcacacaacatcca

SEQ ID NO: 337994 - DNA, 1093 bp, Homo sapiens
ggaaatctgaatcctgaccagttgttcctgtatgtgcagcatccagttctctccgagacaaggtactcctggagtcctcttgaaatgccagtttctcttgccttgcaccacaatccagtagattagatgccttcacgtccagcacaccttctgcaagcttattactacagtccgtgtagacgatgtctaccataccttctgtggactcatcacaaccagacatcttgacaaaggctcctttcaaattgcatttctttggactaccacaaggtagtgagttattactgcctgagctgaccagcagatccttttggttgtggtttacctccccgtgaggctcggtgacagtctctctctggtcactacttagcatctccttggctgactgaccttcacttttgcattcatctggtctgttttggttactctgacagtcaaggacttcatctgccttctgatcgagtgtttcaactgattttacatttttaaaactggagaacataacagtaggagactggtccaacactttttcaggacctggaatgtttacagtctggtttagttcttgtatagcatgatcagagatgttatacttacaaaatacagtttctttggatacatcctgctcctttccttccagcccttcctcactgagtttgatgctactggaggtgtgaatggttttgtttgaaattccactatttaacaagcctgctaccattttgtttctgatcttatctcctggaaggctgccattcgtttctttcccatcaagttccctttcctgtgatgtgtaactcactttacagctgcttttttccacagagtgtcctgttccttggcagcagtgatcacggtgctgaaatgcattttcatattttgttatcaaagagttatcaacttgcaggctgattttgctggacttgaaagcagcagaagcagaacacatgttttcctgggatacattttttcttacacgatgacagctagagatatcctgagattgaacgctgtgacattctatgacagagaccacttgaggaaagccagctgcttctctcttatttgagcgcagcctggaatgtagagcttt

SEQ ID NO: 337995 - DNA, 433 bp, Homo sapiens
gtctgcatgcacgtgtcttctctggtggtgtctgcttcaaatattctgcccgtcttttcacatggattttttttcttactgctgagttttaaggttcctttgtgtatctcagagacaagtcctttctcaggcatgtctcctagtctgtggcttgtcttctcattcccttaacggtgtcttctgagagcagagtttcgaacgttttgatgaagtctagttcatccattttttccactataggccatgttttgttgccatttctaagaaatcttcgcctaaccccaggtcacagagatcttctctttggtgttcttctagaagttttagtttcataattaggaccgtcatctattttgagttagttttgtatatagtgtgcagtatagaccaaagtgcattttaatttgcacagggatcaccagttgctccagct

SEQ ID NO: 337996 - DNA, 379 bp, Homo sapiens
gggtgcctccccgggtgcctccccgggtgcctccgttaccaccaaaacctccagcgccacggtttctagtcatgccacctctgtttacgctctgtgcaggtgtctgttatgtatcaatctgtgatgtgacaagctgaatgttcacagggcggccagccagaggggtgccgtagtactgcttcatggccttcagggcgtgtgccttccgctcaaagcgcatgtctgctgatcctaagctgcggccagagccatcgtagtgcacagccgccttcttcagcgttccaaattctgcagagttcccaaatatcagtgtctgatacttcaaaacctagattggacaccagcagtttcccacccgtctccacgccggcaccactgc

SEQ ID NO: 337997 - DNA, 415 bp, Homo sapiens
ggggctggagacggggcaggggccagtctacagggtggaaagagcccccattctgactgtggaagtgacccccagactgctcggtggacttaatggaactgctcaggctaaaaggcatccctttctcctgggatctgcttccttgacccttcaggagtctgatttggtggtttcctttgcctctcagccccgctattcatatggaggagaaaaagggagagaagagctgtgaatcttgtctgtttaccatggttaggagaagacaaaaaaaatcatctctcccctggccctacctttagtcaggattccacctagaagccttcagagcatgggaatccattgagctcaaagatcctgtgatagggaggattcaggaggttctccttgaggaccccgaactttctatttctgcgtg

SEQ ID NO: 337998 - DNA, 378 bp, Homo sapiens
gctctcatcccaaaccctacaaatcatcaaactgggactcagctgtgactgactggctgttctctggactttttaagtgtctgtctcacattatgtaactccagtacaggagctgctctctctcccagcccatttcagttgtcaattcttccatgttcataggactcctttgtgatcaggatatctggagtgaggagccaggggaatattcctggttggcaaggaaaagagggccttaaacataaatcccagaaggacactgttgatcacttatgcacaggggtctgttaataagcaaagagtggctatggacaagaggatttcctcaaagcaccccacagggaaggaccttgacaatttgtagtcatacttgaaaga

SEQ ID NO: 337999 - DNA, 109 bp, Homo sapiens
cactggtctggcctcctttggccacagctgcaccacacttccaccttctctccagtggtgagacctccttgcccttcagaacagtcagagaaaactagaagcctgccca

SEQ ID NO: 338000 - DNA, 341 bp, Homo sapiens
ccagcgtctgtaacagaggaagttaggcagtatgagggaaaaaaaaaatcaatcacgggagagagcggaagagatctaccaccttatccatcttcttgactgtacagtctccagagcatttccattaatgggcaagaaacatcccagtgcattgtacacctgttatttgtaaactcttgtgacatgaataatgctttcctcacaatctgttctactgaactttacttttttctaatagttctgccaagtttgagatctgcaattttagctaccatgatgttccactgctttttctacctacacagtcccacacagactgtgctgaaaatcaagaagaaaca

SEQ ID NO: 338001 - DNA, 437 bp, Homo sapiens
ctcgcgaacgtatatccaagtatctacctcacgggattactgtgaatattaaatgaggtgatacttgggaaaacacataggaagggcttagtaattgcttattattattactgatcccttacattgccataatgtggagccaggtacatagtaggtaatcactgaatctttgtcaactagttgcagggttgttgctaaggatgtcaggttttgacttgaaagtacacctgtatttaaagagtggggtcatctgaggtaactccaagactagaaaaacatttctaatcctcaatcctgtaaaacacttcaaaatggcatttgttcacctctaagatctaccctagctctaatagtccatgaaatcatgatgctgaattacataaaacaaggggattaatgtgaacaatacagaaaaaatgttgaccaatagcatggat

SEQ ID NO: 338002 - DNA, 386 bp, Homo sapiens
tctatcacctatgctggagtgcagtggtccaaacacggctcactgcggcctcaacctcccaggctcaagcagtcctcctgtctcagtcttccaagtagctgggtccacaagtgtgcgcctggctaatttttaaaatattttttgtagagatggggtctcaccatgttgcccatgctggtctcaaactcctggcctcaagcatttctcctgcctctcgaagtgtcgggataataggtgtgagccactgcacctggccacacatgagtttttgagcaataggaaatatatatacatatatgtataaacatgtatacacacacacatacataaaactaaaactgtgtatctcagattttccatctaaaactggtctggactagggatct

SEQ ID NO: 338003 - DNA, 338 bp, Homo sapiens
aaaaacactaaaaatcttcatatcctttgccctattaagtcctctttggagaatttctaataatctcaaatgcagtttttaaaaaactttattcacaaaaataatggtgactaagctcaacataaaattattactaatagcagatgcttggaagcaacctaaaaagtttaatgctgcagaaatgatataaattattttctgctcacataccagaaattttaattacatggaaaaatgcagactacaatgtgaaatgaaaaagaaaattcaaaattacagatttggtatgatctcttatctaattgatatacatgaaatcttaagactgaaaggaaata

SEQ ID NO: 338004 - DNA, 354 bp, Homo sapiens
ctgctccatgaaagcccattttggatgccctcacccccggaaacacaggctctctgaggacagtctgtgtcctgaatatatctctgcagcctccagggatgcccagtgccaggcacaaggcaagagctcattaaacgtgtgccaagtcactggatgccctcctctgaacacattaacatttctgaaagccccaagcactgtctagacatctctctggggccactcatcttgccttgaatcataattctgcctgcccttcttagtagggagctcctcagagggggctcccagggcccataccccacgtgtgccccagccctgtagcccacttggctcaggaatcacaaacgcaaa

SEQ ID NO: 338005 - DNA, 597 bp, Homo sapiens
cagcctcagcctcctgggctccagcagtcctcccacctcagcctccggaatagctggaacatgccatcacgcctggctactttgtgtcatttttttgtaaaaataggattttcccatgttgcccagactggtctgaaacttttggactcaagcagtcctctcacctcggcctcccaagtgctgggattgtagacatgagccgctacacctggcccagccttactttaaaaaataaattctgaaactgactgcttctcaccaacttccctggcaccattgtggctaagccactgtcatattttcctgattatctcaccagacccctggagatctccacccagcagccagacggacgctatttaacaccaaggtcaggtcatgtccttcccctgctcaaaaccctacagtgctttcccaggacaagcccaagtctttaaatggcctaccaggccccacacaatcgggcccttggctacctccagatctcatcaccaccagtctcctcacattcactggacttcagccacactggcatttttcctgttcctggagcacctcaagcgtgttcctgcctctgggcctttgcacttgttccca

SEQ ID NO: 338006 - DNA, 296 bp, Homo sapiens
agactctggacctaactgaggttaagtaacttgcctgccttcagaactggaattaaacccaggtctgtgactgcaaaggctctgcttttctttttcccctcagaaatacacaaagacggcacccacttctgcacacccatggctgaccctgcagctgtgtgtacacatgcaactgacttcaatgtctatcatcactagttttcatggtcacaggtgtgcatgccataagcctcaacccccacagccatatgaggtgaccctgacttccaccatggccatcactactgtacatggac

SEQ ID NO: 338007 - DNA, 701 bp, Homo sapiens
tactggtataataataggcgcatagaccaatggaacagaatagagaacccagaaataaacccaaacacagccaactgatcttcgagaaagcaaacaaaaacataaagtggggaaaggacacccttttcaacaaatagtgctgggataactggctagccacatgtaagagaatgaaactggatcctcatctctcaccttatacaaaaatcaactcaagatggattaaagacttaaatctaagacctgaaactgtacaaattctagaagataacattagaaaaacccttctagacattggcttaggcaaggatttcatgaccagtgtgtgtctgtagtttgagctactcagaaagccgaggcaggaagattgcttgagcctaggaggggaggctgcagtgaggtatgatcggaccactgcactccagcgtgggcgacagagcaaaactctgtctccaaaaacaaaaacaaaaacaaggccaggcgtggtggctcacacctgtaatcccagcactttgggaggccgaggtgggtggatcacctgcggtcaggagttcgagaccagcctggccaacatggtgaaaccccatatctactaaaaatacaaaaattagccgggcatggtggcaggcgcctgtaatcccagctactcactcactgtctggatactatagctgaaactggcccattctggcactgtttgg

SEQ ID NO: 338008 - DNA, 287 bp, Homo sapiens
ttcttcctcgttagaaattttggtggttgttttgtcaatagcttactattgtaagtagtatttgcatgaacatctttatgaacaaattccccccatatttctgatcatttacttggatacatgaacaggcttattttaagttacctattattgtacagcaactgtttctgtacttagtaacacatatttaataagtattaatactgtgcaaggcattgatggagaaatgattgagcttgatccttgccttctctagtagctcagcttctagctggggaataagatag

SEQ ID NO: 338009 - DNA, 998 bp, Homo sapiens
tgagtcatgagggcctccctcacggatgggattagtgcccttataaaagggctggaggaaactagctaggccacttttgccctcccgccccttccactaagtgaggccagaacgtagcaaccagacaccatcttggaagcagagagcattctcatcagtcgccagacctgctggtgctgtgatcttgaacttccaacctccagaattgtaagcaatgtatttgtgctgtttataaattacccagtctaagggattttgttagcagcataaacagaccaagacactctctctcagtttcttggctctctctccgttggcctcattttctcctgcaaatgaacctcgtccatttggccagcaggagggaggatgtggctgcaggccaccaggctaacagcccctcaggtcaacaacacccccatggaacctcttcctctcttcagcgtgtgtcatacgtgtacacacatgcatacacacatacaggaagcactctatctttacatagtgaagcttgtggtcatcattttatttcctcgtgagctgcaatggtaagaattccctgaaaattcccccactggcaggccacagcgtgcttaaacaacatcaaatccaacgcatctcactgtatcactgaactatagttagaggttttgttttgaaaattagttgacaacttcagcgcttttgtcatttttatgttcaccagcacaaagatgagcttttaggtgctcaggaagggcaagccaggtgaccgtcttccatgcagcagggactctacttaaattcagtgtttttccaaagcccctttctactccaaaagcacccatcttataatcaatatgctgggagcactcagtttctctccctgcatgaccaagttaatcaacagcagaggctgcattaatcagctttgttgcagtaacaaacacgcccagaacgtgccccagtgctggcatctcaggtggactcaggtggtgcagatcagccacttgtttgct

SEQ ID NO: 338010 - DNA, 535 bp, Homo sapiens
ttctgccactttccttctctctctcttcctctctctctctctctgctatcatttgaataaacatatcgctccagaattcatatactgaaatgtaatggattaagagatggggccttgggcaggtgactgagtcatgagggcctccctcacggatgggattagtgcccttataaaagggctggaggaaactagctaggccacttttgccctcccgccccttccactaagtgaggccagaacgtagcaaccagacaccatcttggaagcagagagcattctcatcagtcgccagacctgctggtgctgtgatcttgaacttccaacctccagaattgtaagcaatgtatttgtgctgtttataaattacccagtctaagggattttgttagcagcataaacagaccaagacactctctctcagtttcttggctctctctccgttggcctcattttctcctgcaaatgaacctcgtccatttggccagcaggagggaggatgtggctgcaggccaccaggctaacagcccctcaggtc

SEQ ID NO: 338011 - DNA, 318 bp, Homo sapiens
ccccctaggtttctcccatctccgtaagatcttgaggaccttcaacagcacttcagcaaaaaacattttcatggtttcctcaggtaattcgttcaaccaaccaaccatcccttagataaataaatatttctcaaattctcctaagaataagacactatgctgggtgctggggaatctggctgactttaagcaactacatttcttggctttatttcttgtgggccgtgggcttcaattttctcccccaaagtttttgttgtatcctctctccccattgttagctgtggaccttgggtaggttacctaaaacactgatgt

SEQ ID NO: 338012 - DNA, 469 bp, Homo sapiens
tgctgtttgccagtgaatgctgattagccaggtataccagtccaaaatataacgaaaagcaatgatctttttagcagcttgtgggggaaaagtcagaagagtacttaccctcagctcccctaatccctgggcacagtacccatcacttttcctccttgtctggaaagctctcagctctcctgttctctctcatcattccctcagtgcccctaagctccctgttggattaccttctgcatctgtctcctccagtgtaccactgaggctgccaactgggacttgtggatctcacacccctaagtagaggatctgccaaaggctgctgatcatctttacgttactcagtttttgaatcaatgacagtaccatcatttcacgaaggctgcccacagtcccaggaagcaaatgtacaccatacacaaaagaaatatgcctggtgcggtgactcatgcctgtaatcccagcactt

SEQ ID NO: 338013 - DNA, 949 bp, Homo sapiens
gaaaaaatgggatgatatatccaaatttctgaaagaaaagaaaaaatatcggtcaaaaatactatgcacagcaaaccaatccatcagaaattaggtagaaatagccagccacagtggctcatgcctataatcccagtattttaggatgctgaggcaggcgaattacttgaggtcaggagttcaagaccagcctggccaacatggtgaaaccccatctctacaaaaatacaaaaattaaccaggcatggtggcatgcgcctgtaatcccagctgctccagaggctgagacaggagaatcgcttgaacctgggaggtggaggctgcagtgagccaagatcatgccactgcactccagcatgggcaagagagtgaaactccacttaaaaaaaaaaaagaaagagaaaaattaggtagaaataaaggtgtgtctcaggcaagcaaaaattaagggaatttatcaccactacaccagcctttcaagaaatgatcaagggaatgctatatcgggaaataagaagacaataatcaccattatgtaaccacataaaagtataagactcactggtagagcagataggcaaagaaaaaagagaaaaaaaaaatcaaatcttatcactacagaaaaccaccaaaatacaatgataaaaaataagagatgaagaaaagaacaaaggatatacaaaacattctgaaaaccacaaaatgaaaggagtcttcacttaaaaataataaccttgaggtaaacagattaaattcctaccttaaaagatatatactaaatgggtttttaaaatgacccaactatatgctacctataagaaactcacttcacctctaaagacacaaatatggccaggcgcagtgactcacacctgtaatcccagcactttgggaggctgaggcgggtggatcacctgaggtcagttcgagaccagcctggccaacatag

SEQ ID NO: 338014 - DNA, 439 bp, Homo sapiens
tgaggacaggatccacgtgtcttactcacacctactgattctgtttgtggaatgtcatcatcctcttaagacacagatgaacatcttagataaatttccagatggctagtctaccccttgccactcccgcatggagatagacttgggtatatatgttgctacagacctgtacagacacttctgaatatgtttatcatctctatatgggctctttatttctgaccatgcattgaccttgactactttaagaagaggcaggaaatgataagatgaatcaagaagtaaaaaacaaattagaaaaacaaagaggagaggataaagtagaggataaattagagggtttgggggtctctgaaagatgagaaagaggctgattactgcatagattttttttttcttttctgttccaaagccagggtctctgttgtagaactgctga

SEQ ID NO: 338015 - DNA, 766 bp, Homo sapiens
atttctcggactgtctgcagcatcaagatatgggcttcagagcacgtttttagcacccgtgggaaactgttacaacagctgcaatgcagaaatatccaagccctgtgaacccgagcgtggtgtgggttgacgtgttaaacagacgtatagatccctccagagagttgcacagacttctccgcacagtgggaactgcaaaactcttactggtgcagcaaaacgcaaaacatatatactagaatattctgtagttaatcctgtagagaaaacaatggaacttaaatctactaatatttcacttacaaatatgatttcagtagatgagagatttatacacaaaccacatcatcgggaccccccaaaaaactattttgactcaagaagccataatcactgaagagaggtagcctcagcagttaccttgaaggactgatggcaagaactataccttcaaatgctaataaaggccgagaagcactgaaatgggtcatacataaattacatgttaagactgaagaattgacagcttccgccaagaggaagcagaagaacttcgatggcagcggcggcggcagcatttgtagagaattgataatgaaaatgtgaagacaacgtcaagtactccacgtctctccaagcgggcaatatatttattttaaaaatataaatatcttttaagtagaattttttaaagtaggctgatataagaatgtgacattacatcaaaacaaagagatgcatggcttctaaataaaagcgatcacct

SEQ ID NO: 338016 - DNA, 817 bp, Homo sapiens
atttctcggactgtctgcagcatcaagatatgggcttcagagcacgtttttagcacccgtgggaaactgttacaacagctgcaatgcagaaatatccaagccctgtgaacccgagcgtggtgtgggttgacgtgttaaacagacgtatagatccctccagagagttgcacagacttctccgcacagtgggaactgcaaaactcttactggtgcagcaaaacgcaaaacatatatactagaatattctgtagttaatcctgtagagaaaacaatggaacttaaatctactaatatttcacttacaaatatgatttcagtagatgagagatttatacacaaaccacatcatcgggaccccccaaaaaactattttgactcaagaagccataatcactgaagagaggtagcctcagcagttaccttgaaggactgatggcaagaactataccttcaaatgctaataaaggccgagaagcactgaaatgggtcatacataaattacatgttaagactgaagaattgacagcttccgccaagaggaagcagaagaacttcgatggcagcggcggcggcagcatttgtagagaattgataatgaaaatgtgaagacaacgtcaagtactccacgtctctccaagcgggcaatatatttattttaaaaatataaatatcttttaagtagaattttttaaagtaggctgatataagaatgtgacattacatcaaaacaaagagatgcatggcttctaaataaaagcgatcacctgaaattcgtgttgtttgaaatgactgtctgattttgaggattccagtattt

SEQ ID NO: 338017 - DNA, 164 bp, Homo sapiens
tttttattttcataccatttctgaaaacacgtcttggggacgaggataggatgatgacaagaccctgagtttctgggggaggaaacagtgcacaggaggtgaccacacagttcagagcacacccccgctggtgcagctgtgggcaggggctacaggacagagag

SEQ ID NO: 338018 - DNA, 301 bp, Homo sapiens
tcttttctcactcagctggacacatgaaaatataagtgaaggaccttgtaagccatgccaaagggcaggctcttgaggctggagaactacagggcaaggggagataaaagacaatgagaataataatgaaaggaacaggtcatgcggccagtaagcaggtgctgaaggttccagcctcgtccctctgatatcagagcatgtgctttattcagttcactctattgccagccagggaaaacttcttagggcagggtcaccgtgcagtggggctttggaggtcacaaaggtgggttggttgtag

SEQ ID NO: 338019 - DNA, 605 bp, Homo sapiens
accttaaacatttttttccactatcatttttgggattttaggaaaaacaggagttaaagatatgtcttggtcatattaaccagaaatctacttttgattttatgcttaagtgtccctcccattccaggatgtacctaggcatttttctattccttttaagaaatatgtgggcctatatggaaaaaaaagacctagataattttgaagagaaatataagatttgaataaataatgggctataccatattcttggatgaaaagactattacaaaaatgtgagtacctcctaaattagtctactagtttattataatcatggtaatttcagtggagtagagcttttggcaatttcatatggttaaggacaaaaatcagagttcagggcccaccagggaagagggatttcaataaatacttcagacttccagatgaccctcttgaaaagctatacctttgactaaaagggaatcagaaatagttcactcctcacaaagagtagtagataacattatccagaacctcaaagtatttctacaaatatgtgcagtgtctgtctttcattcaaaattatcaggcatgccacgagtgatcaaacaacagagagc

SEQ ID NO: 338020 - DNA, 167 bp, Homo sapiens
tggtcacaggttgctccagctcacccctaactccagttctccagcccaggcctgggttgggatctccacagagcattcctctggctcctctgttgggttaatccccacacctccttctgggaagagcctaaacatcctttcccccaggaagcctcccctttccccta

SEQ ID NO: 338021 - DNA, 151 bp, Homo sapiens
atctccctatcccctgcccataacaacagttttattctctatctctgtatatttggctttttattttagatttcacaaataagcgagataacacaatatttttctttctgcgtctgacttatttcccttagtataacatcctccaggttca

SEQ ID NO: 338022 - DNA, 880 bp, Homo sapiens
gggctgggcctcgctccaccctgccagggaaaccagctgaccaggtttaagggaggaagcgtggcactgctacaaggggggcagtagcaaagagatacaaggctgaggagatgctcctcgaggttgagacgagcatctgttgagcaccaggtactatgctaggctcagggaggtgcaaaggggccagagttgctgcttccaggagctcagagccgggatgatccttacagccaccttagggagtaatggccagaggccatgcagagcatggggagccattctgcttgggcaggtcagggaaaggcacagagaaaagatgacagctgagtttgactgagaaagataaaaatatttctcagttgcagggagagggccaggtattccagagtatcctttcatttcctgcttttgctgcatgcaaataggaagaagccaagaaaagatagtgagggcaaccaaagagttgagagcgatgcaattaccaccttggctactgatccaactcacttttctgctaagaaaagataactatgaggaactgacttcacgctgatacaaaggctaccaggtcctgactagatgctgatagggctgagatcaacagggtcagcttctactcagcctgagatatcatcccagaatagatgaaaatgtagttgagcttttaagaatgaaagagattctgtatgaatgggagggttaaagggagaggagagacagtgggtaaatcaaggagcctgggagactgttcccttcatcaagataaaggtgcttaggatagagaggtagagtgagagtgagagctttgaagccacagttaagaggaatgactcagaagggggagccatggttggagatgacactggcagagaagctagag

SEQ ID NO: 338023 - DNA, 323 bp, Homo sapiens
agagcaacaggaatgataaatagttggataaatatatcacactatttttttgcctcaagtttttttaaaaatatgaatcaccattgagagcaaaagttaaaagactgatgggttttcgaggtaggcagatctaatacatttaataattgcaacatatggaggtggtaaaatgtaaccgatatcattgcaagttttctatgttttcctcgaagtactacaatttcaactctcagtgtactgagaaaagttaagtgtatatattgtcatgcctacagcaacctgtaaaagaattacacaaagagatacagtcaaatgttggtcaa

SEQ ID NO: 338024 - DNA, 986 bp, Homo sapiens
  misc_feature (956)..(956): n is a, c, g, or t
catgtggctatttggtggaagagtgtgccagagacagagaacggcaagtgcaaaggccttgaggtgggtgtgtgcctgcatattgggagactggcagggaggctggtgttgttggagtagggcacgtgtgggtgagggtagtgggttatatgacctgagaacaaagccgggtgtcagacactttggctgtcatgaagactggcttttactttgagggaactgagaaaccactggaggattttgagcaaaggagtgatgtgatctgattaatgtttcatagaatcacactggctgctatattgagactagatgaaagagaatgggggcaagagcaaaagcaaaaactgggagactagttaggaagctattgcagttacccagatgagagatcatggtggcctgtctgaggtggtagcagccaaagcggtgagaagcattcagattctgggtgtattttgaaggtggagatgagaagatttgctgacagatttgaagtgaaagaaagaggaatctggataactccaaggtttattaaaaggatacctactttagagcctaccatgtgctcaggtctgtggggcattcagaaggagcattcacattgcccttcccttcaaggaggctaaactctagctgctggaagaagatttaacatgtggcaatatgctatgggaaaatgtgttgcttagtactccaagtaggccaggcacagtggcacatacctgtaatcctagtactttgggaggccgagggaggaggatcgcttgagcccaggagttcaagatcagcctggacaacatagagagaccctgtctctatgaagaatttaaaaagttagccagacgtggtggtgcacaattatggtctcagctactcaggggactgatttgtgaggattgcctgagcccaggaggtcgaggctgcagggagctgtgatcgtgccactacactccagncctgggtgacagagcaagagcaagaccctc

SEQ ID NO: 338025 - DNA, 296 bp, Homo sapiens
accccatctctactaaaaatataaaaaattagccaggcgtggtgatgcatgcctgtagtcccagctactcaagaggctgagataggaggacctcttgagcctgagaagtcgaggctgcagtgagctgtgattacaccactgcactccagcctggatgacagagtgagaccctgtctcaaaaaaacaaaagtgatcagagaagctgcaccgaaaaggtggcagtcgagtcaagacttgaagaaagtggccatgtggctatttggtggaagagtgtgccagagacagagaacggcaag

SEQ ID NO: 338026 - DNA, 947 bp, Homo sapiens
cattggtacccagaaccataaaccatgttacgtcaccaatacccgactcccatcaaattacttgagggcaagaattgagttttttcttcattaaatgttaaacatagcccaaaatgagacccaattaacatgggacaaggaaaaataccaattgagcaaagatcattttcattaatacatttaaaattccttaaataagacatttaataacaaaattcaacaccttatagaaatttgtacatactctttctgtacaaccagacctgtactagtaagggtctcccaatacctgcagctcttattcaattatatgaaatatttattcaaatattaaatgacaaaccacatatcttaataaaccagtaaccataaagtgctaagaatttgttttcaggctcactgttcatatggggagcaggcgtgtagaagaatggaatgtgtgttcaaggacaatgtacttggccctcgggccttgaccaatgaggctgtgcatgaaaaagagagatgagggtttcacaaaagttgccagtgacgccagggaaatgttacacagctgattttccaagataatgggaactgcagagccagagcagctttcttcaacatgcggaataaccacctgttccttaccttcgcagcatctgagaattttcagcaggcatctccaataagggcaaatgttactaggttgggttaaaactgagctggctccaagataggattaatgcgtgtctaaccaaagattccttctaactttaaatacatccacagggctataccacacccacacactaaaaccctgaagaaatgaaaacccattattatcgaaagaaaatactggccgggcacagtggctcatgcccggctaattttgtatttttagtagagatgggcttcaccatgttggccaggctggtcttgaactcctgacctcaagtgatccaccc

SEQ ID NO: 338027 - DNA, 440 bp, Homo sapiens
acaaaccatatcatcactgtgtatatgtgtgtgtgtgtgagagagagagagaatgaggatattgaagtatagagatggagatgagagattcaatttaagagatacttgtagaaataagaggagatggtcactgaatgtctagtgtgtgaggaagtgaagaattaatacaagttactgatggtgatgtcctggacctagagaagaagtcaggaaaagagttgttggaggaaggagctaatgcatattgtttgggacatatggtaggtacaattgaaccgtagttatatactgtcttgtgttgaaactttgagataattcaggtgctattctttgcttttcttggatcgtacagagattcctttcatgagaaccttcatgagagccctctggacaggcacaggccagagtagagacttgacagttaacattttagacagtag

SEQ ID NO: 338028 - DNA, 357 bp, Homo sapiens
ctgttcacacaacaaatcctacaataaaaaatacatctaaaggaaatactcaattatgtactcaataaatgacatcagcctgtgtcttctgattcacagcagccttactgctttgcttgcttgttttgagagaagggagatcttacaaaacactaaaaactctaccatgttcacccagaggacaagctaatcatgagaattgtaatatgtatttctggtctaaataaagtcttcacatcacacatcccctgttagaacttccaggtatgtgtaggaaaccaaatagtgtgcttacattaagaagtgttttcatgatggtgcatttcctacctcattcctaggtggtttaatttgttt

SEQ ID NO: 338029 - DNA, 449 bp, Homo sapiens
gcaaagactaaaggacactgaaattccactgccactcgtttcctagttccaggtagaactaggaagtgccagtcaccagtttctagtttggagggaacaattcactcctgggagtagagggagaggaaaggaggagtgactcaccagtgtggggaaaagcaagagagatcagattgttactgtgtctgtgtagaaagaagtagacataggagactccattttgttctgtactaagaaaaattcttctgccttgagatgctgttaatctatggccttacccccaaccccttgctctctgaaacatgtgctgtgtcaaactcagggttaaatggattaagggttgtgcaagatgtgctttgttaaacaaatgcttgaaggcagcatgctccttaagagtcatcaccactccctaatctcaagtacccagggacacaaacactgcggaaggc

SEQ ID NO: 338030 - DNA, 750 bp, Homo sapiens
ggcttgcctctgtctgcaccacgctctgctctgcggcaaatgagagacagctgatgtgaacagggaggcaaagaaaggcaacaccaaaaactgagggccactggaaatatgtagaaaatgcaccacttctttcatttcctgcccttccccagccccaagaaacacagtaaaatgaggcgaggtccatctcactaagatcaaggccccagtaacgcacaccctcatccaaaccaagtccctgtctactctgacactgatggatggcaaacttttaacacattttctttgggctgagtagcaaaataatgagcaagcaacaaaatgaaggggtagctgaataaattacattctgacattttctatctcatccaatccttgtctttcaaacaaatgacaactgtatctaagttgatagataacctccttggtacagaaacaaactaatggaagtcatcagtgttgaaagtctaaccagggccgtgacgatggaaggaagaagacgaattccacatgtgataaactcaagcattagaatgagtctatcacatgtggcatcgataaacaccggtgtttatcgatgccacagcttagaactcaaaggacctggcggtgcttcatatccctctagaggagcctgttctgtaatcgataaaccccgatcaacctcaccacctcttgctcagcctatataccgccatcttcagcaaaccctgatgaaggctacaaagtaagcgcaagtacccaccgtaa

SEQ ID NO: 338031 - DNA, 524 bp, Homo sapiens
tacgagaggtcttccagtccattaatcttgtgttaagtttcttggctggaagggtggtttatagaagtggtgccaaacagctgtaaatgcaaggctgagaactatttgtcctcttcctttatttttaagacttcagaaaacaactttcactaaattggtaaataaagttttaggtattattttctgattaatgaaatcaccataaactactacttctagacttccgaatgtcatgattttatttctggtcttattatatttgtgtttctgagtcttaatgagctagaaatgcttataagacaaaagcaatgtgtgttttttcctgcatcagattcttttacaccttatcttgaagtttgcataactgagtcactttctatttttttttaatcactttgataagagaaaaatttatgttagttgcagtccaggaaaaagaaggcacaaacactgctgatcaaatattactaaagcttttatggactcttgaacctcattttccctcccatatgtacacaagacac

SEQ ID NO: 338032 - DNA, 284 bp, Homo sapiens
ggactctgctcagcttgagtcagcagcctatttccagtccagtcactggccagagggaggatgggggacgttgtacacagctctgccatagctgaggggaccagttaatgggttcattgtgagccatcaagatattccaaaaagtgtctagaagacacttctccatgtgactctggactgacctagttctccccccgaccaccatttcttggttgtagttctcaagaataatttttaaatgttctgggaatgcagtatcattagagaggaactgcctgaaacag

SEQ ID NO: 338033 - DNA, 273 bp, Homo sapiens
atgtaatcttgcatcttacaagtacgtggcagctagggaggcagattagtaaaatgactcctttcaaacctttattctctcagacctgggacagcccatggcctgatgagatctcacttcacgagcacaatagctccttaaaaacagatcctcactgtggcccacgagccttgaggattccctgctgcccatttcagcctcttcctcccctttctgcacccaggatctttgcaatgcctgctccctgaaatcaccttctccccactcctgcct

SEQ ID NO: 338034 - DNA, 624 bp, Homo sapiens
ctcccaacttctgacaccaatcaccagctggggttgtcttacccatgtttctaactgactggctataaactaaggttctcactaccccatccttgtgtttgattaatttgctagagtggctcacagaactcagggaaatgcttatatttaccagatgcataaggcaagggatatggaaaggggcacggagcttctgtgccctctctgggtatgccatccttcaggaacctccgcatgtttggctatctagaagctctctgaacccagtccatttgggtttttatgggtgcctcattacacaggcatgatcaacttaagtttcatcctctctctctgccttcctggaattggggatggaggactgaacgtccaaccctctaattatgccttggtctttcctgtgaccagctcccatcctaaaactatatggactgcaagccttattagcatataaaagacactcctattaccctggagattccaagcgttttaagagctttttgccaggaaatgggatgaagaccaaatacatatgtatttcacaatatcacaggtaccccttaggaagttataattgaccaagagatgatggtggtttgggtaaagtagtgacagtgaagatgg

SEQ ID NO: 338035 - DNA, 508 bp, Homo sapiens
gggggtggggaggattttggaatatttgcattattcttaccagttcagcatcctaatccaaaaatctgaaaaccaaaatgctccaatgagcatttcctttgaacatcatgtcggcactcaaaaagtttgagatcttgaagcattttgaattttggatttttggattagggatactcaacctgcatttcaaaaatgtttattgggaactggtcatgggatagacattttcctagtcacgaagtacttaaggatggaagaaaagtggtccttgcccttgagcatctgacagccccaagggagatgtaggattgtaagtaaaccactagatcaatgtgttaagtgctaaaagagaaatatgctaaaaggtgctgggggatcctaacatttatctctgctgaaggcgaagatgttcaataagctagtgggtctagttggttgaataaagccaagagggaagaggaagagtacttcaggtccagggaacagcacaaaggcatgaaggaataag

SEQ ID NO: 338036 - DNA, 585 bp, Homo sapiens
tatcccctggtcccctggactcctttcctacactgaagaaaatgtaagctgaaagtttctattctaaaaaaataaaagatgcttaggtttaatagtatcatccaagagtcaatgtcctgtaagtttcgaaaaccctgaagtaggaattaagtaccaatttcctccagaaattccatgcgcttctccctgctcccttccccatttcaaccaccaaccacaactattccttctccatagtatattcatttgtttgtctgagtttgatgcctgctttcttctttcctaattacttgactttcccttgagcatcagtaacatcaggcctattcaatgtaaagcaaggtaatccccaaactgtttaagcaaatccaaaagatcccaaactctgtgaatctaccccctcaccaccttcttattatgcataatcctttattcacagtgctctcccttggttcattaaaatacctgaacagcttagaaagtcctaaagatgtaaagcagtaatcaaacacccaacatagcagactacctctcataaactcctgaagattctatctgtgatatccaattgacatttcttggaaa

SEQ ID NO: 338037 - DNA, 161 bp, Homo sapiens
ataattataattgttcaatcatttaaaatgttggaaaacacttccattcttctttgtaccactttcaccacacatcaaaactgctcttatatatgtcaccagtgagctccaagttgctaaattcagctttcaattcttttttttttttttttttttttttt

SEQ ID NO: 338038 - DNA, 303 bp, Homo sapiens
tgatcagaatgccatgtcatctagtcgggcacaacaaatgcatgccttttcctggattcggaataccctagaggaacatccggagacttcactgcccaaacaggaagtctatgatgagtacaattcttactacctcaccaaaagaaacataatggagctagaagaaagtctagataaaaatatctgaaatgatcaagagaacaaagttaaactgaaggactctagatttattttctctttacaaaggttaaaactgagagtgcatgtgatccaacttgttcattcattcagtctacaacaatc

SEQ ID NO: 338039 - DNA, 184 bp, Homo sapiens
cttatgagaaatagaaataggaacagaaaaaaatactgcacaaaactgaaaacctttctaacttagtgagcttctcacaataaaacacgcagtgaatagcttgtattgtacaataaaccataacatataaaaatcgcctgccaactgggcatgatagctcacatctatagtcccagttacttca

SEQ ID NO: 338040 - DNA, 346 bp, Homo sapiens
agtgactatgcttcaggcactttcctttgcttcttcttaatgtttgttcgggtgggtacctctgtgcagatgcctataaatgagttcttagggtataggagtaaccacccagtcatcaggccatacttttgtttttaggcaggcttaactcagaaagtagcagcatatgtaattgctaagccaaaacctacctgaaatacttcagaggctaagcccctttcctagccaaatacctaactactagagttgctctctgtcagtaagttgattccttgcctgcacattatcagacctgtttctggagccatctttctccctaaaatgacagctgctacagtttccccca

SEQ ID NO: 338041 - DNA, 231 bp, Homo sapiens
tatgcacgaagtggagaaggactggagggaaacaagataggattgttttgaaagcggcacagtgccactcaggcgtaatctgttttttgaacagtggagggaaacactacacgagttcaaggaaacaagtgctgtttcccatacagtaggtctgatttcccaatcttgccatatttttttaggcatctggttctatttttttttctaatcttgtgcgctttagaggttagt

SEQ ID NO: 338042 - DNA, 361 bp, Homo sapiens
cttcaactttgttaaatcattgtttgttcaatttaaatgtagcacttcatgcccacatcatcatccagcaaccccagatccaaggctggaactgaggcccctgactgcaaacatttacacacatcctcaacctaatttcgtcaaagtagtttgtataacccggttttattaaagggtgattcgtgtaccctgagaacacttctcagtttgtctttcagcctttgttttcacccctaaactgtgctctgtctggtgcagaactccatgctgattctcaagtaccaagcagacacgctttgtgtcactatcgtcatgtcttgctctgtgtcgtgcgattgggatcctaaagagtcgcctcagc

SEQ ID NO: 338043 - DNA, 4768 bp, Homo sapiens
gcttcccggctgccaggctacagaactcgcctcgccactcctgagacatggacaacgccgttgacggactggacaaagcttctatagcaaactcagatggccccacagcaggttcccaaacacctcccttcaaaagaaaggggaaactatccaccattggtaaaatctttaagccttggaaatggaggaaaaagaagaccagcgacaaatttagagaaacctcggcagtattagaaaggaagatatccacacgacaaagtagagaggagctgataagaaggggagtgcttaaggaattgcctgatcaagatggagatgtaacagttaactttgaaaattcaaacgggcacatgatacccatcggagaggaatctacccgagaggaaaatgtagtaaagtctgaagaaggtaatggctctgtatctgaaaaaacaccacctctggaggaacaggcagaagataagaaagagaacactgaaaaccactctgaaacaccggcagctcctgctctacctccttctgctcctcctaagcctagacccaaacctaaacccaaaaaatcacctgtgcctccgaaaggggccactgctggggccagccacaaaggtgatgaagtgcctcccattaaaaaaaataccaaggctcctggtaagcaggcccccgtccctccacccaagccagcaagccgaaacacgacccgagaggctgctggctcctctcattcaaaaaaaacaactggctctaaagcatcagcttcgccatccacttcatccacctcatctcgtcccaaagcttcaaaggagacagtttctagcaaagcagggacagtggggaccaccaagggcaagagaaaaactgacaagcagccaataacttctcacctgtcctcagacacaacaacttctggcacatccgacctgaaaggagagcctgcagagaccagagtggagagtttcaaactcgaacagactgtccctggagctgaggagcagaacacaggcaaattcaagtccatggtccctccaccccctgtggctccagcaccttctcctctggccccccctctccctcttgaggatcagtgcattactgcctcagacactccagttgtcctcgtcagcgttggagctgacctgcccgtctctgccttagacccaagtcagcttctttgggctgaagagccgacgaacagaaccactctctactcaggcactggcttaagtgttaacagagaaaatgcaaaatgtttcacaaccaaagaggagctggggaagacagtgcctcagctactgactcctgggctgatgggcgaatcttcagaatcctttagtgcctcagaagatgaaggccacagggaataccaagccaatgactctgactcggacgggcctatcttgtacaccgatgatgaggacgaagacgaagatgaggatggcagtggagaaagtgctttggcaagtaaaatacgccggagggatactcttgctatcaaacttggcaacagaccatctaagaaagaactagaggacaaaaacatcttgcagcgtacatctgaagaagagaggcaggaaatccgacaacaaattggaaccaagttagtcaggaggctgagccagaggcccacaactgaagaattagagcaaagaaacatcctaaaacaaaagaatgaagaagaggaacaagaagcaaaaatggaacttaaacgcagactcagcagaaagctcagcctgagacccacagtggcagagctacaagctcgaaggatcctgcgatttaacgagtatgtagaagtcacggattctcctgactatgaccgccgagcagacaagccctgggccaggttaacacctgcagacaaggcagcaataaggaaagaactaaatgaatttaaaagcacagaaatggaagttcatgaagagagtcgacagtttacaaggtttcatcgtccataacgaagagtgagactatttggaaacagagactgatcatctttgggggaagccctgcttcctgaaaacctgatattgcactgggatttgaatgtgtgtgtttccgtttaacttgtggtgaaggaagtgtgtgactcagcttggctgggaagtgctcctcacctgtgtggcccagatggctccaacaagcaaaaggaaggatgcagtgactcttgctgcccagaatgcacagcgatggtaagagacaccgtggatattcttcatcagaagctttaatcaaagaagatgagcagaagacaatcactggctccctgttaccagaaagccaaattttataatgcgggtgaaagaaaaatatagattaaaattgctgggcactgaaaaggggtgggagttggaaatcagaaagaaagagaaatatttcattatgttaatgaagaaaagagaaaattgaagcataaatgtatttttgaagtagttattcggtagctgagaacttattaagggatttaggaatttaacctcctgatgtggattcctcaaagacttgatcggagaatactcttgtttcaccattatgttggtacagtatagtaccattattttatgttgtgccagtgaatccagttgccagaaataagtctgaatgttttcatgcatctttttcttaaatgcaagagcttctactgactcttaacaagcatgcttacccaaattttgttgcatgcttttaagtagcattagctatgcacacttgacatttttaaatatccctttcctagtgtaccagccttcacaggataagaggactgggaataaagtcagatgtaatgtgaccctagaaaactgtagcaagcttcagaaataaatcttttgatctttccctatcttgattagatccaaagtcaaagcaaccatacttcacctagagaagacagtattggcaatcatgacacctgtaataaaaacttgaatccaaagtcaaaacttaagcaagatacaaatgtgctgcctgcagttagtcctgcatgggaataaggactagttatttttttagtgctgcatttttttaaagttggattgctgctatttaaaaaaaaaaaaaggacacagatcaaaaaaacacccaaaggcttaacagaacatggaaagttcccactaagttgtgtgtgaggaaatcctcatcttgtattttaagaatctgcagatggcatccatagatacagtacagtatttactgtcaatgcaaaagaatcagtgaggttaaagtagtggaagttttccctatgagcctacagtctgtattgtttacattaagaaactctctattattgtgttgctattttccatggagtcacaggcacactatgacttctgctcccaaatacatatgaccatatgtaaataccaccttgcatttcattgttcttcacaagtgctttgtgcccctttaattaaaaacacatgaaatgaataacaaaacaagacccaaatagagtttattttattctcagagtttggactacaattttctaagatgtttctggttcaagactgtcattttctatttcaaccgaaaagtaagcatttaacccggtgaataaatgtagatcctgccattcattggtattttaaagaaccacttgaaatcggatcattttatttaaaaataaaaaatgttaatgccagttggcctactataaaaagccaggaccatgttagaattaggaaaagtaaccagcattactgcacctcttgttagactctgtgcattaataaaacacacctagagtctgttgtcatttcactaataggataagacaaattttttgctttgaaaaaatttttctgcatgcccaggtgtctgtctctggctgaggttttgtctattttacagtgtttcaatccagccataaaaattaacttgtgattttttttttcccaaagtcatgcttttccttaattatatttttattttattattttagtgtcttgagaaaaataccaagagatataatgtttcttttaattgtctatgcttaatcatctttaaacactttttaaatttctaaccacaagacctctctataatggtaaatgtaagacatcaccattttatcactcaaagtatgttattgaaagtttctatttggttgataaaaggaacaattttttcccacttttgatgcctgtgatgcaattttttattgcctacaatgagatacacttagtacaaaaaatgaaaatctggtatttcaaaattgcatttcttgtataataggtcagatttattaactactcatactttttctttacactaatcgatacatttagaaaaaattttctaagttagagacaagtttaaaagtaaaaaaaaaaaaaaattagccactgctagtctactgtttaggtaatcggaatcaccaattattttattagaatgatggcttgagtaaaaagctgtggaaagaattaaaggattatgagctaagctgtattttgcagaatatggttctattttagtagagcagagatgagacatatccccaccggccacccagccagaggtctcctacctgggggccctaaagggatgcagaggtctggcccaccctccgtgcataggcacctctgtccaccaccagcgtttcagcaatccaaccagtaagcatatgctgtataggaaaaataaaagtgtgtgggaattggatttcttttgttgtaacacaattccaggtttttggctatttaaagtttgacattaggctgacatcgaggaagtaagtgggttttcctgagttcccaagatatgattaagg

SEQ ID NO: 338044 - DNA, 3978 bp, Homo sapiens
  misc_feature (3914)..(3914): n is a, c, g, or t
  misc_feature (3918)..(3918): n is a, c, g, or t
  misc_feature (3926)..(3926): n is a, c, g, or t
  misc_feature (3928)..(3929): n is a, c, g, or t
  misc_feature (3931)..(3931): n is a, c, g, or t
  misc_feature (3939)..(3939): n is a, c, g, or t
ttcataattatcttaaggaatgacttgattcttacttgtgcttgttctttttaaaagtattagaaaggaagatatccacacgacaaagtagagaggagctgataagaaggggagtgcttaaggaattgcctgatcaagatggagatgtaacagttaactttgaaaattcaaacgggcacatgatacccatcggagaggaatctacccgagaggaaaatgtagtaaagtctgaagaaggtaatggctctgtatctgaaaaaacaccacctctggaggaacaggcagaagataagaaagctggctcctctcattcaaaaaaaacaactggctctaaagcatcagcttcgccatccacttcatccacctcatctcgtcccaaagcttcaaaggagacagtttctagcaaagcagggacagtggggaccaccaagggcaagagaaaaactgacaagcagccaataacttctcacctgtcctcagacacaacaacttctggcacatccgacctgaaaggagagcctgcagagaccagagtggagagtttcaaactcgaacagactgtccctggagctgaggagcagaacacaggcaaattcaagtccatggtccctccaccccctgtggctccagcaccttctcctctggccccccctctccctcttgaggatcagtgcattactgcctcagacactccagttgtcctcgtcagcgttggagctgacctgcccgtctctgccttagacccaagtcagcttctttgggctgaagagccgacgaacagaaccactctctactcaggcactggcttaagtgttaacagagaaaatgcaaaatgtttcacaaccaaagaggagctggggaagacagtgcctcagctactgactcctgggctgatgggcgaatcttcagaatcctttagtgcctcagaagatgaaggccacagggaataccaagccaatgactctgactcggacgggcctatcttgtacaccgatgatgaggacgaagacgaagatgaggatggcagtggagaaagtgctttggcaagtaaaatacgccggagggatactcttgctatcaaacttggcaacagaccatctaagaaagaactagaggacaaaaacatcttgcagcgtacatctgaagaagagaggcaggaaatccgacaacaaattggaaccaagttagtcaggaggctgagccagaggcccacaactgaagaattagagcaaagaaacatcctaaaacaaaagaatgaagaagaggaacaagaagcaaaaatggaacttaaacgcagactcagcagaaagctcagcctgagacccacagtggcagagctacaagctcgaaggatcctgcgatttaacgagtatgtagaagtcacggattctcctgactatgaccgccgagcagacaagccctgggccaggttaacacctgcagacaaggcagcaataaggaaagaactaaatgaatttaaaagcacagaaatggaagttcatgaagagagtcgacagtttacaaggtttcatcgtccataacgaagagtgagactatttggaaacagagactgatcatctttgggggaagccctgcttcctgaaaacctgatattgcactgggatttgaatgtgtgtgtttccgtttaacttgtggtgaaggaagtgtgtgactcagcttggctgggaagtgctcctcacctgtgtggcccagatggctccaacaagcaaaaggaaggatgcagtgactcttgctgcccagaatgcacagcgatggtaagagacaccgtggatattcttcatcagaagctttaatcaaagaagatgagcagaagacaatcactggctccctgttaccagaaagccaaattttataatgcgggtgaaagaaaaatatagattaaaattgctgggcactgaaaaggggtgggagttggaaatcagaaagaaagagaaatatttcattatgttaatgaagaaaagagaaaattgaagcataaatgtatttttgaagtagttattcggtagctgagaacttattaagggatttaggaatttaacctcctgatgtggattcctcaaagacttgatcggagaatactcttgtttcaccattatgttggtacagtatagtaccattattttatgttgtgccagtgaatccagttgccagaaataagtctgaatgttttcatgcatctttttcttaaatgcaagagcttctactgactcttaacaagcatgcttacccaaattttgttgcatgcttttaagtagcattagctatgcacacttgacatttttaaatatccctttcctagtgtaccagccttcacaggataagaggactgggaataaagtcagatgtaatgtgaccctagaaaactgtagcaagcttcagaaataaatcttttgatctttccctatcttgattagatccaaagtcaaagcaaccatacttcacctagagaagacagtattggcaatcatgacacctgtaataaaaacttgaatccaaagtcaaaacttaagcaagatacaaatgtgctgcctgcagttagtcctgcatgggaataaggactagttatttttttagtgctgcatttttttaaagttggattgctgctatttaaaaaaaaaaaaaggacacagatcaaaaaaacacccaaaggcttaacagaacatggaaagttcccactaagttgtgtgtgaggaaatcctcatcttgtattttaagaatctgcagatggcatccatagatacagtacagtatttactgtcaatgcaaaagaatcagtgaggttaaagtagtggaagttttccctatgagcctacagtctgtattgtttacattaagaaactctctattattgtgttgctattttccatggagtcacaggcacactatgacttctgctcccaaatacatatgaccatatgtaaataccaccttgcatttcattgttcttcacaagtgctttgtgcccctttaattaaaaacacatgaaatgaataacaaaacaagacccaaatagagtttattttattctcagagtttggactacaattttctaagatgtttctggttcaagactgtcattttctatttcaaccgaaaagtaagcatttaacccggtgaataaatgtagatcctgccattcattggtattttaaagaaccacttgaaatcggatcattttatttaaaaataaaaaatgttaatgccagttggcctactataaaaagccaggaccatgttagaattaggaaaagtaaccagcattactgcacctcttgttagactctgtgcattaataaaacacacctagagtctgttgtcatttcactaataggataagacaaattttttgctttgaaaaaatttttctgcatgcccaggtgtctgtctctggctgaggttttgtctattttacagtgtttcaatccagccataaaaattaacttgtgattttttttttcccaaagtcatgcttttccttaattatatttttattttattattttagtgtcttgagaaaaataccaagagatataatgtttcttttaattgtctatgcttaatcatctttaaacactttttaaatttctaaccacaagacctctctataatggtaaatgtaagacatcaccattttatcactcaaagtatgttattgaaagtttctatttggttgataaaaggaacaattttttcccacttttgatgcctgtgatgcaattttttattgcctacaatgagatacacttagtacaaaaaatgaaaatctggtatttcaaaattgcatttcttgtataataggtcagatttattaactactcatactttttctttacactaatcgatacatttagaaaaaattttctaagttagagacaagtttaaaagtacccacnacancaaaaaananngnggggcgcnaaaaaattaaaacggggcgggcccgagaaggccggtcaa

SEQ ID NO: 338045 - DNA, 3979 bp, Homo sapiens
  misc_feature (3915)..(3915): n is a, c, g, or t
  misc_feature (3919)..(3919): n is a, c, g, or t
  misc_feature (3927)..(3927): n is a, c, g, or t
  misc_feature (3929)..(3930): n is a, c, g, or t
  misc_feature (3932)..(3932): n is a, c, g, or t
  misc_feature (3940)..(3940): n is a, c, g, or t
cggctaagtcaggacgcagtgttatcggccgagggaggaacaggcagaagatagaaagagaacactgaaaaccactctgaaacaccggcagctcctgctctacctccttctgctcctcctaagcctagacccaaacctaaacccaaaaaatcacctgtgcctccgaaaggggccactgctggggccagccacaaaggtgatgaagtgcctcccattaaaaaaaataccaaggctcctggtaagcaggcccccgtccctccacccaagccagcaagccgaaacacgacccgagaggctgctggctcctctcattcaaaaaaaacaactggctctaaagcatcagcttcgccatccacttcatccacctcatctcgtcccaaagcttcaaaggagacagtttctagcaaagcagggacagtggggaccaccaagggcaagagaaaaactgacaagcagccaataacttctcacctgtcctcagacacaacaacttctggcacatccgacctgaaaggagagcctgcagagaccagagtggagagtttcaaactcgaacagactgtccctggagctgaggagcagaacacaggcaaattcaagtccatggtccctccaccccctgtggctccagcaccttctcctctggccccccctctccctcttgaggatcagtgcattactgcctcagacactccagttgtcctcgtcagcgttggagctgacctgcccgtctctgccttagacccaagtcagcttctttgggctgaagagccgacgaacagaaccactctctactcaggcactggcttaagtgttaacagagaaaatgcaaaatgtttcacaaccaaagaggagctggggaagacagtgcctcagctactgactcctgggctgatgggcgaatcttcagaatcctttagtgcctcagaagatgaaggccacagggaataccaagccaatgactctgactcggacgggcctatcttgtacaccgatgatgaggacgaagacgaagatgaggatggcagtggagaaagtgctttggcaagtaaaatacgccggagggatactcttgctatcaaacttggcaacagaccatctaagaaagaactagaggacaaaaacatcttgcagcgtacatctgaagaagagaggcaggaaatccgacaacaaattggaaccaagttagtcaggaggctgagccagaggcccacaactgaagaattagagcaaagaaacatcctaaaacaaaagaatgaagaagaggaacaagaagcaaaaatggaacttaaacgcagactcagcagaaagctcagcctgagacccacagtggcagagctacaagctcgaaggatcctgcgatttaacgagtatgtagaagtcacggattctcctgactatgaccgccgagcagacaagccctgggccaggttaacacctgcagacaaggcagcaataaggaaagaactaaatgaatttaaaagcacagaaatggaagttcatgaagagagtcgacagtttacaaggtttcatcgtccataacgaagagtgagactatttggaaacagagactgatcatctttgggggaagccctgcttcctgaaaacctgatattgcactgggatttgaatgtgtgtgtttccgtttaacttgtggtgaaggaagtgtgtgactcagcttggctgggaagtgctcctcacctgtgtggcccagatggctccaacaagcaaaaggaaggatgcagtgactcttgctgcccagaatgcacagcgatggtaagagacaccgtggatattcttcatcagaagctttaatcaaagaagatgagcagaagacaatcactggctccctgttaccagaaagccaaattttataatgcgggtgaaagaaaaatatagattaaaattgctgggcactgaaaaggggtgggagttggaaatcagaaagaaagagaaatatttcattatgttaatgaagaaaagagaaaattgaagcataaatgtatttttgaagtagttattcggtagctgagaacttattaagggatttaggaatttaacctcctgatgtggattcctcaaagacttgatcggagaatactcttgtttcaccattatgttggtacagtatagtaccattattttatgttgtgccagtgaatccagttgccagaaataagtctgaatgttttcatgcatctttttcttaaatgcaagagcttctactgactcttaacaagcatgcttacccaaattttgttgcatgcttttaagtagcattagctatgcacacttgacatttttaaatatccctttcctagtgtaccagccttcacaggataagaggactgggaataaagtcagatgtaatgtgaccctagaaaactgtagcaagcttcagaaataaatcttttgatctttccctatcttgattagatccaaagtcaaagcaaccatacttcacctagagaagacagtattggcaatcatgacacctgtaataaaaacttgaatccaaagtcaaaacttaagcaagatacaaatgtgctgcctgcagttagtcctgcatgggaataaggactagttatttttttagtgctgcatttttttaaagttggattgctgctatttaaaaaaaaaaaaaggacacagatcaaaaaaacacccaaaggcttaacagaacatggaaagttcccactaagttgtgtgtgaggaaatcctcatcttgtattttaagaatctgcagatggcatccatagatacagtacagtatttactgtcaatgcaaaagaatcagtgaggttaaagtagtggaagttttccctatgagcctacagtctgtattgtttacattaagaaactctctattattgtgttgctattttccatggagtcacaggcacactatgacttctgctcccaaatacatatgaccatatgtaaataccaccttgcatttcattgttcttcacaagtgctttgtgcccctttaattaaaaacacatgaaatgaataacaaaacaagacccaaatagagtttattttattctcagagtttggactacaattttctaagatgtttctggttcaagactgtcattttctatttcaaccgaaaagtaagcatttaacccggtgaataaatgtagatcctgccattcattggtattttaaagaaccacttgaaatcggatcattttatttaaaaataaaaaatgttaatgccagttggcctactataaaaagccaggaccatgttagaattaggaaaagtaaccagcattactgcacctcttgttagactctgtgcattaataaaacacacctagagtctgttgtcatttcactaataggataagacaaattttttgctttgaaaaaatttttctgcatgcccaggtgtctgtctctggctgaggttttgtctattttacagtgtttcaatccagccataaaaattaacttgtgattttttttttcccaaagtcatgcttttccttaattatatttttattttattattttagtgtcttgagaaaaataccaagagatataatgtttcttttaattgtctatgcttaatcatctttaaacactttttaaatttctaaccacaagacctctctataatggtaaatgtaagacatcaccattttatcactcaaagtatgttattgaaagtttctatttggttgataaaaggaacaattttttcccacttttgatgcctgtgatgcaattttttattgcctacaatgagatacacttagtacaaaaaatgaaaatctggtatttcaaaattgcatttcttgtataataggtcagatttattaactactcatactttttctttacactaatcgatacatttagaaaaaattttctaagttagagacaagtttaaaagtacccacnacancaaaaaananngnggggcgcnaaaaaattaaaacggggcgggcccgagaaggccggtcaa

SEQ ID NO: 338046 - DNA, 3444 bp, Homo sapiens
  misc_feature (3380)..(3380): n is a, c, g, or t
  misc_feature (3384)..(3384): n is a, c, g, or t
  misc_feature (3392)..(3392): n is a, c, g, or t
  misc_feature (3394)..(3395): n is a, c, g, or t
  misc_feature (3397)..(3397): n is a, c, g, or t
  misc_feature (3405)..(3405): n is a, c, g, or t
gtgtccatcccccttcgtgcgtccatcccccttcgtgtgtccatcccccttcgtgtgtccatcccccttcgtgtgtccatccccctgtggctccagcaccttctcctctggccccccctctccctcttgaggatcagtgcattactgcctcagacactccagttgtcctcgtcagcgttggagctgacctgcccgtctctgccttagacccaagtcagcttctttgggctgaagagccgacgaacagaaccactctctactcaggcactggcttaagtgttaacagagaaaatgcaaaatgtttcacaaccaaagaggagctggggaagacagtgcctcagctactgactcctgggctgatgggcgaatcttcagaatcctttagtgcctcagaagatgaaggccacagggaataccaagccaatgactctgactcggacgggcctatcttgtacaccgatgatgaggacgaagacgaagatgaggatggcagtggagaaagtgctttggcaagtaaaatacgccggagggatactcttgctatcaaacttggcaacagaccatctaagaaagaactagaggacaaaaacatcttgcagcgtacatctgaagaagagaggcaggaaatccgacaacaaattggaaccaagttagtcaggaggctgagccagaggcccacaactgaagaattagagcaaagaaacatcctaaaacaaaagaatgaagaagaggaacaagaagcaaaaatggaacttaaacgcagactcagcagaaagctcagcctgagacccacagtggcagagctacaagctcgaaggatcctgcgatttaacgagtatgtagaagtcacggattctcctgactatgaccgccgagcagacaagccctgggccaggttaacacctgcagacaaggcagcaataaggaaagaactaaatgaatttaaaagcacagaaatggaagttcatgaagagagtcgacagtttacaaggtttcatcgtccataacgaagagtgagactatttggaaacagagactgatcatctttgggggaagccctgcttcctgaaaacctgatattgcactgggatttgaatgtgtgtgtttccgtttaacttgtggtgaaggaagtgtgtgactcagcttggctgggaagtgctcctcacctgtgtggcccagatggctccaacaagcaaaaggaaggatgcagtgactcttgctgcccagaatgcacagcgatggtaagagacaccgtggatattcttcatcagaagctttaatcaaagaagatgagcagaagacaatcactggctccctgttaccagaaagccaaattttataatgcgggtgaaagaaaaatatagattaaaattgctgggcactgaaaaggggtgggagttggaaatcagaaagaaagagaaatatttcattatgttaatgaagaaaagagaaaattgaagcataaatgtatttttgaagtagttattcggtagctgagaacttattaagggatttaggaatttaacctcctgatgtggattcctcaaagacttgatcggagaatactcttgtttcaccattatgttggtacagtatagtaccattattttatgttgtgccagtgaatccagttgccagaaataagtctgaatgttttcatgcatctttttcttaaatgcaagagcttctactgactcttaacaagcatgcttacccaaattttgttgcatgcttttaagtagcattagctatgcacacttgacatttttaaatatccctttcctagtgtaccagccttcacaggataagaggactgggaataaagtcagatgtaatgtgaccctagaaaactgtagcaagcttcagaaataaatcttttgatctttccctatcttgattagatccaaagtcaaagcaaccatacttcacctagagaagacagtattggcaatcatgacacctgtaataaaaacttgaatccaaagtcaaaacttaagcaagatacaaatgtgctgcctgcagttagtcctgcatgggaataaggactagttatttttttagtgctgcatttttttaaagttggattgctgctatttaaaaaaaaaaaaaggacacagatcaaaaaaacacccaaaggcttaacagaacatggaaagttcccactaagttgtgtgtgaggaaatcctcatcttgtattttaagaatctgcagatggcatccatagatacagtacagtatttactgtcaatgcaaaagaatcagtgaggttaaagtagtggaagttttccctatgagcctacagtctgtattgtttacattaagaaactctctattattgtgttgctattttccatggagtcacaggcacactatgacttctgctcccaaatacatatgaccatatgtaaataccaccttgcatttcattgttcttcacaagtgctttgtgcccctttaattaaaaacacatgaaatgaataacaaaacaagacccaaatagagtttattttattctcagagtttggactacaattttctaagatgtttctggttcaagactgtcattttctatttcaaccgaaaagtaagcatttaacccggtgaataaatgtagatcctgccattcattggtattttaaagaaccacttgaaatcggatcattttatttaaaaataaaaaatgttaatgccagttggcctactataaaaagccaggaccatgttagaattaggaaaagtaaccagcattactgcacctcttgttagactctgtgcattaataaaacacacctagagtctgttgtcatttcactaataggataagacaaattttttgctttgaaaaaatttttctgcatgcccaggtgtctgtctctggctgaggttttgtctattttacagtgtttcaatccagccataaaaattaacttgtgattttttttttcccaaagtcatgcttttccttaattatatttttattttattattttagtgtcttgagaaaaataccaagagatataatgtttcttttaattgtctatgcttaatcatctttaaacactttttaaatttctaaccacaagacctctctataatggtaaatgtaagacatcaccattttatcactcaaagtatgttattgaaagtttctatttggttgataaaaggaacaattttttcccacttttgatgcctgtgatgcaattttttattgcctacaatgagatacacttagtacaaaaaatgaaaatctggtatttcaaaattgcatttcttgtataataggtcagatttattaactactcatactttttctttacactaatcgatacatttagaaaaaattttctaagttagagacaagtttaaaagtacccacnacancaaaaaananngnggggcgcnaaaaaattaaaacggggcgggcccgagaaggccggtcaa

SEQ ID NO: 338047 - DNA, 3465 bp, Homo sapiens
tcctcgagcaggggccgcccgctccgggtccacatctccggctcagttgacggactggacaaagcttctatagcaaactcagatggccccacagcaggttcccaaacacctcccttcaaaagaaaggggaaactatccaccattggtaaaatctttaagccttggaaatggaggaaaaagaagaccagcgacaaatttagagaaacctcggcagtattagaaaggaagatatccacacgacaaagtagagaggagctgataagaaggggagtgcttaaggaattgcctgatcaagatggagatgtaacagttaactttgaaaattcaaacgggcacatgatacccatcggagaggaatctacccgagaggaaaatgtagtaaagtctgaagaaggtaatggctctgtatctgaaaaaacaccacctctggaggaacaggcagaagataagaaagctggctcctctcattcaaaaaaaacaactggctctaaagcatcagcttcgccatccacttcatccacctcatctcgtcccaaagcttcaaaggagacagtttctagcaaagcagggacagtggggaccaccaagggcaagagaaaaactgacaagcagccaataacttctcacctgtcctcagacacaacaacttctggcacatccgacctgaaaggagagcctgcagagaccagagtggagagtttcaaactcgaacagactgtccctggagctgaggagcagaacacaggcaaattcaagtccatggtccctccaccccctgtggctccagcaccttctcctctggccccccctctccctcttgaggatcagtgcattactgcctcagacactccagttgtcctcgtcagcgttggagctgacctgcccgtctctgccttagacccaagtcagcttctttgggctgaagagccgacgaacagaaccactctctactcaggcactggcttaagtgttaacagagaaaatgcaaaatgtttcacaaccaaagaggagctggggaagacagtgcctcagctactgactcctgggctgatgggcgaatcttcagaatcctttagtgcctcagaagatgaaggccacagggaataccaagccaatgactctgactcggacgggcctatcttgtacaccgatgatgaggacgaagacgaagatgaggatggcagtggagaaagtgctttggcaagtaaaatacgccggagggatactcttgctatcaaacttggcaacagaccatctaagaaagaactagaggacaaaaacatcttgcagcgtacatctgaagaagagaggcaggaaatccgacaacaaattggaaccaagttagtcaggaggctgagccagaggcccacaactgaagaattagagcaaagaaacatcctaaaacaaaagaatgaagaagaggaacaagaagcaaaaatggaacttaaacgcagactcagcagaaagctcagcctgagacccacagtggcagagctacaagctcgaaggatcctgcgatttaacgagtatgtagaagtcacggattctcctgactatgaccgccgagcagacaagccctgggccaggttaacacctgcagacaaggcagcaataaggaaagaactaaatgaatttaaaagcacagaaatggaagttcatgaagagagtcgacagtttacaaggtttcatcgtccataacgaagagtgagactatttggaaacagagactgatcatctttgggggaagccctgcttcctgaaaacctgatattgcactgggatttgaatgtgtgtgtttccgtttaacttgtggtgaaggaagtgtgtgactcagcttggctgggaagtgctcctcacctgtgtggcccagatggctccaacaagcaaaaggaaggatgcagtgactcttgctgcccagaatgcacagcgatggtaagagacaccgtggatattcttcatcagaagctttaatcaaagaagatgagcagaagacaatcactggctccctgttaccagaaagccaaattttataatgcgggtgaaagaaaaatatagattaaaattgctgggcactgaaaaggggtgggagttggaaatcagaaagaaagagaaatatttcattatgttaatgaagaaaagagaaaattgaagcataaatgtatttttgaagtagttattcggtagctgagaacttattaagggatttaggaatttaacctcctgatgtggattcctcaaagacttgatcggagaatactcttgtttcaccattatgttggtacagtatagtaccattattttatgttgtgccagtgaatccagttgccagaaataagtctgaatgttttcatgcatctttttcttaaatgcaagagcttctactgactcttaacaagcatgcttacccaaattttgttgcatgcttttaagtagcattagctatgcacacttgacatttttaaatatccctttcctagtgtaccagccttcatcaataaaggtggttatattgtaagcttttagatggtgcttaagaattcttatctttttaaatagcagtattttttttttaagaataaattgtaaggagcaaataaggcagaatgccactctaccctcaggtcaattttatggtatatgaaaatgccagtaatatttgtgccacttgccaactcgggggaggaggggcttttcccttactggatacttttgttatagtttgactatgtcattatgttgtttagagagcctccacaatgagaagttgccactgcagggctaactcgccttcagaaataatcagaatgattcaagggtcaaaccactttcatcccttaaaatatagggactaatatttctttttcttttttttaaaaaaaacatttcttctgtggcttagaaatgtgccagtgtgttcaaaacatttacaccaatttcaccagatttaggacctattaaaaggactatttgcattcttttgttatttcacacttcagttaaagtgataacaatggtaaactgtgatcattatcagactgactgaatgctttctgatttccagtgagtgatctagttctacgtattacacaggtgtaatatctgtgagtgtaaataactggaactgtacactgattaacatgacagtttctcttttgttgttcttatctgtactgtattatagtatgtgggtataaatatctacaagtatacacacatatgtacttgtattccactattgtaacctgaaagaaagactatgtattcccttttttaattccgtactggtatttgtgttatttaaaaagcaaaattctgctctatttagttgtataatattagaggatactttgctgtgcacaattccaagtgccttagaacattgtttagctttcctaagtatatataaatgcatatatgtataaaattgggaaaagttacctcaataaaatcattgggaaatcccca

SEQ ID NO: 338048 - DNA, 3759 bp, Homo sapiens
tcctcgagcaggggccgcccgctccgggtccacatctccggctcagttgacggactggacaaagcttctatagcaaactcagatggccccacagcaggttcccaaacacctcccttcaaaagaaaggggaaactatccaccattggtaaaatctttaagccttggaaatggaggaaaaagaagaccagcgacaaatttagagaaacctcggcagtattagaaaggaagatatccacacgacaaagtagagaggagctgataagaaggggagtgcttaaggaattgcctgatcaagatggagatgtaacagttaactttgaaaattcaaacgggcacatgatacccatcggagaggaatctacccgagaggaaaatgtagtaaagtctgaagaaggtaatggctctgtatctgaaaaaacaccacctctggaggaacaggcagaagataagaaagctggctcctctcattcaaaaaaaacaactggctctaaagcatcagcttcgccatccacttcatccacctcatctcgtcccaaagcttcaaaggagacagtttctagcaaagcagggacagtggggaccaccaagggcaagagaaaaactgacaagcagccaataacttctcacctgtcctcagacacaacaacttctggcacatccgacctgaaaggagagcctgcagagaccagagtggagagtttcaaactcgaacagactgtccctggagctgaggagcagaacacaggcaaattcaagtccatggtccctccaccccctgtggctccagcaccttctcctctggccccccctctccctcttgaggatcagtgcattactgcctcagacactccagttgtcctcgtcagcgttggagctgacctgcccgtctctgccttagacccaagtcagcttctttgggctgaagagccgacgaacagaaccactctctactcaggcactggcttaagtgttaacagagaaaatgcaaaatgtttcacaaccaaagaggagctggggaagacagtgcctcagctactgactcctgggctgatgggcgaatcttcagaatcctttagtgcctcagaagatgaaggccacagggaataccaagccaatgactctgactcggacgggcctatcttgtacaccgatgatgaggacgaagacgaagatgaggatggcagtggagaaagtgctttggcaagtaaaatacgccggagggatactcttgctatcaaacttggcaacagaccatctaagaaagaactagaggacaaaaacatcttgcagcgtacatctgaagaagagaggcaggaaatccgacaacaaattggaaccaagttagtcaggaggctgagccagaggcccacaactgaagaattagagcaaagaaacatcctaaaacaaaagaatgaagaagaggaacaagaagcaaaaatggaacttaaacgcagactcagcagaaagctcagcctgagacccacagtggcagagctacaagctcgaaggatcctgcgatttaacgagtatgtagaagtcacggattctcctgactatgaccgccgagcagacaagccctgggccaggttaacacctgcagacaaggcagcaataaggaaagaactaaatgaatttaaaagcacagaaatggaagttcatgaagagagtcgacagtttacaaggtttcatcgtccataacgaagagtgagactatttggaaacagagactgatcatctttgggggaagccctgcttcctgaaaacctgatattgcactgggatttgaatgtgtgtgtttccgtttaacttgtggtgaaggaagtgtgtgactcagcttggctgggaagtgctcctcacctgtgtggcccagatggctccaacaagcaaaaggaaggatgcagtgactcttgctgcccagaatgcacagcgatggtaagagacaccgtggatattcttcatcagaagctttaatcaaagaagatgagcagaagacaatcactggctccctgttaccagaaagccaaattttataatgcgggtgaaagaaaaatatagattaaaattgctgggcactgaaaaggggtgggagttggaaatcagaaagaaagagaaatatttcattatgttaatgaagaaaagagaaaattgaagcataaatgtatttttgaagtagttattcggtagctgagaacttattaagggatttaggaatttaacctcctgatgtggattcctcaaagacttgatcggagaatactcttgtttcaccattatgttggtacagtatagtaccattattttatgttgtgccagtgaatccagttgccagaaataagtctgaatgttttcatgcatctttttcttaaatgcaagagcttctactgactcttaacaagcatgcttacccaaattttgttgcatgcttttaagtagcattagctatgcacacttgacatttttaaatatccctttcctagtgtaccagccttcatcaataaaggtggttatattgtaagcttttagatggtgcttaagaattcttatctttttaaatagcagtattttttttttaagaataaattgtaaggagcaaataaggcagaatgccactctaccctcaggtcaattttatggtatatgaaaatgccagtaatatttgtgccacttgccaactcgggggaggaggggcttttcccttactggatacttttgttatagtttgactatgtcattatgttgtttagagagcctccacaatgagaagttgccactgcagggctaactcgccttcagaaataatcagaatgattcaagggtcaaaccactttcatcccttaaaatatagggactaatatttctttttcttttttttaaaaaaaacatttcttctgtggcttagaaatgtgccagtgtgttcaaaacatttacaccaatttcaccagatttaggacctattaaaaattcaaacaagtttctttttttttttttttttccggtgtaccagggatttttaaataacggactatttgcattcttttgttatttcacacttcagttaaagtgataacaatggtaaactgtgatcattatcagactgactgaatgctttctgatttccagtgagtgatctagttctacgtattacacaggtgtaatatctgtgagtgtaaataactggaactgtacactgattaacatgacagtttctcttttgttgttcttatctgtactgtattatagtatgtgggtataaatatctacaagtatacacacatatgtacttgtattccactattgtaacctgaaagaaagactatgtattcccttttttaattccgtactggtatttgtgttatttaaaaagcaaaattctgctctatttagttgtataatattagaggatactttgctgtgcacaattccaagtgccttagaacattgtttagctttcctaagtatatataaatgcatatatgtataaaattgggaaaagttacctcaataaaatcattgggaaatccccaaaaaaaaaaaaaaaaaaaaaaaaaaaaaaacaaaaaaaaaaaaaaaagaaaaaaacaaaacaaaaaaagaaaaagaagagaatgagcccaatcaagaagaaaaagaggaaggggagaggagagacacgaaagtagagaagagagaaaggggagaggcgcaaagaaggaggagaaagagagaagaagaggataggagaaggagagaagagaagacagagggatgtaaaaaaaaaac

SEQ ID NO: 338049 - DNA, 1619 bp, Homo sapiens
gccttacaacttttctttagaaccacattattggtcataatccttgttactgtcatgaggattgttgcatgggttaaacacaaacacagactagcaatgcacttgaacaaacctggtggtctttggaaataaatcaccattagatttcacctggttatgctgcatcccataagttccaaatgaatcacctgcttatcctattaacgaagcatttaattcacacacaaatgcttgaatttcccctgtataaatgtagtcatgcgattcaacttttctaataagatttgtgaatgctgcatcatgatgaaaatgtggattaactgtgggttgcatgcctgttgttcatacttcagtgatggtcacacacaaaacaagatgagttttacttaggtgaaacattattaaactgtactaacaatacagaaacatattctctttgtcgctttttatcaccaaaactgaatggcaaatatgtcttgacatcacttggatgaactgtggctagcaaaatggaattaacttagccactataattttttaaaacattaaagtttctaaattgtttttggggccgagtaacgcagagtcaataaaggtggttatattgtaagcttttagatggtgcttaagaattcttatctttttaaatagcagtattttttttttaagaataaattgtaaggagcaaataaggcagaatgccactctaccctcaggtcaattttatggtatatgaaaatgccagtaatatttgtgccacttgccaactcgggggaggaggggcttttcccttactggatacttttgttatagtttgactatgtcattatgttgtttagagagcctccacaatgagaagttgccactgcagggctaactcgccttcagaaataatcagaatgattcaagggtcaaaccactttcatcccttaaaatatagggactaatatttctttttcttttttttaaaaaaaacatttcttctgtggcttagaaatgtgccagtgtgttcaaaacatttacaccaatttcaccagatttaggacctattaaaaattcaaacaagtttctttttttttttttttttccggtgtaccagggatttttaaataacggactatttgcattcttttgttatttcacacttcagttaaagtgataacaatggtaaactgtgatcattatcagactgactgaatgctttctgatttccagtgagtgatctagttctacgtattacacaggtgtaatatctgtgagtgtaaataactggaactgtacactgattaacatgacagtttctcttttgttgttcttatctgtactgtattatagtatgtgggtataaatatctacaagtatacacacatatgtacttgtattccactattgtaacctgaaagaaagactatgtattcccttttttaattccgtactggtatttgtgttatttaaaaagcaaaattctgctctatttagttgtataatattagaggatactttgctgtgcacaattccaagtgccttagaacattgtttagctttcctaagtatatataaatgcatatatgtataaaattgggaaaagttacctcaataaaatcattgggaaatcccca

SEQ ID NO: 338050 - DNA, 1183 bp, Homo sapiens
  misc_feature (25)..(25): n is a, c, g, or t
  misc_feature (1119)..(1119): n is a, c, g, or t
  misc_feature (1123)..(1123): n is a, c, g, or t
  misc_feature (1131)..(1131): n is a, c, g, or t
  misc_feature (1133)..(1134): n is a, c, g, or t
  misc_feature (1136)..(1136): n is a, c, g, or t
  misc_feature (1144)..(1144): n is a, c, g, or t
gctgtctctagaggatccactctcnctactgtatcctacagtctgtattgtttacattaagaaactctctattattgtgttgctattttccatggagtcacaggcacactatgacttctgctcccaaatacatatgaccatatgtaaataccaccttgcatttcattgttcttcacaagtgctttgtgcccctttaattaaaaacacatgaaatgaataacaaaacaagacccaaatagagtttattttattctcagagtttggactacaattttctaagatgtttctggttcaagactgtcattttctatttcaaccgaaaagtaagcatttaacccggtgaataaatgtagatcctgccattcattggtattttaaagaaccacttgaaatcggatcattttatttaaaaataaaaaatgttaatgccagttggcctactataaaaagccaggaccatgttagaattaggaaaagtaaccagcattactgcacctcttgttagactctgtgcattaataaaacacacctagagtctgttgtcatttcactaataggataagacaaattttttgctttgaaaaaatttttctgcatgcccaggtgtctgtctctggctgaggttttgtctattttacagtgtttcaatccagccataaaaattaacttgtgattttttttttcccaaagtcatgcttttccttaattatatttttattttattattttagtgtcttgagaaaaataccaagagatataatgtttcttttaattgtctatgcttaatcatctttaaacactttttaaatttctaaccacaagacctctctataatggtaaatgtaagacatcaccattttatcactcaaagtatgttattgaaagtttctatttggttgataaaaggaacaattttttcccacttttgatgcctgtgatgcaattttttattgcctacaatgagatacacttagtacaaaaaatgaaaatctggtatttcaaaattgcatttcttgtataataggtcagatttattaactactcatactttttctttacactaatcgatacatttagaaaaaattttctaagttagagacaagtttaaaagtacccacnacancaaaaaananngnggggcgcnaaaaaattaaaacggggcgggcccgagaaggccggtcaa

SEQ ID NO: 338051 - DNA, 553 bp, Homo sapiens
tcctcgagcaggggccgcccgctccgggtccacatctccggctcagttgacggactggacaaagcttctatagcaaactcagatggccccacagcaggttcccaaacacctcccttcaaaagaaaggggaaactatccaccattggtaaaatctttaagccttggaaatggaggaaaaagaagaccagcgacaaatttagagaaacctcggcagtattagaaaggaagatatccacacgacaaagtagagaggagctgataagaaggggagtgcttaaggaattgcctgatcaagatggagatgtaacagttaactttgaaaattcaaacgggcacatgatacccatcggagaggaatctacccgagaggaaaatgtagtaaagtctgaagaaggtaatggctctgtatctgaaaaaacaccacctctggaggaacaggcagaagataagaaaggtaaaataaagacaaacccatattatttacttcagtatatagctcaatgtctagaaccagcacttaggctccaactagtgactctaaaaccagcagtct

SEQ ID NO: 338052 - DNA, 451 bp, Homo sapiens
cggatggttctaatttgctcttttaatatgtctcagattttcacacgaaggccagatccagaagtaaatttttatctgaattctggtaaattgtgcttataagcccatgaaatgatcagcaatagagggctttcattagaatatgggcactcctgtggtttttttaagaatacaacaagacatcaggaagcaaaaacgtttaaaattagtaaagcaaaccagtcctacaaaaaaagcatgtgtgtgtgtgtgtgtgtgtgtgtgtgtgtatgtgtgtgtgtgtgtaagatgatcaaccttcctacaaaatattttgacaactttttaacaatgttggttgtgtgtttgatcattatttgttagagtcacatgatcgtggcctgatacacttttctgaatatgaaatcatctatagtaactgtcatcacgactttcctcctttaataaacag

SEQ ID NO: 338053 - DNA, 255 bp, Homo sapiens
tcaagtaccaagcagacacgctttgtgtcactatcgtcatgtcttgctccttgtgtttatatggtgtgtgtctgtatcagtctgcttctgttcactttctcgtttatagagaacactgaaaaccactctgaaacaccggcagctcctgctctacctccttctgctcctcctaagcctagacccaaacctaaacccaaaaaatcacctgtgcctccgaaaggggccactgctggggccagccacaaaggtgatgaa

SEQ ID NO: 338054 - DNA, 4389 bp, Homo sapiens
  misc_feature (4325)..(4325): n is a, c, g, or t
  misc_feature (4329)..(4329): n is a, c, g, or t
  misc_feature (4337)..(4337): n is a, c, g, or t
  misc_feature (4339)..(4340): n is a, c, g, or t
  misc_feature (4342)..(4342): n is a, c, g, or t
  misc_feature (4350)..(4350): n is a, c, g, or t
gcttcccggctgccaggctacagaactcgcctcgccactcctgagacatggacaacgccgttgacggactggacaaagcttctatagcaaactcagatggccccacagcaggttcccaaacacctcccttcaaaagaaaggggaaactatccaccattggtaaaatctttaagccttggaaatggaggaaaaagaagaccagcgacaaatttagagaaacctcggcagtattagaaaggaagatatccacacgacaaagtagagaggagctgataagaaggggagtgcttaaggaattgcctgatcaagatggagatgtaacagttaactttgaaaattcaaacgggcacatgatacccatcggagaggaatctacccgagaggaaaatgtagtaaagtctgaagaaggtaatggctctgtatctgaaaaaacaccacctctggaggaacaggcagaagataagaaagagaacactgaaaaccactctgaaacaccggcagctcctgctctacctccttctgctcctcctaagcctagacccaaacctaaacccaaaaaatcacctgtgcctccgaaaggggccactgctggggccagccacaaaggtgatgaagtgcctcccattaaaaaaaataccaaggctcctggtaagcaggcccccgtccctccacccaagccagcaagccgaaacacgacccgagaggctgctggctcctctcattcaaaaaaaacaactggctctaaagcatcagcttcgccatccacttcatccacctcatctcgtcccaaagcttcaaaggagacagtttctagcaaagcagggacagtggggaccaccaagggcaagagaaaaactgacaagcagccaataacttctcacctgtcctcagacacaacaacttctggcacatccgacctgaaaggagagcctgcagagaccagagtggagagtttcaaactcgaacagactgtccctggagctgaggagcagaacacaggcaaattcaagtccatggtccctccaccccctgtggctccagcaccttctcctctggccccccctctccctcttgaggatcagtgcattactgcctcagacactccagttgtcctcgtcagcgttggagctgacctgcccgtctctgccttagacccaagtcagcttctttgggctgaagagccgacgaacagaaccactctctactcaggcactggcttaagtgttaacagagaaaatgcaaaatgtttcacaaccaaagaggagctggggaagacagtgcctcagctactgactcctgggctgatgggcgaatcttcagaatcctttagtgcctcagaagatgaaggccacagggaataccaagccaatgactctgactcggacgggcctatcttgtacaccgatgatgaggacgaagacgaagatgaggatggcagtggagaaagtgctttggcaagtaaaatacgccggagggatactcttgctatcaaacttggcaacagaccatctaagaaagaactagaggacaaaaacatcttgcagcgtacatctgaagaagagaggcaggaaatccgacaacaaattggaaccaagttagtcaggaggctgagccagaggcccacaactgaagaattagagcaaagaaacatcctaaaacaaaagaatgaagaagaggaacaagaagcaaaaatggaacttaaacgcagactcagcagaaagctcagcctgagacccacagtggcagagctacaagctcgaaggatcctgcgatttaacgagtatgtagaagtcacggattctcctgactatgaccgccgagcagacaagccctgggccaggttaacacctgcagacaaggcagcaataaggaaagaactaaatgaatttaaaagcacagaaatggaagttcatgaagagagtcgacagtttacaaggtttcatcgtccataacgaagagtgagactatttggaaacagagactgatcatctttgggggaagccctgcttcctgaaaacctgatattgcactgggatttgaatgtgtgtgtttccgtttaacttgtggtgaaggaagtgtgtgactcagcttggctgggaagtgctcctcacctgtgtggcccagatggctccaacaagcaaaaggaaggatgcagtgactcttgctgcccagaatgcacagcgatggtaagagacaccgtggatattcttcatcagaagctttaatcaaagaagatgagcagaagacaatcactggctccctgttaccagaaagccaaattttataatgcgggtgaaagaaaaatatagattaaaattgctgggcactgaaaaggggtgggagttggaaatcagaaagaaagagaaatatttcattatgttaatgaagaaaagagaaaattgaagcataaatgtatttttgaagtagttattcggtagctgagaacttattaagggatttaggaatttaacctcctgatgtggattcctcaaagacttgatcggagaatactcttgtttcaccattatgttggtacagtatagtaccattattttatgttgtgccagtgaatccagttgccagaaataagtctgaatgttttcatgcatctttttcttaaatgcaagagcttctactgactcttaacaagcatgcttacccaaattttgttgcatgcttttaagtagcattagctatgcacacttgacatttttaaatatccctttcctagtgtaccagccttcacaggataagaggactgggaataaagtcagatgtaatgtgaccctagaaaactgtagcaagcttcagaaataaatcttttgatctttccctatcttgattagatccaaagtcaaagcaaccatacttcacctagagaagacagtattggcaatcatgacacctgtaataaaaacttgaatccaaagtcaaaacttaagcaagatacaaatgtgctgcctgcagttagtcctgcatgggaataaggactagttatttttttagtgctgcatttttttaaagttggattgctgctatttaaaaaaaaaaaaaggacacagatcaaaaaaacacccaaaggcttaacagaacatggaaagttcccactaagttgtgtgtgaggaaatcctcatcttgtattttaagaatctgcagatggcatccatagatacagtacagtatttactgtcaatgcaaaagaatcagtgaggttaaagtagtggaagttttccctatgagcctacagtctgtattgtttacattaagaaactctctattattgtgttgctattttccatggagtcacaggcacactatgacttctgctcccaaatacatatgaccatatgtaaataccaccttgcatttcattgttcttcacaagtgctttgtgcccctttaattaaaaacacatgaaatgaataacaaaacaagacccaaatagagtttattttattctcagagtttggactacaattttctaagatgtttctggttcaagactgtcattttctatttcaaccgaaaagtaagcatttaacccggtgaataaatgtagatcctgccattcattggtattttaaagaaccacttgaaatcggatcattttatttaaaaataaaaaatgttaatgccagttggcctactataaaaagccaggaccatgttagaattaggaaaagtaaccagcattactgcacctcttgttagactctgtgcattaataaaacacacctagagtctgttgtcatttcactaataggataagacaaattttttgctttgaaaaaatttttctgcatgcccaggtgtctgtctctggctgaggttttgtctattttacagtgtttcaatccagccataaaaattaacttgtgattttttttttcccaaagtcatgcttttccttaattatatttttattttattattttagtgtcttgagaaaaataccaagagatataatgtttcttttaattgtctatgcttaatcatctttaaacactttttaaatttctaaccacaagacctctctataatggtaaatgtaagacatcaccattttatcactcaaagtatgttattgaaagtttctatttggttgataaaaggaacaattttttcccacttttgatgcctgtgatgcaattttttattgcctacaatgagatacacttagtacaaaaaatgaaaatctggtatttcaaaattgcatttcttgtataataggtcagatttattaactactcatactttttctttacactaatcgatacatttagaaaaaattttctaagttagagacaagtttaaaagtacccacnacancaaaaaananngnggggcgcnaaaaaattaaaacggggcgggcccgagaaggccggtcaa

SEQ ID NO: 338055 - DNA, 4135 bp, Homo sapiens
  misc_feature (4071)..(4071): n is a, c, g, or t
  misc_feature (4075)..(4075): n is a, c, g, or t
  misc_feature (4083)..(4083): n is a, c, g, or t
  misc_feature (4085)..(4086): n is a, c, g, or t
  misc_feature (4088)..(4088): n is a, c, g, or t
  misc_feature (4096)..(4096): n is a, c, g, or t
tcctcgagcaggggccgcccgctccgggtccacatctccggctcagttgacggactggacaaagcttctatagcaaactcagatggccccacagcaggttcccaaacacctcccttcaaaagaaaggggaaactatccaccattggtaaaatctttaagccttggaaatggaggaaaaagaagaccagcgacaaatttagagaaacctcggcagtattagaaaggaagatatccacacgacaaagtagagaggagctgataagaaggggagtgcttaaggaattgcctgatcaagatggagatgtaacagttaactttgaaaattcaaacgggcacatgatacccatcggagaggaatctacccgagaggaaaatgtagtaaagtctgaagaaggtaatggctctgtatctgaaaaaacaccacctctggaggaacaggcagaagataagaaagctggctcctctcattcaaaaaaaacaactggctctaaagcatcagcttcgccatccacttcatccacctcatctcgtcccaaagcttcaaaggagacagtttctagcaaagcagggacagtggggaccaccaagggcaagagaaaaactgacaagcagccaataacttctcacctgtcctcagacacaacaacttctggcacatccgacctgaaaggagagcctgcagagaccagagtggagagtttcaaactcgaacagactgtccctggagctgaggagcagaacacaggcaaattcaagtccatggtccctccaccccctgtggctccagcaccttctcctctggccccccctctccctcttgaggatcagtgcattactgcctcagacactccagttgtcctcgtcagcgttggagctgacctgcccgtctctgccttagacccaagtcagcttctttgggctgaagagccgacgaacagaaccactctctactcaggcactggcttaagtgttaacagagaaaatgcaaaatgtttcacaaccaaagaggagctggggaagacagtgcctcagctactgactcctgggctgatgggcgaatcttcagaatcctttagtgcctcagaagatgaaggccacagggaataccaagccaatgactctgactcggacgggcctatcttgtacaccgatgatgaggacgaagacgaagatgaggatggcagtggagaaagtgctttggcaagtaaaatacgccggagggatactcttgctatcaaacttggcaacagaccatctaagaaagaactagaggacaaaaacatcttgcagcgtacatctgaagaagagaggcaggaaatccgacaacaaattggaaccaagttagtcaggaggctgagccagaggcccacaactgaagaattagagcaaagaaacatcctaaaacaaaagaatgaagaagaggaacaagaagcaaaaatggaacttaaacgcagactcagcagaaagctcagcctgagacccacagtggcagagctacaagctcgaaggatcctgcgatttaacgagtatgtagaagtcacggattctcctgactatgaccgccgagcagacaagccctgggccaggttaacacctgcagacaaggcagcaataaggaaagaactaaatgaatttaaaagcacagaaatggaagttcatgaagagagtcgacagtttacaaggtttcatcgtccataacgaagagtgagactatttggaaacagagactgatcatctttgggggaagccctgcttcctgaaaacctgatattgcactgggatttgaatgtgtgtgtttccgtttaacttgtggtgaaggaagtgtgtgactcagcttggctgggaagtgctcctcacctgtgtggcccagatggctccaacaagcaaaaggaaggatgcagtgactcttgctgcccagaatgcacagcgatggtaagagacaccgtggatattcttcatcagaagctttaatcaaagaagatgagcagaagacaatcactggctccctgttaccagaaagccaaattttataatgcgggtgaaagaaaaatatagattaaaattgctgggcactgaaaaggggtgggagttggaaatcagaaagaaagagaaatatttcattatgttaatgaagaaaagagaaaattgaagcataaatgtatttttgaagtagttattcggtagctgagaacttattaagggatttaggaatttaacctcctgatgtggattcctcaaagacttgatcggagaatactcttgtttcaccattatgttggtacagtatagtaccattattttatgttgtgccagtgaatccagttgccagaaataagtctgaatgttttcatgcatctttttcttaaatgcaagagcttctactgactcttaacaagcatgcttacccaaattttgttgcatgcttttaagtagcattagctatgcacacttgacatttttaaatatccctttcctagtgtaccagccttcacaggataagaggactgggaataaagtcagatgtaatgtgaccctagaaaactgtagcaagcttcagaaataaatcttttgatctttccctatcttgattagatccaaagtcaaagcaaccatacttcacctagagaagacagtattggcaatcatgacacctgtaataaaaacttgaatccaaagtcaaaacttaagcaagatacaaatgtgctgcctgcagttagtcctgcatgggaataaggactagttatttttttagtgctgcatttttttaaagttggattgctgctatttaaaaaaaaaaaaaggacacagatcaaaaaaacacccaaaggcttaacagaacatggaaagttcccactaagttgtgtgtgaggaaatcctcatcttgtattttaagaatctgcagatggcatccatagatacagtacagtatttactgtcaatgcaaaagaatcagtgaggttaaagtagtggaagttttccctatgagcctacagtctgtattgtttacattaagaaactctctattattgtgttgctattttccatggagtcacaggcacactatgacttctgctcccaaatacatatgaccatatgtaaataccaccttgcatttcattgttcttcacaagtgctttgtgcccctttaattaaaaacacatgaaatgaataacaaaacaagacccaaatagagtttattttattctcagagtttggactacaattttctaagatgtttctggttcaagactgtcattttctatttcaaccgaaaagtaagcatttaacccggtgaataaatgtagatcctgccattcattggtattttaaagaaccacttgaaatcggatcattttatttaaaaataaaaaatgttaatgccagttggcctactataaaaagccaggaccatgttagaattaggaaaagtaaccagcattactgcacctcttgttagactctgtgcattaataaaacacacctagagtctgttgtcatttcactaataggataagacaaattttttgctttgaaaaaatttttctgcatgcccaggtgtctgtctctggctgaggttttgtctattttacagtgtttcaatccagccataaaaattaacttgtgattttttttttcccaaagtcatgcttttccttaattatatttttattttattattttagtgtcttgagaaaaataccaagagatataatgtttcttttaattgtctatgcttaatcatctttaaacactttttaaatttctaaccacaagacctctctataatggtaaatgtaagacatcaccattttatcactcaaagtatgttattgaaagtttctatttggttgataaaaggaacaattttttcccacttttgatgcctgtgatgcaattttttattgcctacaatgagatacacttagtacaaaaaatgaaaatctggtatttcaaaattgcatttcttgtataataggtcagatttattaactactcatactttttctttacactaatcgatacatttagaaaaaattttctaagttagagacaagtttaaaagtacccacnacancaaaaaananngnggggcgcnaaaaaattaaaacggggcgggcccgagaaggccggtcaa

SEQ ID NO: 338056 - DNA, 4118 bp, Homo sapiens
  misc_feature (4054)..(4054): n is a, c, g, or t
  misc_feature (4058)..(4058): n is a, c, g, or t
  misc_feature (4066)..(4066): n is a, c, g, or t
  misc_feature (4068)..(4069): n is a, c, g, or t
  misc_feature (4071)..(4071): n is a, c, g, or t
  misc_feature (4079)..(4079): n is a, c, g, or t
cggggtagaaggtgaggggacccggcgggccgctcggcacaggccgggacatgaacgcctggaagtctggctgggagcggacccatgatcgaaggaccaaaggagccgcttgatcgctggacctggccctgcgaccccagtcatgggccagacctcggtgtccacgctgtccccgcagcccggcagcgttgacggactggacaaagcttctatagcaaactcagatggccccacagcaggttcccaaacacctcccttcaaaagaaaggggaaactatccaccattggtaaaatctttaagccttggaaatggaggaaaaagaagaccagcgacaaatttagagaaacctcggcagtattagaaaggaagatatccacacgacaaagtagagaggagctgataagaaggggagtgcttaaggaattgcctgatcaagctggctcctctcattcaaaaaaaacaactggctctaaagcatcagcttcgccatccacttcatccacctcatctcgtcccaaagcttcaaaggagacagtttctagcaaagcagggacagtggggaccaccaagggcaagagaaaaactgacaagcagccaataacttctcacctgtcctcagacacaacaacttctggcacatccgacctgaaaggagagcctgcagagaccagagtggagagtttcaaactcgaacagactgtccctggagctgaggagcagaacacaggcaaattcaagtccatggtccctccaccccctgtggctccagcaccttctcctctggccccccctctccctcttgaggatcagtgcattactgcctcagacactccagttgtcctcgtcagcgttggagctgacctgcccgtctctgccttagacccaagtcagcttctttgggctgaagagccgacgaacagaaccactctctactcaggcactggcttaagtgttaacagagaaaatgcaaaatgtttcacaaccaaagaggagctggggaagacagtgcctcagctactgactcctgggctgatgggcgaatcttcagaatcctttagtgcctcagaagatgaaggccacagggaataccaagccaatgactctgactcggacgggcctatcttgtacaccgatgatgaggacgaagacgaagatgaggatggcagtggagaaagtgctttggcaagtaaaatacgccggagggatactcttgctatcaaacttggcaacagaccatctaagaaagaactagaggacaaaaacatcttgcagcgtacatctgaagaagagaggcaggaaatccgacaacaaattggaaccaagttagtcaggaggctgagccagaggcccacaactgaagaattagagcaaagaaacatcctaaaacaaaagaatgaagaagaggaacaagaagcaaaaatggaacttaaacgcagactcagcagaaagctcagcctgagacccacagtggcagagctacaagctcgaaggatcctgcgatttaacgagtatgtagaagtcacggattctcctgactatgaccgccgagcagacaagccctgggccaggttaacacctgcagacaaggcagcaataaggaaagaactaaatgaatttaaaagcacagaaatggaagttcatgaagagagtcgacagtttacaaggtttcatcgtccataacgaagagtgagactatttggaaacagagactgatcatctttgggggaagccctgcttcctgaaaacctgatattgcactgggatttgaatgtgtgtgtttccgtttaacttgtggtgaaggaagtgtgtgactcagcttggctgggaagtgctcctcacctgtgtggcccagatggctccaacaagcaaaaggaaggatgcagtgactcttgctgcccagaatgcacagcgatggtaagagacaccgtggatattcttcatcagaagctttaatcaaagaagatgagcagaagacaatcactggctccctgttaccagaaagccaaattttataatgcgggtgaaagaaaaatatagattaaaattgctgggcactgaaaaggggtgggagttggaaatcagaaagaaagagaaatatttcattatgttaatgaagaaaagagaaaattgaagcataaatgtatttttgaagtagttattcggtagctgagaacttattaagggatttaggaatttaacctcctgatgtggattcctcaaagacttgatcggagaatactcttgtttcaccattatgttggtacagtatagtaccattattttatgttgtgccagtgaatccagttgccagaaataagtctgaatgttttcatgcatctttttcttaaatgcaagagcttctactgactcttaacaagcatgcttacccaaattttgttgcatgcttttaagtagcattagctatgcacacttgacatttttaaatatccctttcctagtgtaccagccttcacaggataagaggactgggaataaagtcagatgtaatgtgaccctagaaaactgtagcaagcttcagaaataaatcttttgatctttccctatcttgattagatccaaagtcaaagcaaccatacttcacctagagaagacagtattggcaatcatgacacctgtaataaaaacttgaatccaaagtcaaaacttaagcaagatacaaatgtgctgcctgcagttagtcctgcatgggaataaggactagttatttttttagtgctgcatttttttaaagttggattgctgctatttaaaaaaaaaaaaaggacacagatcaaaaaaacacccaaaggcttaacagaacatggaaagttcccactaagttgtgtgtgaggaaatcctcatcttgtattttaagaatctgcagatggcatccatagatacagtacagtatttactgtcaatgcaaaagaatcagtgaggttaaagtagtggaagttttccctatgagcctacagtctgtattgtttacattaagaaactctctattattgtgttgctattttccatggagtcacaggcacactatgacttctgctcccaaatacatatgaccatatgtaaataccaccttgcatttcattgttcttcacaagtgctttgtgcccctttaattaaaaacacatgaaatgaataacaaaacaagacccaaatagagtttattttattctcagagtttggactacaattttctaagatgtttctggttcaagactgtcattttctatttcaaccgaaaagtaagcatttaacccggtgaataaatgtagatcctgccattcattggtattttaaagaaccacttgaaatcggatcattttatttaaaaataaaaaatgttaatgccagttggcctactataaaaagccaggaccatgttagaattaggaaaagtaaccagcattactgcacctcttgttagactctgtgcattaataaaacacacctagagtctgttgtcatttcactaataggataagacaaattttttgctttgaaaaaatttttctgcatgcccaggtgtctgtctctggctgaggttttgtctattttacagtgtttcaatccagccataaaaattaacttgtgattttttttttcccaaagtcatgcttttccttaattatatttttattttattattttagtgtcttgagaaaaataccaagagatataatgtttcttttaattgtctatgcttaatcatctttaaacactttttaaatttctaaccacaagacctctctataatggtaaatgtaagacatcaccattttatcactcaaagtatgttattgaaagtttctatttggttgataaaaggaacaattttttcccacttttgatgcctgtgatgcaattttttattgcctacaatgagatacacttagtacaaaaaatgaaaatctggtatttcaaaattgcatttcttgtataataggtcagatttattaactactcatactttttctttacactaatcgatacatttagaaaaaattttctaagttagagacaagtttaaaagtacccacnacancaaaaaananngnggggcgcnaaaaaattaaaacggggcgggcccgagaaggccggtcaa

SEQ ID NO: 338057 - DNA, 3524 bp, Homo sapiens
tcctcgagcaggggccgcccgctccgggtccacatctccggctcagttgacggactggacaaagcttctatagcaaactcagatggccccacagcaggttcccaaacacctcccttcaaaagaaaggggaaactatccaccattggtaaaatctttaagccttggaaatggaggaaaaagaagaccagcgacaaatttagagaaacctcggcagtattagaaaggaagatatccacacgacaaagtagagaggagctgataagaaggggagtgcttaaggaattgcctgatcaagatggagatgtaacagttaactttgaaaattcaaacgggcacatgatacccatcggagaggaatctacccgagaggaaaatgtagtaaagtctgaagaaggtaatggctctgtatctgaaaaaacaccacctctggaggaacaggcagaagataagaaagctggctcctctcattcaaaaaaaacaactggctctaaagcatcagcttcgccatccacttcatccacctcatctcgtcccaaagcttcaaaggagacagtttctagcaaagcagggacagtggggaccaccaagggcaagagaaaaactgacaagcagccaataacttctcacctgtcctcagacacaacaacttctggcacatccgacctgaaaggagagcctgcagagaccagagtggagagtttcaaactcgaacagactgtccctggagctgaggagcagaacacaggcaaattcaagtccatggtccctccaccccctgtggctccagcaccttctcctctggccccccctctccctcttgaggatcagtgcattactgcctcagacactccagttgtcctcgtcagcgttggagctgacctgcccgtctctgccttagacccaagtcagcttctttgggctgaagagccgacgaacagaaccactctctactcaggcactggcttaagtgttaacagagaaaatgcaaaatgtttcacaaccaaagaggagctggggaagacagtgcctcagctactgactcctgggctgatgggcgaatcttcagaatcctttagtgcctcagaagatgaaggccacagggaataccaagccaatgactctgactcggacgggcctatcttgtacaccgatgatgaggacgaagacgaagatgaggatggcagtggagaaagtgctttggcaagtaaaatacgccggagggatactcttgctatcaaacttggcaacagaccatctaagaaagaactagaggacaaaaacatcttgcagcgtacatctgaagaagagaggcaggaaatccgacaacaaattggaaccaagttagtcaggaggctgagccagaggcccacaactgaagaattagagcaaagaaacatcctaaaacaaaagaatgaagaagaggaacaagaagcaaaaatggaacttaaacgcagactcagcagaaagctcagcctgagacccacagtggcagagctacaagctcgaaggatcctgcgatttaacgagtatgtagaagtcacggattctcctgactatgaccgccgagcagacaagccctgggccaggttaacacctgcagacaaggcagcaataaggaaagaactaaatgaatttaaaagcacagaaatggaagttcatgaagagagtcgacagtttacaaggtttcatcgtccataacgaagagtgagactatttggaaacagagactgatcatctttgggggaagccctgcttcctgaaaacctgatattgcactgggatttgaatgtgtgtgtttccgtttaacttgtggtgaaggaagtgtgtgactcagcttggctgggaagtgctcctcacctgtgtggcccagatggctccaacaagcaaaaggaaggatgcagtgactcttgctgcccagaatgcacagcgatggtaagagacaccgtggatattcttcatcagaagctttaatcaaagaagatgagcagaagacaatcactggctccctgttaccagaaagccaaattttataatgcgggtgaaagaaaaatatagattaaaattgctgggcactgaaaaggggtgggagttggaaatcagaaagaaagagaaatatttcattatgttaatgaagaaaagagaaaattgaagcataaatgtatttttgaagtagttattcggtagctgagaacttattaagggatttaggaatttaacctcctgatgtggattcctcaaagacttgatcggagaatactcttgtttcaccattatgttggtacagtatagtaccattattttatgttgtgccagtgaatccagttgccagaaataagtctgaatgttttcatgcatctttttcttaaatgcaagagcttctactgactcttaacaagcatgcttacccaaattttgttgcatgcttttaagtagcattagctatgcacacttgacatttttaaatatccctttcctagtgtaccagccttcatcaataaaggtggttatattgtaagcttttagatggtgcttaagaattcttatctttttaaatagcagtattttttttttaagaataaattgtaaggagcaaataaggcagaatgccactctaccctcaggtcaattttatggtatatgaaaatgccagtaatatttgtgccacttgccaactcgggggaggaggggcttttcccttactggatacttttgttatagtttgactatgtcattatgttgtttagagagcctccacaatgagaagttgccactgcagggctaactcgccttcagaaataatcagaatgattcaagggtcaaaccactttcatcccttaaaatatagggactaatatttctttttcttttttttaaaaaaaacatttcttctgtggcttagaaatgtgccagtgtgttcaaaacatttacaccaatttcaccagatttaggacctattaaaaattcaaacaagtttctttttttttttttttttccggtgtaccagggatttttaaataacggactatttgcattcttttgttatttcacacttcagttaaagtgataacaatggtaaactgtgatcattatcagactgactgaatgctttctgatttccagtgagtgatctagttctacgtattacacaggtgtaatatctgtgagtgtaaataactggaactgtacactgattaacatgacagtttctcttttgttgttcttatctgtactgtattatagtatgtgggtataaatatctacaagtatacacacatatgtacttgtattccactattgtaacctgaaagaaagactatgtattcccttttttaattccgtactggtatttgtgttatttaaaaagcaaaattctgctctatttagttgtataatattagaggatactttgctgtgcacaattccaagtgccttagaacattgtttagctttcctaagtatatataaatgcatatatgtataaaattgggaaaagttacctcaataaaatcattgggaaatcccca

SEQ ID NO: 338058 - DNA, 3880 bp, Homo sapiens
tcctcgagcaggggccgcccgctccgggtccacatctccggctcagttgacggactggacaaagcttctatagcaaactcagatggccccacagcaggttcccaaacacctcccttcaaaagaaaggggaaactatccaccattggtaaaatctttaagccttggaaatggaggaaaaagaagaccagcgacaaatttagagaaacctcggcagtattagaaaggaagatatccacacgacaaagtagagaggagctgataagaaggggagtgcttaaggaattgcctgatcaagatggagatgtaacagttaactttgaaaattcaaacgggcacatgatacccatcggagaggaatctacccgagaggaaaatgtagtaaagtctgaagaaggtaatggctctgtatctgaaaaaacaccacctctggaggaacaggcagaagataagaaagctggctcctctcattcaaaaaaaacaactggctctaaagcatcagcttcgccatccacttcatccacctcatctcgtcccaaagcttcaaaggagacagtttctagcaaagcagggacagtggggaccaccaagggcaagagaaaaactgacaagcagccaataacttctcacctgtcctcagacacaacaacttctggcacatccgacctgaaaggagagcctgcagagaccagagtggagagtttcaaactcgaacagactgtccctggagctgaggagcagaacacaggcaaattcaagtccatggtccctccaccccctgtggctccagcaccttctcctctggccccccctctccctcttgaggatcagtgcattactgcctcagacactccagttgtcctcgtcagcgttggagctgacctgcccgtctctgccttagacccaagtcagcttctttgggctgaagagccgacgaacagaaccactctctactcaggcactggcttaagtgttaacagagaaaatgcaaaatgtttcacaaccaaagaggagctggggaagacagtgcctcagctactgactcctgggctgatgggcgaatcttcagaatcctttagtgcctcagaagatgaaggccacagggaataccaagccaatgactctgactcggacgggcctatcttgtacaccgatgatgaggacgaagacgaagatgaggatggcagtggagaaagtgctttggcaagtaaaatacgccggagggatactcttgctatcaaacttggcaacagaccatctaagaaagaactagaggacaaaaacatcttgcagcgtacatctgaagaagagaggcaggaaatccgacaacaaattggaaccaagttagtcaggaggctgagccagaggcccacaactgaagaattagagcaaagaaacatcctaaaacaaaagaatgaagaagaggaacaagaagcaaaaatggaacttaaacgcagactcagcagaaagctcagcctgagacccacagtggcagagctacaagctcgaaggatcctgcgatttaacgagtatgtagaagtcacggattctcctgactatgaccgccgagcagacaagccctgggccaggttaacacctgcagacaaggcagcaataaggaaagaactaaatgaatttaaaagcacagaaatggaagttcatgaagagagtcgacagtttacaaggtttcatcgtccataacgaagagtgagactatttggaaacagagactgatcatctttgggggaagccctgcttcctgaaaacctgatattgcactgggatttgaatgtgtgtgtttccgtttaacttgtggtgaaggaagtgtgtgactcagcttggctgggaagtgctcctcacctgtgtggcccagatggctccaacaagcaaaaggaaggatgcagtgactcttgctgcccagaatgcacagcgatggtaagagacaccgtggatattcttcatcagaagctttaatcaaagaagatgagcagaagacaatcactggctccctgttaccagaaagccaaattttataatgcgggtgaaagaaaaatatagattaaaattgctgggcactgaaaaggggtgggagttggaaatcagaaagaaagagaaatatttcattatgttaatgaagaaaagagaaaattgaagcataaatgtatttttgaagtagttattcggtagctgagaacttattaagggatttaggaatttaacctcctgatgtggattcctcaaagacttgatcggagaatactcttgtttcaccattatgttggtacagtatagtaccattattttatgttgtgccagtgaatccagttgccagaaataagtctgaatgttttcatgcatctttttcttaaatgcaagagcttctactgactcttaacaagcatgcttacccaaattttgttgcatgcttttaagtagcattagctatgcacacttgacatttttaaatatccctttcctagtgtaccagccttcatcaataaaggtggttatattgtaagcttttagatggtgcttaagaattcttatctttttaaatagcagtattttttttttaagaataaattgtaaggagcaaataaggcagaatgccactctaccctcaggtcaattttatggtatatgaaaatgccagtaatatttgtgccacttgccaactcgggggaggaggggcttttcccttactggatacttttgttatagtttgactatgtcattatgttgtttagagagcctccacaatgagaagttgccactgcagggctaactcgccttcagaaataatcagaatgattcaagggtcaaaccactttcatcccttaaaatatagggactaatatttctttttcttttttttaaaaaaaacatttcttctgtggcttagaaatgtgccagtgtgttcaaaacatttacaccaatttcaccagatttaggacctattaaaaattcaaacaagtttctttttttttttttttttccggtgtaccagggatttttaaataacggactatttgcattcttttgttatttcacacttcagttaaagtgataacaatggtaaactgtgatcattatcagactgactgaatgctttctgatttccagtgagtgatctagttctacgtattacacaggtgtaatatctgtgagtgtaaataactggaactgtacactgattaacatgacagtttctcttttgttgttcttatctgtactgtattatagtatgtgggtataaatatctacaagtatacacacatatgtacttgtattccactattgtaacctgaaagaaagactatgtattcccttttttaattccgtactggtatttgtgttatttaaaaagcaaaattctgctctatttagttgtataatattagaggatactttgctgtgcacaattccaagtgccttagaacattgtttagctttcctaagtatatataaatgcatatatgtataaaattgggaaaagttacctcaataaaatcattgggaaatccccagttttagtttgttccagtttctcttatatttggatagtgctcagcctttttaaatgaaaaaagaaaaaagagtaagacaacttccctaattgcctgttatttcagcttcacctaagtttttaacacctctttgtatgtaaggtcttgagacatgtaaggcctggtactttttatttaaaatgtctgtctaaagaattactgctcttaaaagaaacttccagtattttttttaacttgctatctttttatgtctgaggtatttgatattgatgtttttattgccattattatatgtaaacataaaagatagtccatttagagtttataatatagaaaataaacagacttcctcatta

SEQ ID NO: 338059 - DNA, 8120 bp, Homo sapiens
cagcaaatggacagggtgggtggcggaaaagggcccgggggaagttattacagggtgtcctcttccgccgccagaagccggaagttgtgtcccggacgtgtcaaccggggtctgagtgctcagagtacagctgcaaccgcgaccatgggcgggaagaacaagcagcgaactaaagggaacctgaggccttcaaacagtggccgagctgcagaactccttgccaaagaacagggaacagtgcctggatttattggttttggaacatctcagagtgacctaggctatgttcctgctattcaaggagctgaagaaattgacagtcttgtagattctgatttccgaatggtgctgcggaaactttcaaagaaagatgtcaccacaaaattaaaagctatgcaggaatttggaaccatgtgtacagagagagacacagaaactgtgaaaggagttcttccatattggccaagaattttttgcaaaatttcacttgatcatgaccgtcgcgtccgagaagccacacaacaagcttttgaaaaacttatccttaaagtaaagaaacagttggctccctacttaaaaagtttaatgggatattggctaatggctcagtgtgatacttacacaccagctgcgtttgcagcaaaagatgcatttgaagcggcttttcctccaagcaagcaacctgaagccatagcattttgtaaggatgaaattacaagtgtgctgcaggatcatcttataaaagaaacacctgatacactcagtgacccgcaaactgttccagaggaagaaagagaagctaaattctaccgggttgtaacttgttccttattggcattaaagagattactttgccttttacctgataatgagcttgattctctggaggagaaatttaagtctcttttatcacagaataagttttggaagtatggaaaacacagtgtacctcagattcgctcagcttattttgagttagtctctgcattgtgccagcgcattccacagttgatgaaagaggaagcatccaaagtgagcccatcagttctacttagcattgatgacagtgacccaattgtctgcccagctctctgggaagctgtactctatacacttacaactattgaggactgttggcttcatgtaaatgcaaaaaagagtgtgtttcccaagctatcaactgtgattcgtgaaggtggtcggggtctagctactgtcatatatccttaccttctgccattcatcagcaagctccctcagtccatcacaaatccaaagttggatttcttcaaaaatttcctcacgtctctagttgctgggctgtcaacagagagaactaaaaccagctcttcagagtcctcggcagtaatatctgctttttttgaatgcttacgttttataatgcagcaaaacttaggtgaggaagagattgaacagatgctcgtcaatgatcagtaatcaacacagaagacttctgtgaccaaatatgtggagatttctcccacccagcaagcagtcagttctgcagcagataccagctatgtgtcctccaattcaattctgactatctacctggagatagtgtcagatctcactggcttaggactcagtcccacaagaccgctccccacttctgatgccaatcgcaagccccaggctgttttacctgggcttctgaccaaccagctgtacatctaaatcagggatcccatgaccccctcctggggtttgcttaatttgctagactgtctcacagaactcagagaaacaatttaccagtttactataaatgatattacaaaggatacaaatgaagacatgcacacgttgatcccttttattgatgcagttctcaaagacccaggattgcaacatgggcagctatttaaccatttagcagaaactctaagttcctgggaagccaaagcagacacggaaaaagatgaaaaaacagctcacaacttggagaacgtactgatacatttctgggaaagactgtcagagatctgtgttgcgaaaatcagtgagccagaagctgatgttgagtccgttttgggtgtatctaacctattacaggtgcttcagaagccgaagagctcattgaagtcaagtaaaaaaaaaaatggtaaggttagatttgctgatgagatacttgaaagcaataaagagaatgaaaaatgtgtatcttcagaaggagagaagattgaaggctgggaattaacaactgaaccttctctcactcataattcttcaggccttttgtctcctctaaggaaaaaacctttggaagacttagtctgtaaactcgcagatataagtattaattatgtcaatgaacgaaagtcagagcaacatctaaggtttctttctactctgcttgactccttttcttcaagccgagtatttaaaatgctacttggtgatgaaaaacagagtattgtccaagccaaacctcttgaaatagccaagcttgtacaaaaaaatcctgcggtgcagtttttataccagaaactgataggttggctaaatgaagatcaaaggaaggattttggtttcctggtggacattttgtacagtgctctccggtgctgtgacaatgatatggaaagaaaaaaagtcttggatgatctaaccaaggtggacttgaaatggaattctcttcttaagattattgaaaaggcatgtcctagttcagataaacatgctttagtaactccttggctcaaaggcgatatccttggtgagaaattggtcaacttggcagattgtctttgtaatgaggacttggaatccagggtatcttcagaatctcacttctcagaaagatggactcttctaagcttggtattatcccaacatgttaaaaatgattacttgattggagacgtatatgttgaaagaatcattgttagacttcatgaaactttattcaaaacaaagaaattatcagaagctgaaagcagtgactcatcagtgtcttttatctgtgatgtggcctataactatttcagctcagcgaaaggatgcttgctaatgccatcatctgaagatttattattaactctctttcagttatgtgctcagagcaaagaaaaaacacatttgccagattttcttatctgtaaactgaaaaatacttggctctctggtgtaaatttattggttcatcaaactgacagttcatataaagagagtaccttcctacatttgtctgctctgtggctgaagaaccaagttcaggcttcatctttggatatcaacagtctccaagtcctcttgtctgctgttgatgatttgctaaatacacttctagagagtgaagattcttatcttatgggagtttatattggaagtgtaatgccgaacgacagtgaatgggaaaagatgaggcagtctcttcctatgcagtggttacatagacctcttttagagggaagattgagtttgaattatgaatgtttcaaaacagattttaaggaacaggacataaagacacttcccagccatttgtgtacttcagcattattgagcaaaatggtcttaattgcactgagaaaggaaacagtcttagaaaataatgagcttgagaaaataattgcagaactgctttattcactgcagtggtgtgaagaattagataacccacctatttttctaattggattttgtgaaatacttcaaaaaatgaatattacgtatgataacttacgtgtacttggtaatacgtcgggccttttgcagctgttatttaacaggtccagagaacatggcacactgtggtctcttattattgctaagttgatcctttcccgaagcatttcatctgatgaagtaaaaccacattataagagaaaagaaagtttttttccactaactgaaggcaatttgcataccattcaaagtctatgtccatttttgtcaaaagaagaaaagaaagaatttagtgctcaatgtatacctgctcttttgggctggactaagaaagatctttgcagcactaatggaggttttggacatcttgccattttcaattcttgtctgcaaaccaaaagtatagatgatggagagctattacatggaatattaaaaatcataatatcctggaagaaagagcatgaagatatttttcttttcagttgtaatctatcagaagcaagtccagaggtactgggtgtaaatatagaaataatccggtttctttccctatttctgaaatactgctcatcccctttggcagagagtgagtgggacttcatcatgtgctccatgttggcttggttggagacaacaagtgagaatcaggcattgtattctattccacttgtgcaactgtttgcctgtgtcagctgtgatttggcctgtgacctcagtgctttctttgattccacaactctggataccattggcaatcttcctgtaaatctaatcagtgaatggaaagaatttttttcccaaggcatccacagtttgcttttacctattttggtgactgttacaggagaaaacaaagatgtgtctgaaacatcctttcagaatgcaatgctgaaacccatgtgtgaaacattaacgtatatctcaaaggaacagctattgagtcacaaacttcctgcaagattagttgctgaccaaaaaacaaacttaccagaatatctccagactttgttaaatacattggccccattactcctcttcagagctaggcctgtgcaaattgctgtttatcatatgctatacaaattgatgcctgaattaccacagtatgatcaggataatctaaagtcatacggagatgaagaagaagagccagccttgtcaccaccagcagcactgatgtctcttcttagcattcaagaggacttactagaaaatgttttggggtgtattcctgttggacagatagttactattaaaccactgagtgaagacttctgttatgttctgggataccttctcacttggaaattaatactaactttcttcaaagctgcatcatcacagcttcgggctttgtattccatgtatcttcggaaaacaaagagtttgaataaattgctctatcacctgttcaggcttatgccagaaaatccaacctatgcagagacagcagttgaggtcccaaataaggaccctaaaacattctttactgaggagctccagctgagtattagagaaacaacaatgcttccataccacattccacacttggcttgttcagtctatcatatgacattaaaagacttgcctgccatggttaggttgtggtggaatagcagtgagaagcgtgttttcaatattgtggatagatttacaagcaagtatgtcagcagtgttctttcttttcaagaaatatcttctgtacaaacaagtacacaactatttaatggcatgacggttaaagctcgagctactactcgagaggtaatggctacttatactattgaggacatagttattgaacttataatacaactgccttcaaattatccactgggttcaataatagtagaaagtgggaaaagagtaggagtagctgttcagcagtggcggaactggatgctgcagttaagcacttacctcacccatcagaatggaagtattatggaaggcttagctttatggaaaaataacgtagacaaacgttttgagggtgttgaagattgcatgatctgtttctcagtcattcacggtttcaactattcccttcccaaaaaagcctgtagaacatgcaagaaaaaattccattcagcctgcttgtacaaatggtttacatctagcaacaaatccacttgtccactgtgtcgtgagacgtttttctgagatttttttcactggaagggatccctgaagtacatcaaacaaaggcattggatttggatccgtctgaaagtgtggatgtggggaagccagtgagcattacttttaaataggaccttctctggaaaattattttggttaatgtaataatcctaaaatcaggtttacttaactttagattgctttgtaaatgtttggaaactttcttttacaaaagaatattacatatttgagagaaaatatttctattaatggtttaatttctttgtatatttaaaaataaatatgaaaaacccctaaattacagaattggaatttgtgaaaagattgcacaactatattattgataaacccattccgtttgttgatctgtgttttagaatagtccaagtgaagcaaaacgaactgagagagctgatttacatctatagatattttaagccttatttattagttatgacaataaattagtattctgatatttgtagattattttaatgataaaaatgacactaagctattaatacggcttgtcttaagatatctggaggcatgctctgaaatcctatataaaagagtttaaactgaactttaaggtgcctccatttatcaagggttatgaaactcagaaaattaaattcttgatgctgacctttttgcttgtgggagaattatttctatatattagtgaaatttgaattgtaaacttgtcagtgaatttatcactctgagcgagtctctagagggtgagaatttgagagaaatagtaatttgattatttcattcatgaagcggagtggtagttatccttctattgagagggaagaaataaatgagtattactgaaacttaaagatcagtggaaaaaaaaaacatttaaaaatgttgtaggagactttcaattttggaagcaaactgagctattcttaccagccaaagttatactaaataagagacttgggggagcaaatgtttttcagccttcagaaatgaaagttaaggattttagcactaggtaaaattcagtataataggctgaagtggagtaagtgaaaacctgccttttgccactcttaaaaattgtgcccaaaatataaaagtgtggaactttagaacttggaataattttattgcagtcttccattacatggaaatagcatatctaatatctaggttacttgagagaccagctaatcatctctgttgcacatgtttaattggcaaaaagcaattcatgataaataaaattactgctttccatctactgggtaaaatgactattgaaatagtatgaatgtggtcagaggattatagttgagagtgaagtactatgtgtgagttatagatctctcgaattatatttatagatgcagtgtcctgcccagttttgtttgcctcctacattttactgtaaaatatttattgtcttctagccttgagcctctgagggtcagtaagtgaagtacagatagcaaaattttactacctcgttaacccttttcttaaaatattctctatctttctatgtctctttctgacatagtaatcccaaaggattgtgttactccccgtgaaagttattacttttcctttaaaaatggttttataataagactgtttaaaacctttccagtattggtacatcttggcttctggcccaaaccccaagcagaaaagaaaatggaataatggagcattgtttttccacattagtattagggcatcagattcttggtgaaacactataattaagtagttataattaaataactgttcttcatacttaggactcttaatacatttctttaagacttgtaagtataattgtaaagcttgttaactgtttatatactaaagaaaaagctttacaagataagactgaaattcagaataccacatctgtacagcgttgacaactctaactaaaaggattacagcccttaaaattttagcttaaggacattttaaaattgcatgagattagcaaaattattaatttaaaaccccaaagtaaattgcaaattttaaaatttatttttgactcttttatcacatgctccaatgtatgtacataagtgtctgtggcttaaataatatgttgttatttgatacatttttgtggtgcaagtaattaatgttattatttgattgttataccatatgtgcccattaaaattctttttaattaaaaatatttcaaatatgcagaaaaataataatataaatgcccttgtacccttcacatactattttgccatatttgcttctgatttttaaataaataaaatgttactcttttgtacttc

SEQ ID NO: 338060 - DNA, 7861 bp, Homo sapiens
cagcaaatggacagggtgggtggcggaaaagggcccgggggaagttattacagggtgtcctcttccgccgccagaagccggaagttgtgtcccggacgtgtcaaccggggtctgagtgctcagagtacagctgcaaccgcgaccatgggcgggaagaacaagcagcgaactaaagggaacctgaggccttcaaacagtggccgagctgcagaactccttgccaaagaacagggaacagtgcctggatttattggttttggaacatctcagagtgacctaggctatgttcctgctattcaaggagctgaagaaattgacagtcttgtagattctgatttccgaatggtgctgcggaaactttcaaagaaagatgtcaccacaaaattaaaagctatgcaggaatttggaaccatgtgtacagagagagacacagaaactgtgaaaggagttcttccatattggccaagaattttttgcaaaatttcacttgatcatgaccgtcgcgtccgagaagccacacaacaagcttttgaaaaacttatccttaaagtaaagaaacagttggctccctacttaaaaagtttaatgggatattggctaatggctcagtgtgatacttacacaccagctgcgtttgcagcaaaagatgcatttgaagcggcttttcctccaagcaagcaacctgaagccatagcattttgtaaggatgaaattacaagtgtgctgcaggatcatcttataaaagaaacacctgatacactcagtgacccgcaaactgttccagaggaagaaagagaagctaaattctaccgggttgtaacttgttccttattggcattaaagagattactttgccttttacctgataatgagcttgattctctggaggagaaatttaagtctcttttatcacagaataagttttggaagtatggaaaacacagtgtacctcagattcgctcagcttattttgagttagtctctgcattgtgccagcgcattccacagttgatgaaagaggaagcatccaaagtgagcccatcagttctacttagcattgatgacagtgacccaattgtctgcccagctctctgggaagctgtactctatacacttacaactattgaggactgttggcttcatgtaaatgcaaaaaagagtgtgtttcccaagctatcaactgtgattcgtgaaggtggtcggggtctagctactgtcatatatccttaccttctgccattcatcagcaagctccctcagtccatcacaaatccaaagttggatttcttcaaaaatttcctcacgtctctagttgctgggctgtcaacagagagaactaaaaccagctcttcagagtcctcggcagtaatatctgctttttttgaatgcttacgttttataatgcagcaaaacttaggtgaggaagagattgaacagatgctcgtcaatgatcagttgatcccttttattgatgcagttctcaaagacccaggattgcaacatgggcagctatttaaccatttagcagaaactctaagttcctgggaagccaaagcagacacggaaaaagatgaaaaaacagctcacaacttggagaacgtactgatacatttctgggaaagactgtcagagatctgtgttgcgaaaatcagtgagccagaagctgatgttgagtccgttttgggtgtatctaacctattacaggtgcttcagaagccgaagagctcattgaagtcaagtaaaaaaaaaaatggtaaggttagatttgctgatgagatacttgaaagcaataaagagaatgaaaaatgtgtatcttcagaaggagagaagattgaaggctgggaattaacaactgaaccttctctcactcataattcttcaggccttttgtctcctctaaggaaaaaacctttggaagacttagtctgtaaactcgcagatataagtattaattatgtcaatgaacgaaagtcagagcaacatctaaggtttctttctactctgcttgactccttttcttcaagccgagtatttaaaatgctacttggtgatgaaaaacagagtattgtccaagccaaacctcttgaaatagccaagcttgtacaaaaaaatcctgcggtgcagtttttataccagaaactgataggttggctaaatgaagatcaaaggaaggattttggtttcctggtggacattttgtacagtgctctccggtgctgtgacaatgatatggaaagaaaaaaagtcttggatgatctaaccaaggtggacttgaaatggaattctcttcttaagattattgaaaaggcatgtcctagttcagataaacatgctttagtaactccttggctcaaaggcgatatccttggtgagaaattggtcaacttggcagattgtctttgtaatgaggacttggaatccagggtatcttcagaatctcacttctcagaaagatggactcttctaagcttggtattatcccaacatgttaaaaatgattacttgattggagacgtatatgttgaaagaatcattgttagacttcatgaaactttattcaaaacaaagaaattatcagaagctgaaagcagtgactcatcagtgtcttttatctgtgatgtggcctataactatttcagctcagcgaaaggatgcttgctaatgccatcatctgaagatttattattaactctctttcagttatgtgctcagagcaaagaaaaaacacatttgccagattttcttatctgtaaactgaaaaatacttggctctctggtgtaaatttattggttcatcaaactgacagttcatataaagagagtaccttcctacatttgtctgctctgtggctgaagaaccaagttcaggcttcatctttggatatcaacagtctccaagtcctcttgtctgctgttgatgatttgctaaatacacttctagagagtgaagattcttatcttatgggagtttatattggaagtgtaatgccgaacgacagtgaatgggaaaagatgaggcagtctcttcctatgcagtggttacatagacctcttttagagggaagattgagtttgaattatgaatgtttcaaaacagattttaaggaacaggacataaagacacttcccagccatttgtgtacttcagcattattgagcaaaatggtcttaattgcactgagaaaggaaacagtcttagaaaataatgagcttgagaaaataattgcagaactgctttattcactgcagtggtgtgaagaattagataacccacctatttttctaattggattttgtgaaatacttcaaaaaatgaatattacgtatgataacttacgtgtacttggtaatacgtcgggccttttgcagctgttatttaacaggtccagagaacatggcacactgtggtctcttattattgctaagttgatcctttcccgaagcatttcatctgatgaagtaaaaccacattataagagaaaagaaagtttttttccactaactgaaggcaatttgcataccattcaaagtctatgtccatttttgtcaaaagaagaaaagaaagaatttagtgctcaatgtatacctgctcttttgggctggactaagaaagatctttgcagcactaatggaggttttggacatcttgccattttcaattcttgtctgcaaaccaaaagtatagatgatggagagctattacatggaatattaaaaatcataatatcctggaagaaagagcatgaagatatttttcttttcagttgtaatctatcagaagcaagtccagaggtactgggtgtaaatatagaaataatccggtttctttccctatttctgaaatactgctcatcccctttggcagagagtgagtgggacttcatcatgtgctccatgttggcttggttggagacaacaagtgagaatcaggcattgtattctattccacttgtgcaactgtttgcctgtgtcagctgtgatttggcctgtgacctcagtgctttctttgattccacaactctggataccattggcaatcttcctgtaaatctaatcagtgaatggaaagaatttttttcccaaggcatccacagtttgcttttacctattttggtgactgttacaggagaaaacaaagatgtgtctgaaacatcctttcagaatgcaatgctgaaacccatgtgtgaaacattaacgtatatctcaaaggaacagctattgagtcacaaacttcctgcaagattagttgctgaccaaaaaacaaacttaccagaatatctccagactttgttaaatacattggccccattactcctcttcagagctaggcctgtgcaaattgctgtttatcatatgctatacaaattgatgcctgaattaccacagtatgatcaggataatctaaagtcatacggagatgaagaagaagagccagccttgtcaccaccagcagcactgatgtctcttcttagcattcaagaggacttactagaaaatgttttggggtgtattcctgttggacagatagttactattaaaccactgagtgaagacttctgttatgttctgggataccttctcacttggaaattaatactaactttcttcaaagctgcatcatcacagcttcgggctttgtattccatgtatcttcggaaaacaaagagtttgaataaattgctctatcacctgttcaggcttatgccagaaaatccaacctatgcagagacagcagttgaggtcccaaataaggaccctaaaacattctttactgaggagctccagctgagtattagagaaacaacaatgcttccataccacattccacacttggcttgttcagtctatcatatgacattaaaagacttgcctgccatggttaggttgtggtggaatagcagtgagaagcgtgttttcaatattgtggatagatttacaagcaagtatgtcagcagtgttctttcttttcaagaaatatcttctgtacaaacaagtacacaactatttaatggcatgacggttaaagctcgagctactactcgagaggtaatggctacttatactattgaggacatagttattgaacttataatacaactgccttcaaattatccactgggttcaataatagtagaaagtgggaaaagagtaggagtagctgttcagcagtggcggaactggatgctgcagttaagcacttacctcacccatcagaatggaagtattatggaaggcttagctttatggaaaaataacgtagacaaacgttttgagggtgttgaagattgcatgatctgtttctcagtcattcacggtttcaactattcccttcccaaaaaagcctgtagaacatgcaagaaaaaattccattcagcctgcttgtacaaatggtttacatctagcaacaaatccacttgtccactgtgtcgtgagacgtttttctgagatttttttcactggaagggatccctgaagtacatcaaacaaaggcattggatttggatccgtctgaaagtgtggatgtggggaagccagtgagcattacttttaaataggaccttctctggaaaattattttggttaatgtaataatcctaaaatcaggtttacttaactttagattgctttgtaaatgtttggaaactttcttttacaaaagaatattacatatttgagagaaaatatttctattaatggtttaatttctttgtatatttaaaaataaatatgaaaaacccctaaattacagaattggaatttgtgaaaagattgcacaactatattattgataaacccattccgtttgttgatctgtgttttagaatagtccaagtgaagcaaaacgaactgagagagctgatttacatctatagatattttaagccttatttattagttatgacaataaattagtattctgatatttgtagattattttaatgataaaaatgacactaagctattaatacggcttgtcttaagatatctggaggcatgctctgaaatcctatataaaagagtttaaactgaactttaaggtgcctccatttatcaagggttatgaaactcagaaaattaaattcttgatgctgacctttttgcttgtgggagaattatttctatatattagtgaaatttgaattgtaaacttgtcagtgaatttatcactctgagcgagtctctagagggtgagaatttgagagaaatagtaatttgattatttcattcatgaagcggagtggtagttatccttctattgagagggaagaaataaatgagtattactgaaacttaaagatcagtggaaaaaaaaaacatttaaaaatgttgtaggagactttcaattttggaagcaaactgagctattcttaccagccaaagttatactaaataagagacttgggggagcaaatgtttttcagccttcagaaatgaaagttaaggattttagcactaggtaaaattcagtataataggctgaagtggagtaagtgaaaacctgccttttgccactcttaaaaattgtgcccaaaatataaaagtgtggaactttagaacttggaataattttattgcagtcttccattacatggaaatagcatatctaatatctaggttacttgagagaccagctaatcatctctgttgcacatgtttaattggcaaaaagcaattcatgataaataaaattactgctttccatctactgggtaaaatgactattgaaatagtatgaatgtggtcagaggattatagttgagagtgaagtactatgtgtgagttatagatctctcgaattatatttatagatgcagtgtcctgcccagttttgtttgcctcctacattttactgtaaaatatttattgtcttctagccttgagcctctgagggtcagtaagtgaagtacagatagcaaaattttactacctcgttaacccttttcttaaaatattctctatctttctatgtctctttctgacatagtaatcccaaaggattgtgttactccccgtgaaagttattacttttcctttaaaaatggttttataataagactgtttaaaacctttccagtattggtacatcttggcttctggcccaaaccccaagcagaaaagaaaatggaataatggagcattgtttttccacattagtattagggcatcagattcttggtgaaacactataattaagtagttataattaaataactgttcttcatacttaggactcttaatacatttctttaagacttgtaagtataattgtaaagcttgttaactgtttatatactaaagaaaaagctttacaagataagactgaaattcagaataccacatctgtacagcgttgacaactctaactaaaaggattacagcccttaaaattttagcttaaggacattttaaaattgcatgagattagcaaaattattaatttaaaaccccaaagtaaattgcaaattttaaaatttatttttgactcttttatcacatgctccaatgtatgtacataagtgtctgtggcttaaataatatgttgttatttgatacatttttgtggtgcaagtaattaatgttattatttgattgttataccatatgtgcccattaaaattctttttaattaaaaatatttcaaatatgcagaaaaataataatataaatgcccttgtacccttcacatactattttgccatatttgcttctgatttttaaataaataaaatgttactcttttgtacttctccctggcgccattctcctccttctttccctagagctaacgtactaattctgaagttggtgtgactccttcctgtttaagattttatactttaccatgtgtttttatccagaa

SEQ ID NO: 338061 - DNA, 3549 bp, Homo sapiens
cagcaaatggacagggtgggtggcggaaaagggcccgggggaagttattacagggtgtcctcttccgccgccagaagccggaagttgtgtcccggacgtgtcaaccggggtctgagtgctcagagtacagctgcaaccgcgaccatgggcgggaagaacaagcagcgaactaaagggaacctgaggccttcaaacagtggccgagctgcagaactccttgccaaagaacagggaacagtgcctggatttattggttttggaacatctcagagtgacctaggctatgttcctgctattcaaggagctgaagaaattgacagtcttgtagattctgatttccgaatggtgctgcggaaactttcaaagaaagatgtcaccacaaaattaaaagctatgcaggaatttggaaccatgtgtacagagagagacacagaaactgtgaaaggagttcttccatattggccaagaattttttgcaaaatttcacttgatcatgaccgtcgcgtccgagaagccacacaacaagcttttgaaaaacttatccttaaagtaaagaaacagttggctccctacttaaaaagtttaatgggatattggctaatggctcagtgtgatacttacacaccagctgcgtttgcagcaaaagatgcatttgaagcggcttttcctccaagcaagcaacctgaagccatagcattttgtaaggatgaaattacaagtgtgctgcaggatcatcttataaaagaaacacctgatacactcagtgacccgcaaactgttccagaggaagaaagagaagctaaattctaccgggttgtaacttgttccttattggcattaaagagattactttgccttttacctgataatgagcttgattctctggaggagaaatttaagtctcttttatcacagaataagttttggaagtatggaaaacacagtgtacctcagattcgctcagcttattttgagttagtctctgcattgtgccagcgcattccacagttgatgaaagaggaagcatccaaagtgagcccatcagttctacttagcattgatgacagtgacccaattgtctgcccagctctctgggaagctgtactctatacacttacaactattgaggactgttggcttcatgtaaatgcaaaaaagagtgtgtttcccaagctatcaactgtgattcgtgaaggtggtcggggtctagctactgtcatatatccttaccttctgccattcatcagcaagctccctcagtccatcacaaatccaaagttggatttcttcaaaaatttcctcacgtctctagttgctgggctgtcaacagagagaactaaaaccagctcttcagagtcctcggcagtaatatctgctttttttgaatgcttacgttttataatgcagcaaaacttaggtgaggaagagattgaacagatgctcgtcaatgatcagttgatcccttttattgatgcagttctcaaagacccaggattgcaacatgggcagctatttaaccatttagcagaaactctaagttcctgggaagccaaagcagacacggaaaaagatgaaaaaacagctcacaacttggagaacgtactgatacatttctgggaaagactgtcagagatctgtgttgcgaaaatcagtgagccagaagctgatgttgagtccgttttgggtgtatctaacctattacaggtgcttcagaagccgaagagctcattgaagtcaagtaaaaaaaaaaatggtaaggttagatttgctgatgagatacttgaaagcaataaagagaatgaaaaatgtgtatcttcagaaggagagaagattgaaggctgggaattaacaactgaaccttctctcactcataattcttcaggccttttgtctcctctaaggaaaaaacctttggaagacttagtctgtaaactcgcagatataagtattaattatgtcaatgaacgaaagtcagagcaacatctaaggtttctttctactctgcttgactccttttcttcaagccgagtatttaaaatgctacttggtgatgaaaaacagagtattgtccaagccaaacctcttgaaatagccaagcttgtacaaaaaaatcctgcggtgcagtttttataccagaaactgataggttggctaaatgaagatcaaaggaaggattttggtttcctggtggacattttgtacagtgctctccggtgctgtgacaatgatatggaaagaaaaaaagtcttggatgatctaaccaaggtggacttgaaatggaattctcttcttaagattattgaaaaggcatgtcctagttcagataaacatgctttagtaactccttggctcaaaggcgatatccttggtgagaaattggtcaacttggcagattgtctttgtaatgaggacttggaatccagggtatcttcagaatctcacttctcagaaagatggactcttctaagcttggtattatcccaacatgttaaaaatgattacttgattggagacgtatatgttgaaagaatcattgttagacttcatgaaactttattcaaaacaaagaaattatcagaagctgaaagcagtgactcatcagtgtcttttatctgtgatgtggcctataactatttcagctcagcgaaaggatgcttgctaatgccatcatctgaagatttattattaactctctttcagttatgtgctcagagcaaagaaaaaacacatttgccagattttcttatctgtaaactgaaaaatacttggctctctggtgtaaatttattggttcatcaaactgacagttcatataaagagagtaccttcctacatttgtctgctctgtggctgaagaaccaagttcaggcttcatctttggatatcaacagtctccaagtcctcttgtctgctgttgatgatttgctaaatacacttctagagagtgaagattcttatcttatgggagtttatattggaagtgtaatgccgaacgacagtgaatgggaaaagatgaggcagtctcttcctatgcagtggttacatagacctcttttagagggaagattgagtttgaattatgaatgtttcaaaacagattttaaggaacaggacataaagacacttcccagccatttgtgtacttcagcattattgagcaaaatggtcttaattgcactgagaaaggaaacagtcttagaaaataatgagcttgagaaaataattgcagaactgctttattcactgcagtggtgtgaagaattagataacccacctatttttctaattggattttgtgaaatacttcaaaaaatgaatattacgtatgataacttacgtgtacttggtaatacgtcgggccttttgcagctgttatttaacaggtccagagaacatggcaccctgtggtatgttattattattaagcctccctttgaaaatgggtgtgccccaaaagtaagctttgcatctcttacaagaggggagctacaggggcagccgtggcctaggcccaaactatgctctgagaaaataaatatctgtcccacc

SEQ ID NO: 338062 - DNA, 4526 bp, Homo sapiens
ataattactggcagttgcttgggtgcaaagtcttaggtgaattgatgccatcacaaggtgctttatttaattctgtaaaaggaatccagctagccagtgtttaaacattttattcagtatgctttcaaaacggaatataatttttttctttcctttttcaggtccagagaacatggcacactgtggtctcttattattgctaagttgatcctttcccgaagcatttcatctgatgaagtaaaaccacattataagagaaaagaaagtttttttccactaactgaaggcaatttgcataccattcaaagtctatgtccatttttgtcaaaagaagaaaagaaagaatttagtgctcaatgtatacctgctcttttgggctggactaagaaagatctttgcagcactaatggaggttttggacatcttgccattttcaattcttgtctgcaaaccaaaagtatagatgatggagagctattacatggaatattaaaaatcataatatcctggaagaaagagcatgaagatatttttcttttcagttgtaatctatcagaagcaagtccagaggtactgggtgtaaatatagaaataatccggtttctttccctatttctgaaatactgctcatcccctttggcagagagtgagtgggacttcatcatgtgctccatgttggcttggttggagacaacaagtgagaatcaggcattgtattctattccacttgtgcaactgtttgcctgtgtcagctgtgatttggcctgtgacctcagtgctttctttgattccacaactctggataccattggcaatcttcctgtaaatctaatcagtgaatggaaagaatttttttcccaaggcatccacagtttgcttttacctattttggtgactgttacaggagaaaacaaagatgtgtctgaaacatcctttcagaatgcaatgctgaaacccatgtgtgaaacattaacgtatatctcaaaggaacagctattgagtcacaaacttcctgcaagattagttgctgaccaaaaaacaaacttaccagaatatctccagactttgttaaatacattggccccattactcctcttcagagctaggcctgtgcaaattgctgtttatcatatgctatacaaattgatgcctgaattaccacagtatgatcaggataatctaaagtcatacggagatgaagaagaagagccagccttgtcaccaccagcagcactgatgtctcttcttagcattcaagaggacttactagaaaatgttttggggtgtattcctgttggacagatagttactattaaaccactgagtgaagacttctgttatgttctgggataccttctcacttggaaattaatactaactttcttcaaagctgcatcatcacagcttcgggctttgtattccatgtatcttcggaaaacaaagagtttgaataaattgctctatcacctgttcaggcttatgccagaaaatccaacctatgcagagacagcagttgaggtcccaaataaggaccctaaaacattctttactgaggagctccagctgagtattagagaaacaacaatgcttccataccacattccacacttggcttgttcagtctatcatatgacattaaaagacttgcctgccatggttaggttgtggtggaatagcagtgagaagcgtgttttcaatattgtggatagatttacaagcaagtatgtcagcagtgttctttcttttcaagaaatatcttctgtacaaacaagtacacaactatttaatggcatgacggttaaagctcgagctactactcgagaggtaatggctacttatactattgaggacatagttattgaacttataatacaactgccttcaaattatccactgggttcaataatagtagaaagtgggaaaagagtaggagtagctgttcagcagtggcggaactggatgctgcagttaagcacttacctcacccatcagaatggaagtattatggaaggcttagctttatggaaaaataacgtagacaaacgttttgagggtgttgaagattgcatgatctgtttctcagtcattcacggtttcaactattcccttcccaaaaaagcctgtagaacatgcaagaaaaaattccattcagcctgcttgtacaaatggtttacatctagcaacaaatccacttgtccactgtgtcgtgagacgtttttctgagatttttttcactggaagggatccctgaagtacatcaaacaaaggcattggatttggatccgtctgaaagtgtggatgtggggaagccagtgagcattacttttaaataggaccttctctggaaaattattttggttaatgtaataatcctaaaatcaggtttacttaactttagattgctttgtaaatgtttggaaactttcttttacaaaagaatattacatatttgagagaaaatatttctattaatggtttaatttctttgtatatttaaaaataaatatgaaaaacccctaaattacagaattggaatttgtgaaaagattgcacaactatattattgataaacccattccgtttgttgatctgtgttttagaatagtccaagtgaagcaaaacgaactgagagagctgatttacatctatagatattttaagccttatttattagttatgacaataaattagtattctgatatttgtagattattttaatgataaaaatgacactaagctattaatacggcttgtcttaagatatctggaggcatgctctgaaatcctatataaaagagtttaaactgaactttaaggtgcctccatttatcaagggttatgaaactcagaaaattaaattcttgatgctgacctttttgcttgtgggagaattatttctatatattagtgaaatttgaattgtaaacttgtcagtgaatttatcactctgagcgagtctctagagggtgagaatttgagagaaatagtaatttgattatttcattcatgaagcggagtggtagttatccttctattgagagggaagaaataaatgagtattactgaaacttaaagatcagtggaaaaaaaaaacatttaaaaatgttgtaggagactttcaattttggaagcaaactgagctattcttaccagccaaagttatactaaataagagacttgggggagcaaatgtttttcagccttcagaaatgaaagttaaggattttagcactaggtaaaattcagtataataggctgaagtggagtaagtgaaaacctgccttttgccactcttaaaaattgtgcccaaaatataaaagtgtggaactttagaacttggaataattttattgcagtcttccattacatggaaatagcatatctaatatctaggttacttgagagaccagctaatcatctctgttgcacatgtttaattggcaaaaagcaattcatgataaataaaattactgctttccatctactgggtaaaatgactattgaaatagtatgaatgtggtcagaggattatagttgagagtgaagtactatgtgtgagttatagatctctcgaattatatttatagatgcagtgtcctgcccagttttgtttgcctcctacattttactgtaaaatatttattgtcttctagccttgagcctctgagggtcagtaagtgaagtacagatagcaaaattttactacctcgttaacccttttcttaaaatattctctatctttctatgtctctttctgacatagtaatcccaaaggattgtgttactccccgtgaaagttattacttttcctttaaaaatggttttataataagactgtttaaaacctttccagtattggtacatcttggcttctggcccaaaccccaagcagaaaagaaaatggaataatggagcattgtttttccacattagtattagggcatcagattcttggtgaaacactataattaagtagttataattaaataactgttcttcatacttaggactcttaatacatttctttaagacttgtaagtataattgtaaagcttgttaactgtttatatactaaagaaaaagctttacaagataagactgaaattcagaataccacatctgtacagcgttgacaactctaactaaaaggattacagcccttaaaattttagcttaaggacattttaaaattgcatgagattagcaaaattattaatttaaaaccccaaagtaaattgcaaattttaaaatttatttttgactcttttatcacatgctccaatgtatgtacataagtgtctgtggcttaaataatatgttgttatttgatacatttttgtggtgcaagtaattaatgttattatttgattgttataccatatgtgcccattaaaattctttttaattaaaaatatttcaaatatgcagaaaaataataatataaatgcccttgtacccttcacatactattttgccatatttgcttctgatttttaaataaataaaatgttactcttttgtacttc

SEQ ID NO: 338063 - DNA, 163 bp, Homo sapiens
tctggtagaagtctgtttacctatttcatttttattgttttttcagacaacaagtgagaatcaggcattgtattctattccacttgtgcaactgtttgcctgtgtcagctgtgatttggcctgtgacctcagtgctttctttgattccacaactctggatacc

SEQ ID NO: 338064 - DNA, 479 bp, Homo sapiens
gagaaaacaaagatgtgtctgaaacatcctttcagaatgcaatgctgaaacccatgtgtgaaacattaacgtatatctcaaaggaacagctattgagtcacaaacttcctgcaagattagttgctgaccaaaaaacaaacttaccagaatatctccagactttgttaaatacattggccccattactcctcttcagagctaggcctgtgcaaattgctgtttatcatatgctatacaagtaagaattcatccaattgaatcaatgttacagtggtctaaaaaaatagaatatatgcttagtttttacttttaattatttaaagtaaaatttttaaaagaaggagatctgactgcttcacttatagggaccctaagttgcctcatcttttaggttattgttctctatacacaatttatatttcaatagtcctggctatagtagttattttaaagaaaactcattaaaacatttactcatt

SEQ ID NO: 338065 - DNA, 391 bp, Homo sapiens
agaagcctttaaagtatgtctttaatggagaaaaattacatctggttccaaaaacttgggaggttattttaaaaaccaacattcataagttgggagacatgaacatagccaagcagattctcttctttcagaattgtaattcaactttaaaatttgtgaaattgaataaaaataaaattggtggttatcagtgtgtagtgacttatttttcttcttgttaacagaatggaagtattatggaaggcttagctttatggaaaaataacgtagacaaacgttttgagggtgttgaagattgcatgatctgtttctcagtcattcacggtttcaactattcccttcccaaaaaagcctgtagaacatgcaagaaaaaattccattcagcctgctt

SEQ ID NO: 338066 - DNA, 256 bp, Homo sapiens
caaaggcattggatttggatccgtctgaaagtgtggatgtggggaagccagtgagcattacttttaaataggaccttctctggaaaattattttggttaatgtaataatcctaaaatcaggtttacttaactttagattgctttgtaaatgtttggaaactttcttttacaaaagaatattacatatttgagagaaaatatttctattaatggtttaatttctttgtatatttaaaaataaatatgaaaaacccct

SEQ ID NO: 338067 - DNA, 7748 bp, Homo sapiens
cagcaaatggacagggtgggtggcggaaaagggcccgggggaagttattacagggtgtcctcttccgccgccagaagccggaagttgtgtcccggacgtgtcaaccggggtctgagtgctcagagtacagctgcaaccgcgaccatgggcgggaagaacaagcagcgaactaaagggaacctgaggccttcaaacagtggccgagctgcagaactccttgccaaagaacagggaacagtgcctggatttattggttttggaacatctcagagtgacctaggctatgttcctgctattcaaggagctgaagaaattgacagtcttgtagattctgatttccgaatggtgctgcggaaactttcaaagaaagatgtcaccacaaaattaaaagctatgcaggaatttggaaccatgtgtacagagagagacacagaaactgtgaaaggagttcttccatattggccaagaattttttgcaaaatttcacttgatcatgaccgtcgcgtccgagaagccacacaacaagcttttgaaaaacttatccttaaagtaaagaaacagttggctccctacttaaaaagtttaatgggatattggctaatggctcagtgtgatacttacacaccagctgcgtttgcagcaaaagatgcatttgaagcggcttttcctccaagcaagcaacctgaagccatagcattttgtaaggatgaaattacaagtgtgctgcaggatcatcttataaaagaaacacctgatacactcagtgacccgcaaactgttccagaggaagaaagagaagctaaattctaccgggttgtaacttgttccttattggcattaaagagattactttgccttttacctgataatgagcttgattctctggaggagaaatttaagtctcttttatcacagaataagttttggaagtatggaaaacacagtgtacctcagattcgctcagcttattttgagttagtctctgcattgtgccagcgcattccacagttgatgaaagaggaagcatccaaagtgagcccatcagttctacttagcattgatgacagtgacccaattgtctgcccagctctctgggaagctgtactctatacacttacaactattgaggactgttggcttcatgtaaatgcaaaaaagagtgtgtttcccaagctatcaactgtgattcgtgaaggtggtcggggtctagctactgtcatatatccttaccttctgccattcatcagcaagctccctcagtccatcacaaatccaaagttggatttcttcaaaaatttcctcacgtctctagttgctgggctgtcaacagagagaactaaaaccagctcttcagagtcctcggcagtaatatctgctttttttgaatgcttacgttttataatgcagcaaaacttaggtgaggaagagattgaacagatgctcgtcaatgatcagttgatcccttttattgatgcagttctcaaagacccaggattgcaacatgggcagctatttaaccatttagcagaaactctaagttcctgggaagccaaagcagacacggaaaaagatgaaaaaacagctcacaacttggagaacgtactgatacatttctgggaaagactgtcagagatctgtgttgcgaaaatcagtgagccagaagctgatgttgagtccgttttgggtgtatctaacctattacaggtgcttcagaagccgaagagctcattgaagtcaagtaaaaaaaaaaatggtaaggttagatttgctgatgagatacttgaaagcaataaagagaatgaaaaatgtgtatcttcagaaggagagaagattgaaggctgggaattaacaactgaaccttctctcactcataattcttcaggccttttgtctcctctaaggaaaaaacctttggaagacttagtctgtaaactcgcagatataagtattaattatgtcaatgaacgaaagtcagagcaacatctaaggtttctttctactctgcttgactccttttcttcaagccgagtatttaaaatgctacttggtgatgaaaaacagagtattgtccaagccaaacctcttgaaatagccaagcttgtacaaaaaaatcctgcggtgcagtttttataccagaaactgataggttggctaaatgaagatcaaaggaaggattttggtttcctggtggacattttgtacagtgctctccggtgctgtgacaatgatatggaaagaaaaaaagtcttggatgatctaaccaaggtggacttgaaatggaattctcttcttaagattattgaaaaggcatgtcctagttcagataaacatgctttagtaactccttggctcaaaggcgatatccttggtgagaaattggtcaacttggcagattgtctttgtaatgaggacttggaatccagggtatcttcagaatctcacttctcagaaagatggactcttctaagcttggtattatcccaacatgttaaaaatgattacttgattggagacgtatatgttgaaagaatcattgttagacttcatgaaactttattcaaaacaaagaaattatcagaagctgaaagcagtgactcatcagtgtcttttatctgtgatgtggcctataactatttcagctcagcgaaaggatgcttgctaatgccatcatctgaagatttattattaactctctttcagttatgtgctcagagcaaagaaaaaacacatttgccagattttcttatctgtaaactgaaaaatacttggctctctggtgtaaatttattggttcatcaaactgacagttcatataaagagagtaccttcctacatttgtctgctctgtggctgaagaaccaagttcaggcttcatctttggatatcaacagtctccaagtcctcttgtctgctgttgatgatttgctaaatacacttctagagagtgaagattcttatcttatgggagtttatattggaagtgtaatgccgaacgacagtgaatgggaaaagatgaggcagtctcttcctatgcagtggttacatagacctcttttagagggaagattgagtttgaattatgaatgtttcaaaacagattttaaggaacaggacataaagacacttcccagccatttgtgtacttcagcattattgagcaaaatggtcttaattgcactgagaaaggaaacagtcttagaaaataatgagcttgagaaaataattgcagaactgctttattcactgcagtggtgtgaagaattagataacccacctatttttctaattggattttgtgaaatacttcaaaaaatgaatattacgtatgataacttacgtgtacttggtaatacgtcgggccttttgcagctgttatttaacaggtccagagaacatggcacactgtggtctcttattattgctaagttgatcctttcccgaagcatttcatctgatgaagtaaaaccacattataagagaaaagaaagtttttttccactaactgaaggcaatttgcataccattcaaagtctatgtccatttttgtcaaaagaagaaaagaaagaatttagtgctcaatgtatacctgctcttttgggctggactaagaaagatctttgcagcactaatggaggttttggacatcttgccattttcaattcttgtctgcaaaccaaaagtatagatgatggagagctattacatggaatattaaaaatcataatatcctggaagaaagagcatgaagatatttttcttttcagttgtaatctatcagaagcaagtccagaggtactgggtgtaaatatagaaataatccggtttctttccctatttctgaaatactgctcatcccctttggcagagagtgagtgggacttcatcatgtgctccatgttggcttggttggagacaacaagtgagaatcaggcattgtattctattccacttgtgcaactgtttgcctgtgtcagctgtgatttggcctgtgacctcagtgctttctttgattccacaactctggataccattggcaatcttcctgtaaatctaatcagtgaatggaaagaatttttttcccaaggcatccacagtttgcttttacctattttggtgactgttacaggagaaaacaaagatgtgtctgaaacatcctttcagaatgcaatgctgaaacccatgtgtgaaacattaacgtatatctcaaaggaacagctattgagtcacaaacttcctgcaagattagttgctgaccaaaaaacaaacttaccagaatatctccagactttgttaaatacattggccccattactcctcttcagagctaggcctgtgcaaattgctgtttatcatatgctatacaaattgatgcctgaattaccacagtatgatcaggataatctaaagtcatacggagatgaagaagaagagccagccttgtcaccaccagcagcactgatgtctcttcttagcattcaagaggacttactagaaaatgttttggggtgtattcctgttggacagatagttactattaaaccactgagtgaagacttctgttatgttctgggataccttctcacttggaaattaatactaactttcttcaaagctgcatcatcacagcttcgggctttgtattccatgtatcttcggaaaacaaagagtttgaataaattgctctatcacctgttcaggcttatgccagaaaatccaacctatgcagagacagcagttgaggtcccaaataaggaccctaaaacattctttactgaggagctccagctgagtattagagaaacaacaatgcttccataccacattccacacttggcttgttcagtctatcatatgacattaaaagacttgcctgccatggttaggttgtggtggaatagcagtgagaagcgtgttttcaatattgtggatagatttacaagcaagtatgtcagcagtgttctttcttttcaagaaatatcttctgtacaaacaagtacacaactatttaatggcatgacggttaaagctcgagctactactcgagaggtaatggctacttatactattgaggacatagttattgaacttataatacaactgccttcaaattatccactgggttcaataatagtagaaagtgggaaaagagtaggagtagctgttcagcagtggcggaactggatgctgcagttaagcacttacctcacccatcagaatggaagtattatggaaggcttagctttatggaaaaataacgtagacaaacgttttgagggtgttgaagattgcatgatctgtttctcagtcattcacggtttcaactattcccttcccaaaaaagcctgtagaacatgcaagaaaaaattccattcagcctgcttgtacaaatggtttacatctagcaacaaatccacttgtccactgtgtcgtgagacgtttttctgagatttttttcactggaagggatccctgaagtacatcaaacaaaggcattggatttggatccgtctgaaagtgtggatgtggggaagccagtgagcattacttttaaataggaccttctctggaaaattattttggttaatgtaataatcctaaaatcaggtttacttaactttagattgctttgtaaatgtttggaaactttcttttacaaaagaatattacatatttgagagaaaatatttctattaatggtttaatttctttgtatatttaaaaataaatatgaaaaacccctaaattacagaattggaatttgtgaaaagattgcacaactatattattgataaacccattccgtttgttgatctgtgttttagaatagtccaagtgaagcaaaacgaactgagagagctgatttacatctatagatattttaagccttatttattagttatgacaataaattagtattctgatatttgtagattattttaatgataaaaatgacactaagctattaatacggcttgtcttaagatatctggaggcatgctctgaaatcctatataaaagagtttaaactgaactttaaggtgcctccatttatcaagggttatgaaactcagaaaattaaattcttgatgctgacctttttgcttgtgggagaattatttctatatattagtgaaatttgaattgtaaacttgtcagtgaatttatcactctgagcgagtctctagagggtgagaatttgagagaaatagtaatttgattatttcattcatgaagcggagtggtagttatccttctattgagagggaagaaataaatgagtattactgaaacttaaagatcagtggaaaaaaaaaacatttaaaaatgttgtaggagactttcaattttggaagcaaactgagctattcttaccagccaaagttatactaaataagagacttgggggagcaaatgtttttcagccttcagaaatgaaagttaaggattttagcactaggtaaaattcagtataataggctgaagtggagtaagtgaaaacctgccttttgccactcttaaaaattgtgcccaaaatataaaagtgtggaactttagaacttggaataattttattgcagtcttccattacatggaaatagcatatctaatatctaggttacttgagagaccagctaatcatctctgttgcacatgtttaattggcaaaaagcaattcatgataaataaaattactgctttccatctactgggtaaaatgactattgaaatagtatgaatgtggtcagaggattatagttgagagtgaagtactatgtgtgagttatagatctctcgaattatatttatagatgcagtgtcctgcccagttttgtttgcctcctacattttactgtaaaatatttattgtcttctagccttgagcctctgagggtcagtaagtgaagtacagatagcaaaattttactacctcgttaacccttttcttaaaatattctctatctttctatgtctctttctgacatagtaatcccaaaggattgtgttactccccgtgaaagttattacttttcctttaaaaatggttttataataagactgtttaaaacctttccagtattggtacatcttggcttctggcccaaaccccaagcagaaaagaaaatggaataatggagcattgtttttccacattagtattagggcatcagattcttggtgaaacactataattaagtagttataattaaataactgttcttcatacttaggactcttaatacatttctttaagacttgtaagtataattgtaaagcttgttaactgtttatatactaaagaaaaagctttacaagataagactgaaattcagaataccacatctgtacagcgttgacaactctaactaaaaggattacagcccttaaaattttagcttaaggacattttaaaattgcatgagattagcaaaattattaatttaaaaccccaaagtaaattgcaaattttaaaatttatttttgactcttttatcacatgctccaatgtatgtacataagtgtctgtggcttaaataatatgttgttatttgatacatttttgtggtgcaagtaattaatgttattatttgattgttataccatatgtgcccattaaaattctttttaattaaaaatatttcaaatatgcagaaaaataataatataaatgcccttgtacccttcacatactattttgccatatttgcttctgatttttaaataaataaaatgttactcttttgtacttc

SEQ ID NO: 338068 - DNA, 7220 bp, Homo sapiens
cagcaaatggacagggtgggtggcggaaaagggcccgggggaagttattacagggtgtcctcttccgccgccagaagccggaagttgtgtcccggacgtgtcaaccggggtctgagtgctcagagtacagctgcaaccgcgaccatgggcgggaagaacaagcagcgaactaaagggaacctgaggccttcaaacagtggccgagctgcagaactccttgccaaagaacagggaacagtgcctggatttattggttttggaacatctcagagtgacctaggctatgttcctgctattcaaggagctgaagaaattgacagtcttgtagattctgatttccgaatggtgctgcggaaactttcaaagaaagatgtcaccacaaaattaaaagctatgcaggaatttggaaccatgtgtacagagagagacacagaaactgtgaaaggagttcttccatattggccaagaattttttgcaaaatttcacttgatcatgaccgtcgcgtccgagaagccacacaacaagcttttgaaaaacttatccttaaagtaaagaaacagttggctccctacttaaaaagtttaatgggatattggctaatggctcagtgtgatacttacacaccagctgcgtttgcagcaaaagatgcatttgaagcggcttttcctccaagcaagcaacctgaagccatagcattttgtaaggatgaaattacaagtgtgctgcaggatcatcttataaaagaaacacctgatacactcagtgacccgcaaactgttccagaggaagaaagagaagctaaattctaccgggttgtaacttgttccttattggcattaaagagattactttgccttttacctgataatgagcttgattctctggaggagaaatttaagtctcttttatcacagaataagttttggaagtatggaaaacacagtgtacctcagattcgctcagcttattttgagttagtctctgcattgtgccagcgcattccacagttgatgaaagaggaagcatccaaagtgagcccatcagttctacttagcattgatgacagtgacccaattgtctgcccagctctctgggaagctgtactctatacacttacaactattgaggactgttggcttcatgtaaatgcaaaaaagagtgtgtttcccaagctatcaactgtgattcgtgaaggtggtcggggtctagctactgtcatatatccttaccttctgccattcatcagcaagctccctcagtccatcacaaatccaaagttggatttcttcaaaaatttcctcacgtctctagttgctgggctgtcaacagagagaactaaaaccagctcttcagagtcctcggcagtaatatctgctttttttgaatgcttacgttttataatgcagcaaaacttaggtgaggaagagattgaacagatgctcgtcaatgatcagttgatcccttttattgatgcagttctcaaagacccaggattgcaacatgggcagctatttaaccatttagcagaaactctaagttcctgggaagccaaagcagacacggaaaaagatgaaaaaacagctcacaacttggagaacgtactgatacatttctgggaaagactgtcagagatctgtgttgcgaaaatcagtgagccagaagctgatgttgagtccgttttgggtgtatctaacctattacaggtgcttcagaagccgaagagctcattgaagtcaagtaaaaaaaaaaatggtaaggttagatttgctgatgagatacttgaaagcaataaagagaatgaaaaatgtgtatcttcagaaggagagaagattgaaggctgggaattaacaactgaaccttctctcactcataattcttcaggccttttgtctcctctaaggaaaaaacctttggaagacttagtctgtaaactcgcagatataagtattaattatgtcaatgaacgaaagtcagagcaacatctaaggtttctttctactctgcttgactccttttcttcaagccgagtatttaaaatgctacttggtgatgaaaaacagagtattgtccaagccaaacctcttgaaatagccaagcttgtacaaaaaaatcctgcggtgcagtttttataccagaaactgataggttggctaaatgaagatcaaaggaaggattttggtttcctggtggacattttgtacagtgctctccggtgctgtgacaatgatatggaaagaaaaaaagtcttggatgatctaaccaaggtggacttgaaatggaattctcttcttaagattattgaaaaggcatgtcctagttcagataaacatgctttagtaactccttggctcaaaggcgatatccttggtgagaaattggtcaacttggcagattgtctttgtaatgaggacttggaatccagggtatcttcagaatctcacttctcagaaagatggactcttctaagcttggtattatcccaacatgttaaaaatgattacttgattggagacgtatatgttgaaagaatcattgttagacttcatgaaactttattcaaaacaaagaaattatcagaagctgaaagcagtgactcatcagtgtcttttatctgtgatgtggcctataactatttcagctcagcgaaaggatgcttgctaatgccatcatctgaagatttattattaactctctttcagttatgtgctcagagcaaagaaaaaacacatttgccagattttcttatctgtaaactgaaaaatacttggctctctggtgtaaatttattggttcatcaaactgacagttcatataaagagagtaccttcctacatttgtctgctctgtggctgaagaaccaagttcaggcttcatctttggatatcaacagtctccaagtcctcttgtctgctgttgatgatttgctaaatacacttctagagagtgaagattcttatcttatgggagtttatattggaagtgtaatgccgaacgacagtgaatgggaaaagatgaggcagtctcttcctatgcagtggttacatagacctcttttagagggaagattgagtttgaattatgaatgtttcaaaacagattttaaggaacaggacataaagacacttcccagccatttgtgtacttcagcattattgagcaaaatggtcttaattgcactgagaaaggaaacagtcttagaaaataatgagcttgagaaaataattgcagaactgctttattcactgcagtggtgtgaagaattagataacccacctatttttctaattggattttgtgaaatacttcaaaaaatgaatattacgtatgataacttacgtgtacttggtaatacgtcgggccttttgcagctgttatttaacaggtccagagaacatggcacactgtggtctcttattattgctaagttgatcctttcccgaagcatttcatctgatgaagtaaaaccacattataagagaaaagaaagtttttttccactaactgaaggcaatttgcataccattcaaagtctatgtccatttttgtcaaaagaagaaaagaaagaatttagtgctcaatgtatacctgctcttttgggctggactaagaaagatctttgcagcactaatggaggttttggacatcttgccattttcaattcttgtctgcaaaccaaaagtatagatgatggagagctattacatggaatattaaaaatcataatatcctggaagaaagagcatgaagatatttttcttttcagttgtaatctatcagaagcaagtccagaggtactgggtgtaaatatagaaataatccggtttctttccctatttctgaaatactgctcatcccctttggcagagagtgagtgggacttcatcatgtgctccatgttggcttggttggagacaacaagtgagaatcaggcattgtattctattccacttgtgcaactgtttgcctgtgtcagctgtgatttggcctgtgacctcagtgctttctttgattccacaactctggataccattggcaatcttcctgtaaatctaatcagtgaatggaaagaatttttttcccaaggcatccacagtttgcttttacctattttggtgactgttacaggagaaaacaaagatgtgtctgaaacatcctttcagaatgcaatgctgaaacccatgtgtgaaacattaacgtatatctcaaaggaacagctattgagtcacaaacttcctgcaagattagttgctgaccaaaaaacaaacttaccagaatatctccagactttgttaaatacattggccccattactcctcttcagagctaggcctgtgcaaattgctgtttatcatatgctatacaaattgatgcctgaattaccacagtatgatcaggataatctaaagtcatacggagatgaagaagaagagccagccttgtcaccaccagcagcactgatgtctcttcttagcattcaagaggacttactagaaaatgttttggggtgtattcctgttggacagatagttactattaaaccactgagtgaagacttctgttatgttctgggataccttctcacttggaaattaatactaactttcttcaaagctgcatcatcacagcttcgggctttgtattccatgtatcttcggaaaacaaagagtttgaataaattgctctatcacctgttcaggcttatgccagaaaatccaacctatgcagagacagcagttgaggtcccaaataaggaccctaaaacattctttactgaggagctccagctgagtattagagaaacaacaatgcttccataccacattccacacttggcttgttcagtctatcatatgacattaaaagacttgcctgccatggttaggttgtggtggaatagcagtgagaagcgtgttttcaatattgtggatagatttacaagcaagtatgtcagcagtgttctttcttttcaagaaatatcttctgtacaaacaagtacacaactatttaatggcatgacggttaaagctcgagctactactcgagaggtaatggctacttatactattgaggacatagttattgaacttataatacaactgccttcaaattatccactgggttcaataatagtagaaagtgggaaaagagtaggagtagctgttcagcagtggcggaactggatgctgcagttaagcacttacctcacccatcagaatggaagtattatggaaggcttagctttatggaaaaataacgtagacaaacgttttgagggtgttgaagattgcatgatctgtttctcagtcattcacggtttcaactattcccttcccaaaaaagcctgtagaacatgcaagaaaaaattccattcagcctgcttgtacaaatggtttacatctagcaacaaatccacttgtccactgtgtcgtgagacgtttttctgagatttttttcactggaagggatccctgaagtacatcaaacaaaggcattggatttggatccgtctgaaagtgtggatgtggggaagccagtgagcattacttttaaataggaccttctctggaaaattattttggttaatgtaataatcctaaaatcaggtttacttaactttagattgctttgtaaatgtttggaaactttcttttacaaaagaatattacatatttgagagaaaatatttctattaatggtttaatttctttgtatatttaaaaataaatatgaaaaacccctaaattacagaattggaatttgtgaaaagattgcacaactatattattgataaacccattccgtttgttgatctgtgttttagaatagtccaagtgaagcaaaacgaactgagagagctgatttacatctatagatattttaagccttatttattagttatgacaataaattagtattctgatatttgtagattattttaatgataaaaatgacactaagctattaatacggcttgtcttaagatatctggaggcatgctctgaaatcctatataaaagagtttaaactgaactttaaggtgcctccatttatcaagggttatgaaactcagaaaattaaattcttgatgctgacctttttgcttgtgggagaattatttctatatattagtgaaatttgaattgtaaacttgtcagtgaatttatcactctgagcgagtctctagagggtgagaatttgagagaaatagtaatttgattatttcattcatgaagcggagtggtagttatccttctattgagagggaagaaataaatgagtattactgaaacttaaagatcagtggaaaaaaaaaacattttactgtaaaatatttattgtcttctagccttgagcctctgagggtcagtaagtgaagtacagatagcaaaattttactacctcgttaacccttttcttaaaatattctctatctttctatgtctctttctgacatagtaatcccaaaggattgtgttactccccgtgaaagttattacttttcctttaaaaatggttttataataagactgtttaaaacctttccagtattggtacatcttggcttctggcccaaaccccaagcagaaaagaaaatggaataatggagcattgtttttccacattagtattagggcatcagattcttggtgaaacactataattaagtagttataattaaataactgttcttcatacttaggactcttaatacatttctttaagacttgtaagtataattgtaaagcttgttaactgtttatatactaaagaaaaagctttacaagataagactgaaattcagaataccacatctgtacagcgttgacaactctaactaaaaggattacagcccttaaaattttagcttaaggacattttaaaattgcatgagattagcaaaattattaatttaaaaccccaaagtaaattgcaaattttaaaatttatttttgactcttttatcacatgctccaatgtatgtacataagtgtctgtggcttaaataatatgttgttatttgatacatttttgtggtgcaagtaattaatgttattatttgattgttataccatatgtgcccattaaaattctttttaattaaaaatatttcaaatatgcagaaaaataataatataaatgcccttgtacccttcacatactattttgccatatttgcttctgatttttaaataaataaaatgttactcttttgtacttc

SEQ ID NO: 338069 - DNA, 5027 bp, Homo sapiens
cagcaaatggacagggtgggtggcggaaaagggcccgggggaagttattacagggtgtcctcttccgccgccagaagccggaagttgtgtcccggacgtgtcaaccggggtctgagtgctcagagtacagctgcaaccgcgaccatgggcgggaagaacaagcagcgaactaaagggaacctgaggccttcaaacagtggccgagctgcagaactccttgccaaagaacagggaacagtgcctggatttattggttttggaacatctcagagtgacctaggctatgttcctgctattcaaggagctgaagaaattgacagtcttgtagattctgatttccgaatggtgctgcggaaactttcaaagaaagatgtcaccacaaaattaaaagctatgcaggaatttggaaccatgtgtacagagagagacacagaaactgtgaaaggagttcttccatattggccaagaattttttgcaaaatttcacttgatcatgaccgtcgcgtccgagaagccacacaacaagcttttgaaaaacttatccttaaagtaaagaaacagttggctccctacttaaaaagtttaatgggatattggctaatggctcagtgtgatacttacacaccagctgcgtttgcagcaaaagatgcatttgaagcggcttttcctccaagcaagcaacctgaagccatagcattttgtaaggatgaaattacaagtgtgctgcaggatcatcttataaaagaaacacctgatacactcagtgacccgcaaactgttccagaggaagaaagagaagctaaattctaccgggttgtaacttgttccttattggcattaaagagattactttgccttttacctgataatgagcttgattctctggaggagaaatttaagtctcttttatcacagaataagttttggaagtatggaaaacacagtgtacctcagattcgctcagcttattttgagttagtctctgcattgtgccagcgcattccacagttgatgaaagaggaagcatccaaagtgagcccatcagttctacttagcattgatgacagtgacccaattgtctgcccagctctctgggaagctgtactctatacacttacaactattgaggactgttggcttcatgtaaatgcaaaaaagagtgtgtttcccaagctatcaactgtgattcgtgaaggtggtcggggtctagctactgtcatatatccttaccttctgccattcatcagcaagctccctcagtccatcacaaatccaaagttggatttcttcaaaaatttcctcacgtctctagttgctgggctgtcaacagagagaactaaaaccagctcttcagagtcctcggcagtaatatctgctttttttgaatgcttacgttttataatgcagcaaaacttaggtgaggaagagattgaacagatgctcgtcaatgatcagttgatcccttttattgatgcagttctcaaagacccaggattgcaacatgggcagctatttaaccatttagcagaaactctaagttcctgggaagccaaagcagacacggaaaaagatgaaaaaacagctcacaacttggagaacgtactgatacatttctgggaaagactgtcagagatctgtgttgcgaaaatcagtgagccagaagctgatgttgagtccgttttgggtgtatctaacctattacaggtgcttcagaagccgaagagctcattgaagtcaagtaaaaaaaaaaatggtaaggttagatttgctgatgagatacttgaaagcaataaagagaatgaaaaatgtgtatcttcagaaggagagaagattgaaggctgggaattaacaactgaaccttctctcactcataattcttcaggccttttgtctcctctaaggaaaaaacctttggaagacttagtctgtaaactcgcagatataagtattaattatgtcaatgaacgaaagtcagagcaacatctaaggtttctttctactctgcttgactccttttcttcaagccgagtatttaaaatgctacttggtgatgaaaaacagagtattgtccaagccaaacctcttgaaatagccaagcttgtacaaaaaaatcctgcggtgcagtttttataccagaaactgataggttggctaaatgaagatcaaaggaaggattttggtttcctggtggacattttgtacagtgctctccggtgctgtgacaatgatatggaaagaaaaaaagtcttggatgatctaaccaaggtggacttgaaatggaattctcttcttaagattattgaaaaggcatgtcctagttcagataaacatgctttagtaactccttggctcaaaggcgatatccttggtgagaaattggtcaacttggcagattgtctttgtaatgaggacttggaatccagggtatcttcagaatctcacttctcagaaagatggactcttctaagcttggtattatcccaacatgttaaaaatgattacttgattggagacgtatatgttgaaagaatcattgttagacttcatgaaactttattcaaaacaaagaaattatcagaagctgaaagcagtgactcatcagtgtcttttatctgtgatgtggcctataactatttcagctcagcgaaaggatgcttgctaatgccatcatctgaagatttattattaactctctttcagttatgtgctcagagcaaagaaaaaacacatttgccagattttcttatctgtaaactgaaaaatacttggctctctggtgtaaatttattggttcatcaaactgacagttcatataaagagagtaccttcctacatttgtctgctctgtggctgaagaaccaagttcaggcttcatctttggatatcaacagtctccaagtcctcttgtctgctgttgatgatttgctaaatacacttctagagagtgaagattcttatcttatgggagtttatattggaagtgtaatgccgaacgacagtgaatgggaaaagatgaggcagtctcttcctatgcagtggttacatagacctcttttagagggaagattgagtttgaattatgaatgtttcaaaacagattttaaggaacaggacataaagacacttcccagccatttgtgtacttcagcattattgagcaaaatggtcttaattgcactgagaaaggaaacagtcttagaaaataatgagcttgagaaaataattgcagaactgctttattcactgcagtggtgtgaagaattagataacccacctatttttctaattggattttgtgaaatacttcaaaaaatgaatattacgtatgataacttacgtgtacttggtaatacgtcgggccttttgcagctgttatttaacaggtccagagaacatggcacactgtggtctcttattattgctaagttgatcctttcccgaagcatttcatctgatgaagtaaaaccacattataagagaaaagaaagtttttttccactaactgaaggcaatttgcataccattcaaagtctatgtccatttttgtcaaaagaagaaaagaaagaatttagtgctcaatgtatacctgctcttttgggctggactaagaaagatctttgcagcactaatggaggttttggacatcttgccattttcaattcttgtctgcaaaccaaaagtatagatgatggagagctattacatggaatattaaaaatcataatatcctggaagaaagagcatgaagatatttttcttttcagttgtaatctatcagaagcaagtccagaggtactgggtgtaaatatagaaataatccggtttctttccctatttctgaaatactgctcatcccctttggcagagagtgagtgggacttcatcatgtgctccatgttggcttggttggagacaacaagtgagaatcaggcattgtattctattccacttgtgcaactgtttgcctgtgtcagctgtgatttggcctgtgacctcagtgctttctttgattccacaactctggataccattggcaatcttcctgtaaatctaatcagtgaatggaaagaatttttttcccaaggcatccacagtttgcttttacctattttggtgactgttacaggagaaaacaaagatgtgtctgaaacatcctttcagaatgcaatgctgaaacccatgtgtgaaacattaacgtatatctcaaaggaacagctattgagtcacaaacttcctgcaagattagttgctgaccaaaaaacaaacttaccagaatatctccagactttgttaaatacattggccccattactcctcttcagagctaggcctgtgcaaattgctgtttatcatatgctatacaaattgatgcctgaattaccacagtatgatcaggataatctaaagtcatacggagatgaagaagaagagccagccttgtcaccaccagcagcactgatgtctcttcttagcattcaagaggacttactagaaaatgttttggggtgtattcctgttggacagatagttactattaaaccactgagtgaagacttctgttatgttctgggataccttctcacttggaaattaatactaactttcttcaaagctgcatcatcacaggtaaataaatatgtgacaactttcgatagttctgtcctaatatgcttctgatactgttctaaataccttcctttcagtttaataaaaggaaaatccttatgttttaatctcatcttttaaaatttattttattttgtttatttgagacagggtctcactctgttgcctgtgctggaatgcagtggcacaatctcggctcactgcaacctctgcctcctaggctcaaccgatcttctcactaagtagctgggactacaggtgcaagccaccatgcctggctaatttttatatttttgtagagatggggtttcaccgtgttgcccagactggtctcaaactcctgagctcaagcgatccacccaccttggcctcccaaaatgctgggattacaggcatgagcc

SEQ ID NO: 338070 - DNA, 3086 bp, Homo sapiens
ttctttgctctccaccagcttcgggctttgtattccatgtatcttcggaaaacaaagagtttgaataaattgctctatcacctgttcaggcttatgccagaaaatccaacctatgcagagacagcagttgaggtcccaaataaggaccctaaaacattctttactgaggagctccagctgagtattagagaaacaacaatgcttccataccacattccacacttggcttgttcagtctatcatatgacatttttcaatattgtggatagatttacaagcaagtatgtcagcagtgttctttcttttcaagaaatatcttctgtacaaacaagtacacaactatttaatggcatgacggttaaagctcgagctactactcgagaggtaatggctacttatactattgaggacatagttattgaacttataatacaactgccttcaaattatccactgggttcaataatagtagaaagtgggaaaagagtaggagtagctgttcagcagtggcggaactggatgctgcagttaagcacttacctcacccatcagaatggaagtattatggaaggcttagctttatggaaaaataacgtagacaaacgttttgagggtgttgaagattgcatgatctgtttctcagtcattcacggtttcaactattcccttcccaaaaaagcctgtagaacatgcaagaaaaaattccattcagcctgcttgtacaaatggtttacatctagcaacaaatccacttgtccactgtgtcgtgagacgtttttctgagatttttttcactggaagggatccctgaagtacatcaaacaaaggcattggatttggatccgtctgaaagtgtggatgtggggaagccagtgagcattacttttaaataggaccttctctggaaaattattttggttaatgtaataatcctaaaatcaggtttacttaactttagattgctttgtaaatgtttggaaactttcttttacaaaagaatattacatatttgagagaaaatatttctattaatggtttaatttctttgtatatttaaaaataaatatgaaaaacccctaaattacagaattggaatttgtgaaaagattgcacaactatattattgataaacccattccgtttgttgatctgtgttttagaatagtccaagtgaagcaaaacgaactgagagagctgatttacatctatagatattttaagccttatttattagttatgacaataaattagtattctgatatttgtagattattttaatgataaaaatgacactaagctattaatacggcttgtcttaagatatctggaggcatgctctgaaatcctatataaaagagtttaaactgaactttaaggtgcctccatttatcaagggttatgaaactcagaaaattaaattcttgatgctgacctttttgcttgtgggagaattatttctatatattagtgaaatttgaattgtaaacttgtcagtgaatttatcactctgagcgagtctctagagggtgagaatttgagagaaatagtaatttgattatttcattcatgaagcggagtggtagttatccttctattgagagggaagaaataaatgagtattactgaaacttaaagatcagtggaaaaaaaaaacatttaaaaatgttgtaggagactttcaattttggaagcaaactgagctattcttaccagccaaagttatactaaataagagacttgggggagcaaatgtttttcagccttcagaaatgaaagttaaggattttagcactaggtaaaattcagtataataggctgaagtggagtaagtgaaaacctgccttttgccactcttaaaaattgtgcccaaaatataaaagtgtggaactttagaacttggaataattttattgcagtcttccattacatggaaatagcatatctaatatctaggttacttgagagaccagctaatcatctctgttgcacatgtttaattggcaaaaagcaattcatgataaataaaattactgctttccatctactgggtaaaatgactattgaaatagtatgaatgtggtcagaggattatagttgagagtgaagtactatgtgtgagttatagatctctcgaattatatttatagatgcagtgtcctgcccagttttgtttgcctcctacattttactgtaaaatatttattgtcttctagccttgagcctctgagggtcagtaagtgaagtacagatagcaaaattttactacctcgttaacccttttcttaaaatattctctatctttctatgtctctttctgacatagtaatcccaaaggattgtgttactccccgtgaaagttattacttttcctttaaaaatggttttataataagactgtttaaaacctttccagtattggtacatcttggcttctggcccaaaccccaagcagaaaagaaaatggaataatggagcattgtttttccacattagtattagggcatcagattcttggtgaaacactataattaagtagttataattaaataactgttcttcatacttaggactcttaatacatttctttaagacttgtaagtataattgtaaagcttgttaactgtttatatactaaagaaaaagctttacaagataagactgaaattcagaataccacatctgtacagcgttgacaactctaactaaaaggattacagcccttaaaattttagcttaaggacattttaaaattgcatgagattagcaaaattattaatttaaaaccccaaagtaaattgcaaattttaaaatttatttttgactcttttatcacatgctccaatgtatgtacataagtgtctgtggcttaaataatatgttgttatttgatacatttttgtggtgcaagtaattaatgttattatttgattgttataccatatgtgcccattaaaattctttttaattaaaaatatttcaaatatgcagaaaaataataatataaatgcccttgtacccttcacatactattttgccatatttgcttctgatttttaaataaataaaatgttactcttttgtacttc

SEQ ID NO: 338071 - DNA, 670 bp, Homo sapiens
gaagttcctacatgtcagaattctctggggatttgaacagaggaattgaggactgtcttggaatcccccatgaagaactactaaagatatgcaaatacatacaagagacacaggaaactgaaagaatgacactacgattcagccatattagccttctggccattcctcacattctgggcagactcctgcctttgcatctgagcatttttcctttgcagggaatgcttgagtcccacatttccccgtggctgactctgttaccttcttcaagtctctgctcaaataggtttaaccaaccaattggcaacaccacctctcaattcctggcacttcctaaccccttccctgttctatttcattcaccatcttatgtactacttaggtatttgctttttgtctttctcccttccctagaatgtaagctctatgatgttggagattctcaaggatctttttcactgcgtcctcggtacctagaggatcatagaagaggcactctgtgaacatttgttgaatgaatgtcgaacccttgtaccaggatgatctgataagcctcagcacatctcagagaacatgctggttgctatcatcttttccattgcacagagagctacactgtcaagcagtttaaccagttgcctagataccactctgaccaggcatgaacagg

SEQ ID NO: 338072 - DNA, 927 bp, Homo sapiens
catgacttattttgtcctagagattccaatctgctggacactcagaaactttcacaacttctatttttcacattttttcatattttaggcttcagtgcagaaggattaaaagtaatggctaagttttctaatgctgttatttattttttcttgaggctttatggtcactaaaaaagtaacaatatatagtacgtaaaaaaacttaaagatactgtggcttataaaagcgtatcttttttctgagaacaaaattagccaattaaataataaaaccatcaagagatgtcaccagtcaatgatgatggggcaaaaattgttctgcattccgaggagggagaaatcgatgcaagcagaagtgattaaacattcacatcttggagctaaatgacctcctaggatggatgggttttatagaggtggagaggtggggggagggtgctggatgaaataactggaaaatctcctttttcttactatttttcttcagtccctttataggcacaactgcttaaagaaaccagatggccccaggatggtgccagagcttcctgaccccttatcagataccagaggaagataagactgcagagcggaacaggataggcaacccctggttggcttcagatcattatcatgtcgttataatgctaaaattccttctcctaaaagaaagtctccaccattttgtgtacatgtgatgtatgaagacgtatgtttatgaattgtgtgtgcacatttagagtctcactttgcacatgctaacattcctctcctgtcccacacctagtcctaaaaactccatgccttctagtgtttggggagaaggggcatttagagttaagagccccttccctggccagcgactaaaacctggttaccgtttacagttgaatgtcctctgcgtaaatcgatacaaagtggggaaag

SEQ ID NO: 338073 - DNA, 107 bp, Homo sapiens
tatgattccacttttcgagtcagtgccccagatggtttgctcattcattcattcaccccaaaaaatgtttattgttcacctactatgtggcaagcatcacactaggt

SEQ ID NO: 338074 - DNA, 604 bp, Homo sapiens
atcagttctatcaccaagtcttctaagtactctctccaaaatttacccccaatatattgaattcctctccatttctacagctcccacccaaatcaagccaccatcacctttctcctgggctactatagtagccccttgactggtcaactgcatttatgcttacctttctaaagattactctccacagcaacagcaaatggtgtgtaaaaaacgtaaactggttactattactattcccccagtctaaatgaccaaccaaataaaaatctttcagtaccttctcactgaactgagaatgaaataacaacctgcagcttacagcgctgtatctggctctcatttctccaatcttatttcatttctctttaccccttatcagctacttcacttcggccataccagcctaatctctttcttcgttaagactcagttcccatctcatggcattacattcttgacattccaccccacctcctgaacaatactttcttcttctggatgtcagccaggtctcaagagcagcctcccaatattgccactcacaacaattcatcatttctgcctatttgtttccttcacagaactgattacaatctgaaattag

SEQ ID NO: 338075 - DNA, 312 bp, Homo sapiens
atcagttctatcaccaagtcttctaagtactctctccaaaatttacccccaatatattgaattcctctccatttctacagctcccacccaaatcaagccaccatcacctttctcctgggctactatagtagccccttgactggtcaactgcatttatgcttacctttctaaagattactctccacagcaacagcaaatggtgtgtaaaaaacgtaaactggttactattactattcccccagtctgccatgtaagtcttgtcacttccacgttgcacaatgttttacgtaagtctggcttcgtattctccac

SEQ ID NO: 338076 - DNA, 602 bp, Homo sapiens
agaaattcttttctactttaattcccatctataggaattctagtctgctctacttactatttccttcccatcccaagaacccaatcacatcctaggctgccgcacagtttctcacaatatgtatcagtttaacatcttcaactacactccctggcttcagcaatgtcactcccaaaagagagggccattagcccgtgatcatttgacatcaagtaaacagcatcacaatctaaccagatgcttaagccaaaaacttcagaatcatcctcccttcttaactcccacatcagttctatcaccaagtcttctaagtactctctccaaaatttacccccaatatattgaattcctctccatttctacagctcccacccaaatcaagccaccatcacctttctcctgggctactatagtagccccttgactggtcaactgcatttatgcttacctttctaaagattactctccacagcaacagcaaatggtgtgtaaaaaacgtaaactggttactattactattcccccagtctaaatgaccaaccaaataaaaatctttcagtaccttctcactgaactgagaatgaaataacaacctgcagctt

SEQ ID NO: 338077 - DNA, 239 bp, Homo sapiens
tgctgggattataggcgtgagcccccgaacccggccactcccagctaagtttaaattttttgtttgtttgttcgtttgtttttattttttgagacagagtctcccgcccaggctggagcgcagatcactgcatccttgacctcccaggcttaagccatcctccccactcagcctcccaagtagctgggattacaggtgtgtgccactatgcttggctaagttgtgtattttttgtagag

SEQ ID NO: 338078 - DNA, 2642 bp, Homo sapiens
ggccgctcttgcccggcgtggcgactcgctagcgtcagcagcgccgcagccggacgagaaagcggaagatggcggcggcggccgggaggccgtgaggagagcggcggctgcgagggcggccgatggcggccgggaggcgccctcggacacttgcgggtcgttagggcgcgacgctgggaggcatgtcggagcacgtggagcccgcagctccggggcccgggcccaacggcggcggcggcggcccggcccccgcgcgcgggcctcgcacccccaatctcaaccccaaccccctcatcaacgtgcgcgaccggctcttccacgcgctgttcttcaagatggctgtcacctattcgcggctcttcccgcccgccttccgccgtctcttcgagttcttcgtgctgctcaaggccctgtttgtgctcttcgtcctggcctacatccacatcgtcttctcccgctcgcccatcaactgcctggagcacgtgcgtgacaagtggccgcgtgagggcatcctgcgtgtggaagtgcggcacaactcgagccgcgcgcccgtcttcctacagttctgtgacagcggcggccgcgggagcttcccgggcctggccgtggaaccaggcagcaacctggacatggaagatgaggaggaggaagagctgaccatggagatgtttgggaacagctccatcaagtttgagctggacatcgagcccaaggtgttcaagccgccgagtagcacagaggccctgaatgacagccaggagttccccttccccgagacgcccaccaaagtgtggccgcaggacgagtacatcgtggagtactcactagagtatggcttccttcgcctgtcgcaggccacccgccagcgcctgagcatccccgtcatggtggtcaccctggaccccacgcgggaccagtgcttcggggaccgcttcagccgcctgctgctggatgagttcctgggctacgatgacatcctcatgtccagcgtgaagggcctggccgagaacgaggagaacaagggcttcctgcggaatgtggtgtcgggcgagcactaccgctttgtgagcatgtggatggcgcggacgtcctacctggccgccttcgccatcatggtcatcttcacgctgagcgtgtccatgctgctgcggtactcacaccaccagatcttcgtcttcatcgtggacctgctgcagatgctggagatgaacatggccatcgccttccccgcagcgcccctgctgaccgtcatcctggccctcgtcgggatggaggccatcatgtcggagttcttcaacgacaccaccaccgccttctacatcatcctcatcgtgtggctcgcggaccagtatgacgccatctgctgccacaccagcaccagcaagcggcattggctgcgcattccatgatctacttcttccaccactacgagctgcctgccatcctgcagcaggtccgcatccaggagatgctgcttcaggcgccgccactgggccccgggacccccacggcgctgcccgatgacatgaacaacaactcgggcgccccggctacagcccctgactctgccggccagccccccgccctgggccccgtctcgcccggggccagcgggagtcccgggcctgtggcagcggcgcccagctccctggtggccgcggcagcctcagtggcagcagctgccggtggtgacctgggttggatggcagagaccgctgccatcatcacagacgcctccttcctgtccggcctgagcgcctccctcctggagcggcgtccagccagcccgctgggccctgctgggggcctcccccacgccccccaggacagtgtccccccgagtgactccgcagcttctgacacaactcccctgggggctgcggtaggcgggcctagcccggcctccatggccccaacggaggcgccctcggaggtggggtcctgagccgcacagctgagccgcctctgacccctgctggctgggcctgaccttcccgagcccgtgggggtgggggaggccagccacctccttcctctgggactgcccagcctgtgtcgggggctttcagggtttcgtggggtttgcccggaaggcggctttcctccccctggtgtgaggtcgcgcccgaggcttgtacccgctagtgaggtgtttgagctggtcagcaaggagagggggtggggttccgcggaaggttctggaggggtcttggtaggtctgcagtgaaccgtcctgaggatggagtggggtcccatggtgcaggtctctgagcaaggcggaggtgtggaggagaggccggcttggggtggggcctcgcgccctagtgccggccggcctcagcccggctctgcctggtgctccctgcagtgccttctccatggccccgccctccccgcgtgtgcgccaggcctggggtccccgggagagcagagcttgcgcctcgggcatagggacgtggggtgcaggcgccaacatcagtggcagcagccagggccgtggtccagtcccactcggggatggagtgggccggcggccaaaccagtcactcggggaggaatgcggaggagcgctcattccattctatttaattgcagtgtacaaaattgtgtttgtatatagaataaactgtctgttgacagcg

SEQ ID NO: 338079 - DNA, 454 bp, Homo sapiens
accgttgatagttgtgaggtctaagggtacatctagtagtatggagagcttccatacctgcaggcgcgtgcgcaaggcagtcgtgtttcagtatatgctgatctggtagatgagagcctagcactgtaggatgacgagtcggccttagtcacggtgttgactgatgagtgcctgtgctattgccttctccatggccccgccctccccgcgtgtgcgccaggcctggggtccccgggagagcagagcttgcgcctcgggcatagggacgtggggtgcaggcgccaacatcagtggcagcagccagggccgtggtccagtcccactcggggatggagtgggccggcggccaaaccagtcactcggggaggaatgcggaggagcgctcattccattctatttaattgcagtgtacaaaattgtgtttgtatatagaataaactgtctgttgacagcg

SEQ ID NO: 338080 - DNA, 461 bp, Homo sapiens
  misc_feature (420)..(421): n is a, c, g, or t
  misc_feature (427)..(427): n is a, c, g, or t
  misc_feature (446)..(446): n is a, c, g, or t
ggcttcaggccacgcttcaggacagcctgcagcagcctggcacgcacgtcctccgccgagtacaatgtcaacaacctggtgagccctgtgctgttccaggaggccctgtggcacgtgcctgagcacgcggtggtgctggagatcgcgcccccgcctgctgctggatgagttcctgggctacgatgacatcctcatgtccagcgtgaagggcctggccgagaacgaggagaacaagggcttcctgcggaatgtggtgtcgggcgagcactaccgctttgtgagcatgtggatggcgcggacgtcctacctggccgccttcgccatcatggtcatcttcacgctgagcgtgtccatgctgctgcggtactcacaccaccagatcttcgtcttcatcgtggacctgctgcagatgctggaatnnacatgncatcccgtcccaaagcaanaggatcgtctagatg

SEQ ID NO: 338081 - DNA, 3167 bp, Homo sapiens
  misc_feature (2759)..(2759): n is a, c, g, or t
  misc_feature (2766)..(2766): n is a, c, g, or t
  misc_feature (2802)..(2802): n is a, c, g, or t
ggccgctcttgcccggcgtggcgactcgctagcgtcagcagcgccgcagccggacgagaaagcggaagatggcggcggcggccgggaggccgtgaggagagcggcggctgcgagggcggccgatggcggccgggaggcgccctcggacacttgcgggtcgttagggcgcgacgctgggaggcatgtcggagcacgtggagcccgcagctccggggcccgggcccaacggcggcggcggcggcccggcccccgcgcgcgggcctcgcacccccaatctcaaccccaaccccctcatcaacgtgcgcgaccggctcttccacgcgctgttcttcaagatggctgtcacctattcgcggctcttcccgcccgccttccgccgtctcttcgagttcttcgtgctgctcaaggccctgtttgtgctcttcgtcctggcctacatccacatcgtcttctcccgctcgcccatcaactgcctggagcacgtgcgtgacaagtggccgcgtgagggcatcctgcgtgtggaagtgcggcacaactcgagccgcgcgcccgtcttcctacagttctgtgacagcggcggccgcgggagcttcccgggcctggccgtggaaccaggcagcaacctggacatggaagatgaggaggaggaagagctgaccatggagatgtttgggaacagctccatcaagtttgagctggacatcgagcccaaggtgttcaagccgccgagtagcacagaggccctgaatgacagccaggagttccccttccccgagacgcccaccaaagtgtggccgcaggacgagtacatcgtggagtactcactagagtatggcttccttcgcctgtcgcaggccacccgccagcgcctgagcatccccgtcatggtggtcaccctggaccccacgcgggaccagtgcttcggggaccgcttcagccgcctgctgctggatgagttcctgggctacgatgacatcctcatgtccagcgtgaagggcctggccgagaacgaggagaacaagggcttcctgcggaatgtggtgtcgggcgagcactaccgctttgtgagcatgtggatggcgcggacgtcctacctggccgccttcgccatcatggtcatcttcacgctgagcgtgtccatgctgctgcggtactcacaccaccagatcttcgtcttcatcgtggacctgctgcagatgctggagatgaacatggccatcgccttccccgcagcgcccctgctgaccgtcatcctggccctcgtcgggatggaggccatcatgtcggagttcttcaacgacaccaccaccgccttctacatcatcctcatcgtgtggctcgcggaccagtatgacgccatctgctgccacaccagcaccagcaagcggcattggctgcggttcttctatctctaccacttcgccttctatgcctatcactaccgcttcaatgggcagtatagcagcctggccctggtcacctcctggctcttcatccagcattccatgatctacttcttccaccactacgagctgcctgccatcctgcagcaggtccgcatccaggagatgctgcttcaggcgccgccactgggccccgggacccccacggcgctgcccgatgacatgaacaacaactcgggcgccccggctacagcccctgactctgccggccagccccccgccctgggccccgtctcgcccggggccagcgggagtcccgggcctgtggcagcggcgcccagctccctggtggccgcggcagcctcagtggcagcagctgccggtggtgacctgggttggatggcagagaccgctgccatcatcacagacgcctccttcctgtccggcctgagcgcctccctcctggagcggcgtccagccagcccgctgggccctgctgggggcctcccccacgccccccaggacagtgtccccccgagtgactccgcagcttctgacacaactcccctgggggctgcggtaggcgggcctagcccggcctccatggccccaacggaggcgccctcggaggtggggtcctgagccgcacagctgagccgcctctgacccctgctggctgggcctgaccttcccgagcccgtgggggtgggggaggccagccacctccttcctctgggactgcccagcctgtgtcgggggctttcagggtttcgtggggtttgcccggaaggcggctttcctccccctggtgtgaggtcgcgcccgaggcttgtacccgctagtgaggtgtttgagctggtcagcaaggagagggggtggggttccgcggaaggttctggaggggtcttggtaggtctgcagtgaaccgtcctgaggatggagtggggtcccatggtgcaggtctctgagcaaggcggaggtgtggaggagaggccggcttggggtggggcctcgcgccctagtgccggccggcctcagcccggctctgcctggtgctccctgcagtgccttctccatggccccgccctccccgcgtgtgcgccaggcctggggtccccgggagagcagagcttgcgcctcgggcatagggacgtggggtgcaggcgccaacatcagtggcagcagccagggccgtggtccagtcccactcggggatggagtgggccggcggccaaaccagtcactcggggaggaatgcggaggagcgctcattccattctatttaattgcagtgtacaaaattgtgtttgtatatagaataaactgtctgttgacagcgaaaaaaaaaaaaaacanaaaaaanaaaaaaaaaaaaaaaaaaaaaaaaaaaaaaaaaaanaaaaaaaaaaaaaaaaaaaaaaaaaaaaaaaaaaaaaaaaaaaaaagggggggggggggggcgtaaacacaacctcctcggacggggcacccacaatcgataggccaccgcccccagctctttctaagaagaaagacggcggccgccaccaccagaggcgagcagtcaaaacaagacgaagagcgccacgcggcgcgcgcgactcaaaaaccccacggtcgggggtgagaaaaaaccacagtcgcggatgaaactctggcagagaggaccaccccaatccggggggggggggaaacgaacgaggcggacccaccaccccagcaaatatcagcgcggcgaggaaaaaaacacacgcgggcggtcac

SEQ ID NO: 338082 - DNA, 3338 bp, Homo sapiens
  misc_feature (2930)..(2930): n is a, c, g, or t
  misc_feature (2937)..(2937): n is a, c, g, or t
  misc_feature (2973)..(2973): n is a, c, g, or t
ggccgctcttgcccggcgtggcgactcgctagcgtcagcagcgccgcagccggacgagaaagcggaagatggcggcggcggccgggaggccgtgaggagagcggcggctgcgagggcggccgatggcggccgggaggcgccctcggacacttgcgggtcgttagggcgcgacgctgggaggcatgtcggagcacgtggagcccgcagctccggggcccgggcccaacggcggcggcggcggcccggcccccgcgcgcgggcctcgcacccccaatctcaaccccaaccccctcatcaacgtgcgcgaccggctcttccacgcgctgttcttcaagatggctgtcacctattcgcggctcttcccgcccgccttccgccgtctcttcgagttcttcgtgctgctcaaggccctgtttgtgctcttcgtcctggcctacatccacatcgtcttctcccgctcgcccatcaactgcctggagcacgtgcgtgacaagtggccgcgtgagggcatcctgcgtgtggaagtgcggcacaactcgagccgcgcgcccgtcttcctacagttctgtgacagcggcggccgcgggagcttcccgggcctggccgtggaaccaggcagcaacctggacatggaagatgaggaggaggaagagctgaccatggagatgtttgggaacagctccatcaagtttgagctggacatcgagcccaaggtgttcaagccgccgagtagcacagaggccctgaatgacagccaggagttccccttccccgagacgcccaccaaagtgtggccgcaggacgagtacatcgtggagtactcactagagtatggcttccttcgcctgtcgcaggccacccgccagcgcctgagcatccccgtcatggtggtcaccctggaccccacgcgggaccagtgcttcggggaccgcttcagccgcctgctgctggatgagttcctgggctacgatgacatcctcatgtccagcgtgaagggcctggccgagaacgaggagaacaagggcttcctgcggaatgtggtgtcgggcgagcactaccgctttgtgagcatgtggatggcgcggacgtcctacctggccgccttcgccatcatggtcatcttcacgctgagcgtgtccatgctgctgcggtactcacaccaccagatcttcgtcttcatcgtggacctgctgcagatgctggagatgaacatggccatcgccttccccgcagcgcccctgctgaccgtcatcctggccctcgtcgggatggaggccatcatgtcggagttcttcaacgacaccaccaccgccttctacatcatcctcatcgtgtggctcgcggaccagtatgacgccatctgctgccacaccagcaccagcaagcggcattggctgcggtgagcgtggcgcgggggcagggtggagtgggtgctggtgggcaggggtagggggctgccagagggaggggcgctggaggcgggggtggtggctgcgccacgcgggaaccccaggggctgggcctggcagggtgggacctgcagccccgacgccctcaccccgccccgcaggttcttctatctctaccacttcgccttctatgcctatcactaccgcttcaatgggcagtatagcagcctggccctggtcacctcctggctcttcatccagcattccatgatctacttcttccaccactacgagctgcctgccatcctgcagcaggtccgcatccaggagatgctgcttcaggcgccgccactgggccccgggacccccacggcgctgcccgatgacatgaacaacaactcgggcgccccggctacagcccctgactctgccggccagccccccgccctgggccccgtctcgcccggggccagcgggagtcccgggcctgtggcagcggcgcccagctccctggtggccgcggcagcctcagtggcagcagctgccggtggtgacctgggttggatggcagagaccgctgccatcatcacagacgcctccttcctgtccggcctgagcgcctccctcctggagcggcgtccagccagcccgctgggccctgctgggggcctcccccacgccccccaggacagtgtccccccgagtgactccgcagcttctgacacaactcccctgggggctgcggtaggcgggcctagcccggcctccatggccccaacggaggcgccctcggaggtggggtcctgagccgcacagctgagccgcctctgacccctgctggctgggcctgaccttcccgagcccgtgggggtgggggaggccagccacctccttcctctgggactgcccagcctgtgtcgggggctttcagggtttcgtggggtttgcccggaaggcggctttcctccccctggtgtgaggtcgcgcccgaggcttgtacccgctagtgaggtgtttgagctggtcagcaaggagagggggtggggttccgcggaaggttctggaggggtcttggtaggtctgcagtgaaccgtcctgaggatggagtggggtcccatggtgcaggtctctgagcaaggcggaggtgtggaggagaggccggcttggggtggggcctcgcgccctagtgccggccggcctcagcccggctctgcctggtgctccctgcagtgccttctccatggccccgccctccccgcgtgtgcgccaggcctggggtccccgggagagcagagcttgcgcctcgggcatagggacgtggggtgcaggcgccaacatcagtggcagcagccagggccgtggtccagtcccactcggggatggagtgggccggcggccaaaccagtcactcggggaggaatgcggaggagcgctcattccattctatttaattgcagtgtacaaaattgtgtttgtatatagaataaactgtctgttgacagcgaaaaaaaaaaaaaacanaaaaaanaaaaaaaaaaaaaaaaaaaaaaaaaaaaaaaaaaanaaaaaaaaaaaaaaaaaaaaaaaaaaaaaaaaaaaaaaaaaaaaaagggggggggggggggcgtaaacacaacctcctcggacggggcacccacaatcgataggccaccgcccccagctctttctaagaagaaagacggcggccgccaccaccagaggcgagcagtcaaaacaagacgaagagcgccacgcggcgcgcgcgactcaaaaaccccacggtcgggggtgagaaaaaaccacagtcgcggatgaaactctggcagagaggaccaccccaatccggggggggggggaaacgaacgaggcggacccaccaccccagcaaatatcagcgcggcgaggaaaaaaacacacgcgggcggtcac

SEQ ID NO: 338083 - DNA, 2122 bp, Homo sapiens
ggccgctcttgcccggcgtggcgactcgctagcgtcagcagcgccgcagccggacgagaaagcggaagatggcggcggcggccgggaggccgtgaggagagcggcggctgcgagggcggccgatggcggccgggaggcgccctcggacacttgcgggtcgttagggcgcgacgctgggaggcatgtcggagcacgtggagcccgcagctccggggcccgggcccaacggcggcggcggcggcccggcccccgcgcgcgggcctcgcacccccaatctcaaccccaaccccctcatcaacgtgcgcgaccggctcttccacgcgctgttcttcaagatggctgtcacctattcgcggctcttcccgcccgccttccgccgtctcttcgagttcttcgtgctgctcaaggccctgtttgtgctcttcgtcctggcctacatccacatcgtcttctcccgctcgcccatcaactgcctggagcacgtgcgtgacaagtggccgcgtgagggcatcctgcgtgtggaagtgcggcacaactcgagccgcgcgcccgtcttcctacagttctgtgacagcggcggccgcgggagcttcccgggcctggccgtggaaccaggcagcaacctggacatggaagatgaggaggaggaagagctgaccatggagatgtttgggaacagctccatcaagtttgagctggacatcgagcccaaggtgttcaagccgccgagtagcacagaggccctgaatgacagccaggagttccccttccccgagacgcccaccaaagtgtggccgcaggacgagtacatcgtggagtactcactagagtatggcttccttcgcctgtcgcaggccacccgccagcgcctgagcatccccgtcatggtggtcaccctggaccccacgcgggaccagtgcttcggggaccgcttcagccgcctgctgctggatgagttcctgggctacgatgacatcctcatgtccagcgtgaagggcctggccgagaacgaggagaacaagggcttcctgcggaatgtggtgtcgggcgagcactaccgctttgtgagcatgtggatggcgcggacgtcctacctggccgccttcgccatcatggtcatcttcacgctgagcgtgtccatgctgctgcggtactcacaccaccagatcttcgtcttcatcgtggacctgctgcagatgctggagatgaacatggccatcgccttccccgcagcgcccctgctgaccgtcatcctggccctcgtcgggatggaggccatcatgtcggagttcttcaacgacaccaccaccgccttctacatcatcctcatcgtgtggctcgcggaccagtatgacgccatctgctgccacaccagcaccagcaagcggcattggctgcggttcttctatctctaccacttcgccttctatgcctatcactaccgcttcaatgggcagtatagcagcctggccctggtcacctcctggctcttcatccagcaggtccgcatccaggagatgctgcttcaggcgccgccactgggccccgggacccccacggcgctgcccggaaggcggctttcctccccctggtgtgaggtcgcgcccgaggcttgtacccgctagtgaggtgtttgagctggtcagcaaggagagggggtggggttccgcggaaggttctggaggggtcttggtaggtctgcagtgaaccgtcctgaggatggagtggggtcccatggtgcaggtctctgagcaaggcggaggtgtggaggagaggccggcttggggtggggcctcgcgccctagtgccggccggcctcagcccggctctgcctggtgctccctgcagtgccttctccatggccccgccctccccgcgtgtgcgccaggcctggggtccccgggagagcagagcttgcgcctcgggcatagggacgtggggtgcaggcgccaacatcagtggcagcagccagggccgtggtccagtcccactcggggatggagtgggccggcggccaaaccagtcactcggggaggaatgcggaggagcgctcattccattctatttaattgcagtgtacaaaattgtgtttgtatatagaataaactgtctgttgacagcg

SEQ ID NO: 338084 - DNA, 2089 bp, Homo sapiens
ggccgctcttgcccggcgtggcgactcgctagcgtcagcagcgccgcagccggacgagaaagcggaagatggcggcggcggccgggaggccgtgaggagagcggcggctgcgagggcggccgatggcggccgggaggcgccctcggacacttgcgggtcgttagggcgcgacgctgggaggcatgtcggagcacgtggagcccgcagctccggggcccgggcccaacggcggcggcggcggcccggcccccgcgcgcgggcctcgcacccccaatctcaaccccaaccccctcatcaacgtgcgcgaccggctcttccacgcgctgttcttcaagatggctgtcacctattcgcggctcttcccgcccgccttccgccgtctcttcgagttcttcgtgctgctcaaggccctgtttgtgctcttcgtcctggcctacatccacatcgtcttctcccgctcgcccatcaactgcctggagcacgtgcgtgacaagtggccgcgtgagggcatcctgcgtgtggaagtgcggcacaactcgagccgcgcgcccgtcttcctacagttctgtgacagcggcggccgcgggagcttcccgggcctggccgtggaaccaggcagcaacctggacatggaagatgaggaggaggaagagctgaccatggagatgtttgggaacagctccatcaagtttgagctggacatcgagcccaaggtgttcaagccgccgagtagcacagaggccctgaatgacagccaggagttccccttccccgagacgcccaccaaagtgtggccgcaggacgagtacatcgtggagtactcactagagtatggcttccttcgcctgtcgcaggccacccgccagcgcctgagcatccccgtcatggtggtcaccctggaccccacgcgggaccagtgcttcggggaccgcttcagccgcctgctgctggatgagttcctgggctacgatgacatcctcatgtccagcgtgaagggcctggccgagaacgaggagaacaagggcttcctgcggaatgtggtgtcgggcgagcactaccgctttgtgagcatgtggatggcgcggacgtcctacctggccgccttcgccatcatggtcatcttcacgctgagcgtgtccatgctgctgcggtactcacaccaccagatcttcgtcttcatcgtggacctgctgcagatgctggagatgaacatggccatcgccttccccgcagcgcccctgctgaccgtcatcctggccctcgtcgggatggaggccatcatgtcggagttcttcaacgacaccaccaccgccttctacatcatcctcatcgtgtggctcgcggaccagtatgacgccatctgctgccacaccagcaccagcaagcggcattggctgcggttcttctatctctaccacttcgccttctatgcctatcactaccgcttcaatgggcagtatagcagcctggccctggtcacctcctggctcttcatccagcattccatgatctacttcttccaccactacgagctgcctgccatcctgcagcaggtccgcatccaggagatgctgcttcaggcgccgccactgggccccgggacccccacggcgctgcccgatgacatgaacaacaactcgggcgccccggctacagcccctgactctgccggccagccccccgccctgggccccgtctcgcccggggccagcgggagtcccgggcctgtggcagcggcgcccagctccctggtggccgcggcagcctcagtggcagcagctgccggtggtgacctgggttggatggcagagaccgctgccatcatcacagacgcctccttcctgtccggcctgagcgcctccctcctggagcggcgtccagccagcccgctgggccctgctgggggcctcccccacgccccccaggacagtgtccccccgagtgactccgagtcccactcggggatggagtgggccggcggccaaaccagtcactcggggaggaatgcggaggagcgctcattccattctatttaattgcagtgtacaaaattgtgtttgtatatagaataaactgtctgttgacagcg

SEQ ID NO: 338085 - DNA, 3441 bp, Homo sapiens
  misc_feature (3033)..(3033): n is a, c, g, or t
  misc_feature (3040)..(3040): n is a, c, g, or t
  misc_feature (3076)..(3076): n is a, c, g, or t
ggccgctcttgcccggcgtggcgactcgctagcgtcagcagcgccgcagccggacgagaaagcggaagatggcggcggcggccgggaggccgtgaggagagcggcggctgcgagggcggccgatggcggccgggaggcgccctcggacacttgcgggtcgttagggcgcgacgctgggaggcatgtcggagcacgtggagcccgcagctccggggcccgggcccaacggcggcggcggcggcccggcccccgcgcgcgggcctcgcacccccaatctcaaccccaaccccctcatcaacgtgcgcgaccggctcttccacgcgctgttcttcaagatggctgtcacctattcgcggctcttcccgcccgccttccgccgtctcttcgagttcttcgtgctgctcaaggccctgtttgtgctcttcgtcctggcctacatccacatcgtcttctcccgctcgcccatcaactgcctggagcacgtgcgtgacaagtggccgcgtgagggcatcctgcgtgtggaagtgcggcacaactcgagccgcgcgcccgtcttcctacagttctgtgacagcggcggccgcgggagcttcccgggcctggccgtggaaccaggcagcaacctggacatggaagatgaggaggaggaagagctgaccatggagatgtttgggaacagctccatcaagtttgagctggacatcgagcccaaggtgttcaagccgccgagtagcacagaggccctgaatgacagccaggagttccccttccccgagacgcccaccaaagtgtggccgcaggacgagtacatcgtggagtactcactagagtatggcttccttcgcctgtcgcaggccacccgccagcgcctgagcatccccgtcatggtggtcaccctgggtgagtctgagctgctgggcttggggagctccatggcggggcctcccctcctccctcgggtctcctcctgctggtgcgggacggggggctgtgcaggaagcactggggtctgccccgccccaggcacgcttcccagggctggggtcctggatgggtttcctaagaatgggcagggccaggaagcaggccaggcctcagcaatggagccagctggggcagggcccagggggtggcctgggcggggctcccggctccctgattcacccacccgcagaccccacgcgggaccagtgcttcggggaccgcttcagccgcctgctgctggatgagttcctgggctacgatgacatcctcatgtccagcgtgaagggcctggccgagaacgaggagaacaagggcttcctgcggaatgtggtgtcgggcgagcactaccgctttgtgagcatgtggatggcgcggacgtcctacctggccgccttcgccatcatggtcatcttcacgctgagcgtgtccatgctgctgcggtactcacaccaccagatcttcgtcttcatcgtggacctgctgcagatgctggagatgaacatggccatcgccttccccgcagcgcccctgctgaccgtcatcctggccctcgtcgggatggaggccatcatgtcggagttcttcaacgacaccaccaccgccttctacatcatcctcatcgtgtggctcgcggaccagtatgacgccatctgctgccacaccagcaccagcaagcggcattggctgcggttcttctatctctaccacttcgccttctatgcctatcactaccgcttcaatgggcagtatagcagcctggccctggtcacctcctggctcttcatccagcattccatgatctacttcttccaccactacgagctgcctgccatcctgcagcaggtccgcatccaggagatgctgcttcaggcgccgccactgggccccgggacccccacggcgctgcccgatgacatgaacaacaactcgggcgccccggctacagcccctgactctgccggccagccccccgccctgggccccgtctcgcccggggccagcgggagtcccgggcctgtggcagcggcgcccagctccctggtggccgcggcagcctcagtggcagcagctgccggtggtgacctgggttggatggcagagaccgctgccatcatcacagacgcctccttcctgtccggcctgagcgcctccctcctggagcggcgtccagccagcccgctgggccctgctgggggcctcccccacgccccccaggacagtgtccccccgagtgactccgcagcttctgacacaactcccctgggggctgcggtaggcgggcctagcccggcctccatggccccaacggaggcgccctcggaggtggggtcctgagccgcacagctgagccgcctctgacccctgctggctgggcctgaccttcccgagcccgtgggggtgggggaggccagccacctccttcctctgggactgcccagcctgtgtcgggggctttcagggtttcgtggggtttgcccggaaggcggctttcctccccctggtgtgaggtcgcgcccgaggcttgtacccgctagtgaggtgtttgagctggtcagcaaggagagggggtggggttccgcggaaggttctggaggggtcttggtaggtctgcagtgaaccgtcctgaggatggagtggggtcccatggtgcaggtctctgagcaaggcggaggtgtggaggagaggccggcttggggtggggcctcgcgccctagtgccggccggcctcagcccggctctgcctggtgctccctgcagtgccttctccatggccccgccctccccgcgtgtgcgccaggcctggggtccccgggagagcagagcttgcgcctcgggcatagggacgtggggtgcaggcgccaacatcagtggcagcagccagggccgtggtccagtcccactcggggatggagtgggccggcggccaaaccagtcactcggggaggaatgcggaggagcgctcattccattctatttaattgcagtgtacaaaattgtgtttgtatatagaataaactgtctgttgacagcgaaaaaaaaaaaaaacanaaaaaanaaaaaaaaaaaaaaaaaaaaaaaaaaaaaaaaaaanaaaaaaaaaaaaaaaaaaaaaaaaaaaaaaaaaaaaaaaaaaaaaagggggggggggggggcgtaaacacaacctcctcggacggggcacccacaatcgataggccaccgcccccagctctttctaagaagaaagacggcggccgccaccaccagaggcgagcagtcaaaacaagacgaagagcgccacgcggcgcgcgcgactcaaaaaccccacggtcgggggtgagaaaaaaccacagtcgcggatgaaactctggcagagaggaccaccccaatccggggggggggggaaacgaacgaggcggacccaccaccccagcaaatatcagcgcggcgaggaaaaaaacacacgcgggcggtcac

SEQ ID NO: 338086 - DNA, 1821 bp, Homo sapiens
ggccgctcttgcccggcgtggcgactcgctagcgtcagcagcgccgcagccggacgagaaagcggaagatggcggcggcggccgggaggccgtgaggagagcggcggctgcgagggcggccgatggcggccgggaggcgccctcggacacttgcgggtcgttagggcgcgacgctgggaggcatgtcggagcacgtggagcccgcagctccggggcccgggcccaacggcggcggcggcggcccggcccccgcgcgcgggcctcgcacccccaatctcaaccccaaccccctcatcaacgtgcgcgaccggctcttccacgcgctgttcttcaagatggctgtcacctattcgcggctcttcccgcccgccttccgccgtctcttcgagttcttcgtgctgctcaaggccctgtttgtgctcttcgtcctggcctacatccacatcgtcttctcccgctcgcccatcaactgcctggagcacgtgcgtgacaagtggccgcgtgagggcatcctgcgtgtggaagtgcggcacaactcgagccgcgcgcccgtcttcctacagttctgtgacagcggcggccgcgggagcttcccgggcctggccgtggaaccaggcagcaacctggacatggaagatgaggaggaggaagagctgaccatggagatgtttgggaacagctccatcaagtttgagctggacatcgagcccaaggtgttcaagccgccgagtagcacagaggccctgaatgacagccaggagttccccttccccgagacgcccaccaaagtgtggccgcaggacgagtacatcgtggagtactcactagagtatggcttccttcgcctgtcgcaggccacccgccagcgcctgagcatccccgtcatggtggtcaccctggaccccacgcgggaccagtgcttcggggaccgcttcagccgcctgctgctggatgagttcctgggctacgatgacatcctcatgtccagcgtgaagggcctggccgagaacgaggagaacaagggcttcctgcggaatgtggtgtcgggcgagcactaccgctttgtgagcatgtggatggcgcggacgtcctacctggccgccttcgccatcatggtcatcttcacgctgagcgtgtccatgctgctgcggtactcacaccaccagatcttcgtcttcatcgtggacctgctgcagatgctggagatgaacatggccatcgccttccccgcagcgcccctgctgaccgtcatcctggccctcgtcgggatggaggccatcatgtcggagttcttcaacgacaccaccaccgccttctacatcatcctcatcgtgtggctcgcggaccagtatgacgccatctgctgccacaccagcaccagcaagcggcattggctgcggttcttctatctctaccacttcgccttctatgcctatcactaccgcttcaatgggcagtatagcagcctggccctggtcacctcctggctcttcatccagcattccatgatctacttcttccaccactacgagctgcctgccatcctgcagcaggtccgcatccaggagatgctgcttcaggcgccgccactggggtccccgggagagcagagcttgcgcctcgggcatagggacgtggggtgcaggcgccaacatcagtggcagcagccagggccgtggtccagtcccactcggggatggagtgggccggcggccaaaccagtcactcggggaggaatgcggaggagcgctcattccattctatttaattgcagtgtacaaaattgtgtttgtatatagaataaactgtctgttgacagcg

SEQ ID NO: 338087 - DNA, 3132 bp, Homo sapiens
  misc_feature (2724)..(2724): n is a, c, g, or t
  misc_feature (2731)..(2731): n is a, c, g, or t
  misc_feature (2767)..(2767): n is a, c, g, or t
cccaacgtcgtggggtaacatctgttatcaaactccgttggtgttgtggaaagcatgtagactgacccagaggccagacccaggggttcatgcacccctgagccagcagggcatcttggaaaaggaactcttggttcgatacctggaacagaggaggggaaagtccagggctatagggtgtaatgaagtcacccctttctgtcccactacatctgggagtgactttccgagcatcccgtatacaaccccaaccccctcatcaacgtgcgcgaccggctcttccacgcgctgttcttcaagatggctgtcacctattcgcggctcttcccgcccgccttccgccgtctcttcgagttcttcgtgctgctcaaggccctgtttgtgctcttcgtcctggcctacatccacatcgtcttctcccgctcgcccatcaactgcctggagcacgtgcgtgacaagtggccgcgtgagggcatcctgcgtgtggaagtgcggcacaactcgagccgcgcgcccgtcttcctacagttctgtgacagcggcggccgcgggagcttcccgggcctggccgtggaaccaggcagcaacctggacatggaagatgaggaggaggaagagctgaccatggagatgtttgggaacagctccatcaagtttgagctggacatcgagcccaaggtgttcaagccgccgagtagcacagaggccctgaatgacagccaggagttccccttccccgagacgcccaccaaagtgtggccgcaggacgagtacatcgtggagtactcactagagtatggcttccttcgcctgtcgcaggccacccgccagcgcctgagcatccccgtcatggtggtcaccctggaccccacgcgggaccagtgcttcggggaccgcttcagccgcctgctgctggatgagttcctgggctacgatgacatcctcatgtccagcgtgaagggcctggccgagaacgaggagaacaagggcttcctgcggaatgtggtgtcgggcgagcactaccgctttgtgagcatgtggatggcgcggacgtcctacctggccgccttcgccatcatggtcatcttcacgctgagcgtgtccatgctgctgcggtactcacaccaccagatcttcgtcttcatcgtggacctgctgcagatgctggagatgaacatggccatcgccttccccgcagcgcccctgctgaccgtcatcctggccctcgtcgggatggaggccatcatgtcggagttcttcaacgacaccaccaccgccttctacatcatcctcatcgtgtggctcgcggaccagtatgacgccatctgctgccacaccagcaccagcaagcggcattggctgcggttcttctatctctaccacttcgccttctatgcctatcactaccgcttcaatgggcagtatagcagcctggccctggtcacctcctggctcttcatccagcattccatgatctacttcttccaccactacgagctgcctgccatcctgcagcaggtccgcatccaggagatgctgcttcaggcgccgccactgggccccgggacccccacggcgctgcccgatgacatgaacaacaactcgggcgccccggctacagcccctgactctgccggccagccccccgccctgggccccgtctcgcccggggccagcgggagtcccgggcctgtggcagcggcgcccagctccctggtggccgcggcagcctcagtggcagcagctgccggtggtgacctgggttggatggcagagaccgctgccatcatcacagacgcctccttcctgtccggcctgagcgcctccctcctggagcggcgtccagccagcccgctgggccctgctgggggcctcccccacgccccccaggacagtgtccccccgagtgactccgcagcttctgacacaactcccctgggggctgcggtaggcgggcctagcccggcctccatggccccaacggaggcgccctcggaggtggggtcctgagccgcacagctgagccgcctctgacccctgctggctgggcctgaccttcccgagcccgtgggggtgggggaggccagccacctccttcctctgggactgcccagcctgtgtcgggggctttcagggtttcgtggggtttgcccggaaggcggctttcctccccctggtgtgaggtcgcgcccgaggcttgtacccgctagtgaggtgtttgagctggtcagcaaggagagggggtggggttccgcggaaggttctggaggggtcttggtaggtctgcagtgaaccgtcctgaggatggagtggggtcccatggtgcaggtctctgagcaaggcggaggtgtggaggagaggccggcttggggtggggcctcgcgccctagtgccggccggcctcagcccggctctgcctggtgctccctgcagtgccttctccatggccccgccctccccgcgtgtgcgccaggcctggggtccccgggagagcagagcttgcgcctcgggcatagggacgtggggtgcaggcgccaacatcagtggcagcagccagggccgtggtccagtcccactcggggatggagtgggccggcggccaaaccagtcactcggggaggaatgcggaggagcgctcattccattctatttaattgcagtgtacaaaattgtgtttgtatatagaataaactgtctgttgacagcgaaaaaaaaaaaaaacanaaaaaanaaaaaaaaaaaaaaaaaaaaaaaaaaaaaaaaaaanaaaaaaaaaaaaaaaaaaaaaaaaaaaaaaaaaaaaaaaaaaaaaagggggggggggggggcgtaaacacaacctcctcggacggggcacccacaatcgataggccaccgcccccagctctttctaagaagaaagacggcggccgccaccaccagaggcgagcagtcaaaacaagacgaagagcgccacgcggcgcgcgcgactcaaaaaccccacggtcgggggtgagaaaaaaccacagtcgcggatgaaactctggcagagaggaccaccccaatccggggggggggggaaacgaacgaggcggacccaccaccccagcaaatatcagcgcggcgaggaaaaaaacacacgcgggcggtcac

SEQ ID NO: 338088 - DNA, 1440 bp, Homo sapiens
  misc_feature (1432)..(1432): n is a, c, g, or t
ggccgctcttgcccggcgtggcgactcgctagcgtcagcagcgccgcagccggacgagaaagcggaagatggcggcggcggccgggaggccgtgaggagagcggcggctgcgagggcggccgatggcggccgggaggcgccctcggacacttgcgggtcgttagggcgcgacgctgggaggcatgtcggagcacgtggagcccgcagctccggggcccgggcccaacggcggcggcggcggcccggcccccgcgcgcgggcctcgcacccccaatctcaaccccaaccccctcatcaacgtgcgcgaccggctcttccacgcgctgttcttcaagatggctgtcacctattcgcggctcttcccgcccgccttccgccgtctcttcgagttcttcgtgctgctcaaggccctgtttgtgctcttcgtcctggcctacatccacatcgtcttctcccgctcgcccatcaactgcctggagcacgtgcgtgacaagtggccgcgtgagggcatcctgcgtgtggaagtgcggcacaactcgagccgcgcgcccgtcttcctacagttctgtgacagcggcggccgcgggagcttcccgggcctggccgtggaaccaggcagcaacctggacatggaagatgaggaggaggaagagctgaccatggagatgtttgggaacagctccatcaagtttgagctggacatcgagcccaaggtgttcaagccgccgagtagcacagaggccctgaatgacagccaggagttccccttccccgagacgcccaccaaagtgtggccgcaggacgagtacatcgtggagtactcactagagtatggcttccttcgcctgtcgcaggccacccgccagcgcctgagcatccccgtcatggtggtcaccctggaccccacgcgggaccagtgcttcggggaccgcttcagccgcctgctgctggatgagttcctgggctacgatgacatcctcatgtccagcgtgaagggcctggccgagaacgaggagaacaagggcttcctgcggaatgtggtgtcgggcgagcactaccgctttgtgagcatgtggatggcgcggacgtcctacctggccgccttcgccatcatggtcatcttcacgctgagcgtgtccatgctgctgcggtactcacaccaccagatcttcgtcttcatcgtggacctgctgcagatgctggagatgaacatggccatcgccttccccgcagcgcccctgctgaccgtcatcctggccctcgtcgggatggaggccatcatgtcggagttcttcaacgacaccaccaccgccttctacatcatcctcatcgtgtggctcgcggaccagtatgacgccatctgctgccacaccagcaccagcaagcggcattggctgcgtcttctatctctacgacacgacattccgcacancacacgaa

SEQ ID NO: 338089 - DNA, 1456 bp, Homo sapiens
ggccgctcttgcccggcgtggcgactcgctagcgtcagcagcgccgcagccggacgagaaagcggaagatggcggcggcggccgggaggccgtgaggagagcggcggctgcgagggcggccgatggcggccgggaggcgccctcggacacttgcgggtcgttagggcgcgacgctgggaggcatgtcggagcacgtggagcccgcagctccggggcccgggcccaacggcggcggcggcggcccggcccccgcgcgcgggcctcgcacccccaatctcaaccccaaccccctcatcaacgtgcgcgaccggctcttccacgcgctgttcttcaagatggctgtcacctattcgcggctcttcccgcccgccttccgccgtctcttcgagttcttcgtgctgctcaaggccctgtttgtgctcttcgtcctggcctacatccacatcgtcttctcccgctcgcccatcaactgcctggagcacgtgcgtgacaagtggccgcgtgagggcatcctgcgtgtggaagtgcggcacaactcgagccgcgcgcccgtcttcctacagttctgtgacagcggcggccgcgggagcttcccgggcctggccgtggaaccaggcagcaacctggacatggaagatgaggaggaggaagagctgaccatggagatgtttgggaacagctccatcaagtttgagctggacatcgagcccaaggtgttcaagccgccgagtagcacagaggccctgaatgacagccaggagttccccttccccgagacgcccaccaaagtgtggccgcaggacgagtacatcgtggagtactcactagagtatggcttccttcgcctgtcgcaggccacccgccagcgcctgagcatccccgtcatggtggtcaccctggaccccacgcgggaccagtgcttcggggaccgcttcagccgcctgctgctggatgagttcctgggctacgatgacatcctcatgtccagcgtgaagggcctggccgagaacgaggagaacaagggcttcctgcggaatgtggtgtcgggcgagcactaccgctttgtgagcatgtggatggcgcggacgtcctacctggccgccttcgccatcatggtcatcttcacgctgagcgtgtccatgctgctgcggtactcacaccaccagatcttcgtcttcatcgtggacctgctgcagatgctggagatgaacatggccatcgccttccccgcagcgcccctgctgaccgtcatcctggccctcgtcgggatggaggccatcatgtcggagttcttcaacgacaccaccaccgccttctacatcatcctcatcgtgtggctcgcggaccagtatgacgccatctgctgccacaccagcaccagcaagcggcattggctgcggtgaggcctgggcggcaagcagggggcaggccagccgtgcctttccaggcaggagag

SEQ ID NO: 338090 - DNA, 3689 bp, Homo sapiens
  misc_feature (3281)..(3281): n is a, c, g, or t
  misc_feature (3288)..(3288): n is a, c, g, or t
  misc_feature (3324)..(3324): n is a, c, g, or t
ggccgctcttgcccggcgtggcgactcgctagcgtcagcagcgccgcagccggacgagaaagcggaagatggcggcggcggccgggaggccgtgaggagagcggcggctgcgagggcggccgatggcggccgggaggcgccctcggacacttgcgggtcgttagggcgcgacgctgggaggcatgtcggagcacgtggagcccgcagctccggggcccgggcccaacggcggcggcggcggcccggcccccgcgcgcgggcctcgcacccccaatctcaaccccaaccccctcatcaacgtgcgcgaccggctcttccacgcgctgttcttcaagatggctgtcacctattcgcggctcttcccgcccgccttccgccgtctcttcgagttcttcgtgctgctcaaggccctgtttgtgctcttcgtcctggcctacatccacatcgtcttctcccgctcgcccatcaactgcctggagcacgtgcgtgacaagtggccgcgtgagggcatcctgcgtgtggaagtgcggcacaactcgagccgcgcgcccgtcttcctacagttctgtgacagcggcggccgcgggagcttcccgggcctggccgtggaaccaggcagcaacctggacatggaagatgaggaggaggaagagctgaccatggagatgtttgggaacagctccatcaagtttgagctggacatcgagcccaaggtgttcaagccgccgagtagcacagaggccctgaatgacagccaggagttccccttccccgagacgcccaccaaagtgtggccgcaggacgagtacatcgtggagtactcactagagtatggcttccttcgcctgtcgcaggccacccgccagcgcctgagcatccccgtcatggtggtcaccctgggtgagtctgagctgctgggcttggggagctccatggcggggcctcccctcctccctcgggtctcctcctgctggtgcgggacggggggctgtgcaggaagcactggggtctgccccgccccaggcacgcttcccagggctggggtcctggatgggtttcctaagaatgggcagggccaggaagcaggccaggcctcagcaatggagccagctggggcagggcccagggggtggcctgggcggggctcccggctccctgattcacccacccgcagaccccacgcgggaccagtgcttcggggaccgcttcagccgcctgctgctggatgagttcctgggctacgatgacatcctcatgtccagcgtgaagggcctggccgagaacgaggagaacaagggcttcctgcggaatgtggtgtcgggcgagcactaccgctttgtgagcatgtggatggcgcggacgtcctacctggccgccttcgccatcatggtcatcttcacgctgagcgtgtccatgctgctgcggtactcacaccaccagatcttcgtcttcatcggtgagtgtcccgccggcgcagggcggggcgggcgtcctccaggccctcaccgggcgcccgccgccctgtgcccgcagtggacctgctgcagatgctggagatgaacatggccatcgccttccccgcagcgcccctgctgaccgtcatcctggccctcgtcgggatggaggccatcatgtcggagttcttcaacgacaccaccaccgccttctacatcatcctcatcgtgtggctcgcggaccagtatgacgccatctgctgccacaccagcaccagcaagcggcattggctgcggtgagcgtggcgcgggggcagggtggagtgggtgctggtgggcaggggtagggggctgccagagggaggggcgctggaggcgggggtggtggctgcgccacgcgggaaccccaggggctgggcctggcagggtgggacctgcagccccgacgccctcaccccgccccgcaggttcttctatctctaccacttcgccttctatgcctatcactaccgcttcaatgggcagtatagcagcctggccctggtcacctcctggctcttcatccagcattccatgatctacttcttccaccactacgagctgcctgccatcctgcagcaggtccgcatccaggagatgctgcttcaggcgccgccactgggccccgggacccccacggcgctgcccgatgacatgaacaacaactcgggcgccccggctacagcccctgactctgccggccagccccccgccctgggccccgtctcgcccggggccagcgggagtcccgggcctgtggcagcggcgcccagctccctggtggccgcggcagcctcagtggcagcagctgccggtggtgacctgggttggatggcagagaccgctgccatcatcacagacgcctccttcctgtccggcctgagcgcctccctcctggagcggcgtccagccagcccgctgggccctgctgggggcctcccccacgccccccaggacagtgtccccccgagtgactccgcagcttctgacacaactcccctgggggctgcggtaggcgggcctagcccggcctccatggccccaacggaggcgccctcggaggtggggtcctgagccgcacagctgagccgcctctgacccctgctggctgggcctgaccttcccgagcccgtgggggtgggggaggccagccacctccttcctctgggactgcccagcctgtgtcgggggctttcagggtttcgtggggtttgcccggaaggcggctttcctccccctggtgtgaggtcgcgcccgaggcttgtacccgctagtgaggtgtttgagctggtcagcaaggagagggggtggggttccgcggaaggttctggaggggtcttggtaggtctgcagtgaaccgtcctgaggatggagtggggtcccatggtgcaggtctctgagcaaggcggaggtgtggaggagaggccggcttggggtggggcctcgcgccctagtgccggccggcctcagcccggctctgcctggtgctccctgcagtgccttctccatggccccgccctccccgcgtgtgcgccaggcctggggtccccgggagagcagagcttgcgcctcgggcatagggacgtggggtgcaggcgccaacatcagtggcagcagccagggccgtggtccagtcccactcggggatggagtgggccggcggccaaaccagtcactcggggaggaatgcggaggagcgctcattccattctatttaattgcagtgtacaaaattgtgtttgtatatagaataaactgtctgttgacagcgaaaaaaaaaaaaaacanaaaaaanaaaaaaaaaaaaaaaaaaaaaaaaaaaaaaaaaaanaaaaaaaaaaaaaaaaaaaaaaaaaaaaaaaaaaaaaaaaaaaaaagggggggggggggggcgtaaacacaacctcctcggacggggcacccacaatcgataggccaccgcccccagctctttctaagaagaaagacggcggccgccaccaccagaggcgagcagtcaaaacaagacgaagagcgccacgcggcgcgcgcgactcaaaaaccccacggtcgggggtgagaaaaaaccacagtcgcggatgaaactctggcagagaggaccaccccaatccggggggggggggaaacgaacgaggcggacccaccaccccagcaaatatcagcgcggcgaggaaaaaaacacacgcgggcggtcac

SEQ ID NO: 338091 - DNA, 2577 bp, Homo sapiens
  misc_feature (2169)..(2169): n is a, c, g, or t
  misc_feature (2176)..(2176): n is a, c, g, or t
  misc_feature (2212)..(2212): n is a, c, g, or t
ggccgctcttgcccggcgtggcgactcgctagcgtcagcagcgccgcagccggacgagaaagcggaagatggcggcggcggccgggaggccgtgaggagagcggcggctgcgagggcggccgatggcggccgggaggcgccctcggacacttgcgggtcgttagggcgcgacgctgggaggcatgtcggagcacgtggagcccgcagctccggggcccgggcccaacggcggcggcggcggcccggcccccgcgcgcgggcctcgcacccccaatctcaaccccaaccccctcatcaacgtgcgcgaccggctcttccacgcgctgttcttcaagatggctgtcacctattcgcggctcttcccgcccgccttccgccgtctcttcgagttcttcgtgctgctcaaggccctgtttgtgctcttcgtcctggcctacatccacatcgtcttctcccgctcgcccatcaactgcctggagcacgtgcgtgacaagtggccgcgtgagggcatcctgcgtgtggaagtgcggcacaactcgagccgcgcgcccgtcttcctacagttctgtgacagcggcggccgcgggagcttcccgggcctggccgtggaaccaggcagcaacctggacatggaagatgaggaggaggaagagctgaccatggagatgtttgggaacagctccatcaagtttgagctggacatcgagcccaaggtgttcaagccgccgagtagcacagaggccctgaatgacagccaggagttccccttccccgagacgcccaccaaaggccctcaccccgccccgcaggttcttctatctctaccacttcgccttctatgcctatcactaccgcttcaatgggcagtatagcagcctggccctggtcacctcctggctcttcatccagcattccatgatctacttcttccaccactacgagctgcctgccatcctgcagcaggtccgcatccaggagatgctgcttcaggcgccgccactgggccccgggacccccacggcgctgcccgatgacatgaacaacaactcgggcgccccggctacagcccctgactctgccggccagccccccgccctgggccccgtctcgcccggggccagcgggagtcccgggcctgtggcagcggcgcccagctccctggtggccgcggcagcctcagtggcagcagctgccggtggtgacctgggttggatggcagagaccgctgccatcatcacagacgcctccttcctgtccggcctgagcgcctccctcctggagcggcgtccagccagcccgctgggccctgctgggggcctcccccacgccccccaggacagtgtccccccgagtgactccgcagcttctgacacaactcccctgggggctgcggtaggcgggcctagcccggcctccatggccccaacggaggcgccctcggaggtggggtcctgagccgcacagctgagccgcctctgacccctgctggctgggcctgaccttcccgagcccgtgggggtgggggaggccagccacctccttcctctgggactgcccagcctgtgtcgggggctttcagggtttcgtggggtttgcccggaaggcggctttcctccccctggtgtgaggtcgcgcccgaggcttgtacccgctagtgaggtgtttgagctggtcagcaaggagagggggtggggttccgcggaaggttctggaggggtcttggtaggtctgcagtgaaccgtcctgaggatggagtggggtcccatggtgcaggtctctgagcaaggcggaggtgtggaggagaggccggcttggggtggggcctcgcgccctagtgccggccggcctcagcccggctctgcctggtgctccctgcagtgccttctccatggccccgccctccccgcgtgtgcgccaggcctggggtccccgggagagcagagcttgcgcctcgggcatagggacgtggggtgcaggcgccaacatcagtggcagcagccagggccgtggtccagtcccactcggggatggagtgggccggcggccaaaccagtcactcggggaggaatgcggaggagcgctcattccattctatttaattgcagtgtacaaaattgtgtttgtatatagaataaactgtctgttgacagcgaaaaaaaaaaaaaacanaaaaaanaaaaaaaaaaaaaaaaaaaaaaaaaaaaaaaaaaanaaaaaaaaaaaaaaaaaaaaaaaaaaaaaaaaaaaaaaaaaaaaaagggggggggggggggcgtaaacacaacctcctcggacggggcacccacaatcgataggccaccgcccccagctctttctaagaagaaagacggcggccgccaccaccagaggcgagcagtcaaaacaagacgaagagcgccacgcggcgcgcgcgactcaaaaaccccacggtcgggggtgagaaaaaaccacagtcgcggatgaaactctggcagagaggaccaccccaatccggggggggggggaaacgaacgaggcggacccaccaccccagcaaatatcagcgcggcgaggaaaaaaacacacgcgggcggtcac

SEQ ID NO: 338092 - DNA, 1730 bp, Homo sapiens
ggccgctcttgcccggcgtggcgactcgctagcgtcagcagcgccgcagccggacgagaaagcggaagatggcggcggcggccgggaggccgtgaggagagcggcggctgcgagggcggccgatggcggccgggaggcgccctcggacacttgcgggtcgttagggcgcgacgctgggaggcatgtcggagcacgtggagcccgcagctccggggcccgggcccaacggcggcggcggcggcccggcccccgcgcgcgggcctcgcacccccaatctcaaccccaaccccctcatcaacgtgcgcgaccggctcttccacgcgctgttcttcaagatggctgtcacctattcgcggctcttcccgcccgccttccgccgtctcttcgagttcttcgtgctgctcaaggccctgtttgtgctcttcgtcctggcctacatccacatcgtcttctcccgctcgcccatcaactgcctggagcacgtgcgtgacaagtggccgcgtgagggcatcctgcgtgtggaagtgcggcacaactcgagccgcgcgcccgtcttcctacagttctgtgacagcggcggccgcgggagcttcccgggcctggccgtggaaccaggcagcaacctggacatggaagatgaggaggaggaagagctgaccatggagatgtttgggaacagctccatcaagtttgagctggacatcgagcccaaggtgttcaagccgccgagtagcacagaggccctgaatgacagccaggagttccccttccccgagacgcccaccaaagtgtggccgcaggacgagtacatcgtggagtactcactagagtatggcttccttcgcctgtcgcaggccacccgccagcgcctgagcatccccgtcatggtggtcaccctgggtgagtctgagctgctgggcttggggagctccatggcggggcctcccctcctccctcgggtctcctcctgctggtgcgggacggggggctgtgcaggaagcactggggtctgccccgccccaggcacgcttcccagggctggggtcctggatgggtttcctaagaatgggcagggccaggaagcaggccaggcctcagcaatggagccagctggggcagggcccagggggtggcctgggcggggctcccggctccctgattcacccacccgcagaccccacgcgggaccagtgcttcggggaccgcttcagccgcctgctgctggatgagttcctgggctacgatgacatcctcatgtccagcgtgaagggcctggccgagaacgaggagaacaagggcttcctgcggaatgtggtgtcgggcgagcactaccgctttgtgagcatgtggatggcgcggacgtcctacctggccgccttcgccatcatggtcatcttcacgctgagcgtgtccatgctgctgcggtactcacaccaccagatcttcgtcttcatcgtggacctgctgcagatgctggagatgaacatggccatcgccttccccgcagcgcccctgctgaccgtcatcctggccctcgtcgggatggaggccatcatgtcggagttcttcaacgacaccaccaccgccttctacatcatcctcatcgtgtggctcgcggaccagtatgacgccatctgctgccacaccagcaccagcaagcggcattggctgcggtgaggcctgggcggcaagcagggggcaggccagccgtgcctttccaggcaggagag

SEQ ID NO: 338093 - DNA, 2511 bp, Homo sapiens
  misc_feature (2103)..(2103): n is a, c, g, or t
  misc_feature (2110)..(2110): n is a, c, g, or t
  misc_feature (2146)..(2146): n is a, c, g, or t
aagaaccgatgtttggcgacactgcgatctaactttgagctggacatcgagcccaaggtgttcaagccgccgagtagcacagaggccctgaatgacagccaggagttccccttccccgagacgcccaccaaagtgtggccgcaggacgagtacatcgtggagtactcactagagtatggcttccttcgcctgtcgcaggccacccgccagcgcctgagcatccccgtcatggtggtcaccctggaccccacgcgggaccagtgcttcggggaccgcttcagccgcctgctgctggatgagttcctgggctacgatgacatcctcatgtccagcgtgaagggcctggccgagaacgaggagaacaagggcttcctgcggaatgtggtgtcgggcgagcactaccgctttgtgagcatgtggatggcgcggacgtcctacctggccgccttcgccatcatggtcatcttcacgctgagcgtgtccatgctgctgcggtactcacaccaccagatcttcgtcttcatcgtggacctgctgcagatgctggagatgaacatggccatcgccttccccgcagcgcccctgctgaccgtcatcctggccctcgtcgggatggaggccatcatgtcggagttcttcaacgacaccaccaccgccttctacatcatcctcatcgtgtggctcgcggaccagtatgacgccatctgctgccacaccagcaccagcaagcggcattggctgcggttcttctatctctaccacttcgccttctatgcctatcactaccgcttcaatgggcagtatagcagcctggccctggtcacctcctggctcttcatccagcattccatgatctacttcttccaccactacgagctgcctgccatcctgcagcaggtccgcatccaggagatgctgcttcaggcgccgccactgggccccgggacccccacggcgctgcccgatgacatgaacaacaactcgggcgccccggctacagcccctgactctgccggccagccccccgccctgggccccgtctcgcccggggccagcgggagtcccgggcctgtggcagcggcgcccagctccctggtggccgcggcagcctcagtggcagcagctgccggtggtgacctgggttggatggcagagaccgctgccatcatcacagacgcctccttcctgtccggcctgagcgcctccctcctggagcggcgtccagccagcccgctgggccctgctgggggcctcccccacgccccccaggacagtgtccccccgagtgactccgcagcttctgacacaactcccctgggggctgcggtaggcgggcctagcccggcctccatggccccaacggaggcgccctcggaggtggggtcctgagccgcacagctgagccgcctctgacccctgctggctgggcctgaccttcccgagcccgtgggggtgggggaggccagccacctccttcctctgggactgcccagcctgtgtcgggggctttcagggtttcgtggggtttgcccggaaggcggctttcctccccctggtgtgaggtcgcgcccgaggcttgtacccgctagtgaggtgtttgagctggtcagcaaggagagggggtggggttccgcggaaggttctggaggggtcttggtaggtctgcagtgaaccgtcctgaggatggagtggggtcccatggtgcaggtctctgagcaaggcggaggtgtggaggagaggccggcttggggtggggcctcgcgccctagtgccggccggcctcagcccggctctgcctggtgctccctgcagtgccttctccatggccccgccctccccgcgtgtgcgccaggcctggggtccccgggagagcagagcttgcgcctcgggcatagggacgtggggtgcaggcgccaacatcagtggcagcagccagggccgtggtccagtcccactcggggatggagtgggccggcggccaaaccagtcactcggggaggaatgcggaggagcgctcattccattctatttaattgcagtgtacaaaattgtgtttgtatatagaataaactgtctgttgacagcgaaaaaaaaaaaaaacanaaaaaanaaaaaaaaaaaaaaaaaaaaaaaaaaaaaaaaaaanaaaaaaaaaaaaaaaaaaaaaaaaaaaaaaaaaaaaaaaaaaaaaagggggggggggggggcgtaaacacaacctcctcggacggggcacccacaatcgataggccaccgcccccagctctttctaagaagaaagacggcggccgccaccaccagaggcgagcagtcaaaacaagacgaagagcgccacgcggcgcgcgcgactcaaaaaccccacggtcgggggtgagaaaaaaccacagtcgcggatgaaactctggcagagaggaccaccccaatccggggggggggggaaacgaacgaggcggacccaccaccccagcaaatatcagcgcggcgaggaaaaaaacacacgcgggcggtcac

SEQ ID NO: 338094 - DNA, 1864 bp, Homo sapiens
  misc_feature (1456)..(1456): n is a, c, g, or t
  misc_feature (1463)..(1463): n is a, c, g, or t
  misc_feature (1499)..(1499): n is a, c, g, or t
ggccgctcttgcccggcgtggcgactcgctagcgtcagcagcgccgcagccggacgagaaagcggaagatggcggcggcggccgggaggccgtgaggagagcggcggctgcgagggcggccgatggcggccgggaggcgccctcggacacttgcgggtcgttagggcgcgacgctgggaggcatgtcggagcacgtggagcccgcagctccggggcccgggcccaacggcggcggcggcggcccggcccccgcgcgcgggcctcgcacccccaatctcaaccccaaccccctcatcaacgtgcgcgaccggctcttccacgcgctgttcttcaagatggctgtcacctattcgcggctcttcccgcccgccttccgccgtctcttcgagttcttcgtgctgctcaaggccctgtttgtgctcttcgtcctggcctacatccacatcgtcttctcccgctcgcccatcaactgcctggagcacgtgcgtgacaagtggccgcgtgagggcatcctgcgtgtggaagtgcggcacaactcgagccgcgcgcccgtcttcctacagttctgcggcgtccagccagcccgctgggccctgctgggggcctcccccacgccccccaggacagtgtccccccgagtgactccgcagcttctgacacaactcccctgggggctgcggtaggcgggcctagcccggcctccatggccccaacggaggcgccctcggaggtggggtcctgagccgcacagctgagccgcctctgacccctgctggctgggcctgaccttcccgagcccgtgggggtgggggaggccagccacctccttcctctgggactgcccagcctgtgtcgggggctttcagggtttcgtggggtttgcccggaaggcggctttcctccccctggtgtgaggtcgcgcccgaggcttgtacccgctagtgaggtgtttgagctggtcagcaaggagagggggtggggttccgcggaaggttctggaggggtcttggtaggtctgcagtgaaccgtcctgaggatggagtggggtcccatggtgcaggtctctgagcaaggcggaggtgtggaggagaggccggcttggggtggggcctcgcgccctagtgccggccggcctcagcccggctctgcctggtgctccctgcagtgccttctccatggccccgccctccccgcgtgtgcgccaggcctggggtccccgggagagcagagcttgcgcctcgggcatagggacgtggggtgcaggcgccaacatcagtggcagcagccagggccgtggtccagtcccactcggggatggagtgggccggcggccaaaccagtcactcggggaggaatgcggaggagcgctcattccattctatttaattgcagtgtacaaaattgtgtttgtatatagaataaactgtctgttgacagcgaaaaaaaaaaaaaacanaaaaaanaaaaaaaaaaaaaaaaaaaaaaaaaaaaaaaaaaanaaaaaaaaaaaaaaaaaaaaaaaaaaaaaaaaaaaaaaaaaaaaaagggggggggggggggcgtaaacacaacctcctcggacggggcacccacaatcgataggccaccgcccccagctctttctaagaagaaagacggcggccgccaccaccagaggcgagcagtcaaaacaagacgaagagcgccacgcggcgcgcgcgactcaaaaaccccacggtcgggggtgagaaaaaaccacagtcgcggatgaaactctggcagagaggaccaccccaatccggggggggggggaaacgaacgaggcggacccaccaccccagcaaatatcagcgcggcgaggaaaaaaacacacgcgggcggtcac

SEQ ID NO: 338095 - DNA, 1310 bp, Homo sapiens
  misc_feature (902)..(902): n is a, c, g, or t
  misc_feature (909)..(909): n is a, c, g, or t
  misc_feature (945)..(945): n is a, c, g, or t
gcggccgccgctgtcacagaactgtaggaagacgggcgcgcggctcgagttgtgccgcacttccacacgcaggatgccctcacgcggccacttgtcacgcacgtgctccaggcagttgatgggcgagcgggagaagacgatgtggatgtaggccaggacgaagagcacaaacagaggtggggtcctgagccgcacagctgagccgcctctgacccctgctggctgggcctgaccttcccgagcccgtgggggtgggggaggccagccacctccttcctctgggactgcccagcctgtgtcgggggctttcagggtttcgtggggtttgcccggaaggcggctttcctccccctggtgtgaggtcgcgcccgaggcttgtacccgctagtgaggtgtttgagctggtcagcaaggagagggggtggggttccgcggaaggttctggaggggtcttggtaggtctgcagtgaaccgtcctgaggatggagtggggtcccatggtgcaggtctctgagcaaggcggaggtgtggaggagaggccggcttggggtggggcctcgcgccctagtgccggccggcctcagcccggctctgcctggtgctccctgcagtgccttctccatggccccgccctccccgcgtgtgcgccaggcctggggtccccgggagagcagagcttgcgcctcgggcatagggacgtggggtgcaggcgccaacatcagtggcagcagccagggccgtggtccagtcccactcggggatggagtgggccggcggccaaaccagtcactcggggaggaatgcggaggagcgctcattccattctatttaattgcagtgtacaaaattgtgtttgtatatagaataaactgtctgttgacagcgaaaaaaaaaaaaaacanaaaaaanaaaaaaaaaaaaaaaaaaaaaaaaaaaaaaaaaaanaaaaaaaaaaaaaaaaaaaaaaaaaaaaaaaaaaaaaaaaaaaaaagggggggggggggggcgtaaacacaacctcctcggacggggcacccacaatcgataggccaccgcccccagctctttctaagaagaaagacggcggccgccaccaccagaggcgagcagtcaaaacaagacgaagagcgccacgcggcgcgcgcgactcaaaaaccccacggtcgggggtgagaaaaaaccacagtcgcggatgaaactctggcagagaggaccaccccaatccggggggggggggaaacgaacgaggcggacccaccaccccagcaaatatcagcgcggcgaggaaaaaaacacacgcgggcggtcac

SEQ ID NO: 338096 - DNA, 1480 bp, Homo sapiens
  misc_feature (1072)..(1072): n is a, c, g, or t
  misc_feature (1079)..(1079): n is a, c, g, or t
  misc_feature (1115)..(1115): n is a, c, g, or t
tctttcagaagggcctccagttcccgcttgactttgcccacaacgggtggcccccagaaggtgagggccgtgtacagctgcaccagggaggcccctgcccggatcttctccagcgcgtcctgcccgctgctgcggtactcacaccaccagatcttcgtcttcatcgcgcccctgctgaccgtcatcctggccctcgtcgggatggaggccatcatgtcggagttcttcaacgacaccaccaccgccttctacatcatcctcatcgtgtggctcgcggaccagtatgacgccatctgctgccacaccagcaccagcaagcggcattggctgcggttcttctatctctaccacttcgccttctatgcctatcactaccgcttcaatgggcagtatagcagcctggccctggtcacctcctggctcttcatccagcaggtccgcatccaggagatgctgcttcaggcgccgccactgggccccgggacccccacggcgctgcccggaaggcggctttcctccccctggtgtgaggtcgcgcccgaggcttgtacccgctagtgaggtgtttgagctggtcagcaaggagagggggtggggttccgcggaaggttctggaggggtcttggtaggtctgcagtgaaccgtcctgaggatggagtggggtcccatggtgcaggtctctgagcaaggcggaggtgtggaggagaggccggcttggggtggggcctcgcgccctagtgccggccggcctcagcccggctctgcctggtgctccctgcagtgccttctccatggccccgccctccccgcgtgtgcgccaggcctggggtccccgggagagcagagcttgcgcctcgggcatagggacgtggggtgcaggcgccaacatcagtggcagcagccagggccgtggtccagtcccactcggggatggagtgggccggcggccaaaccagtcactcggggaggaatgcggaggagcgctcattccattctatttaattgcagtgtacaaaattgtgtttgtatatagaataaactgtctgttgacagcgaaaaaaaaaaaaaacanaaaaaanaaaaaaaaaaaaaaaaaaaaaaaaaaaaaaaaaaanaaaaaaaaaaaaaaaaaaaaaaaaaaaaaaaaaaaaaaaaaaaaaagggggggggggggggcgtaaacacaacctcctcggacggggcacccacaatcgataggccaccgcccccagctctttctaagaagaaagacggcggccgccaccaccagaggcgagcagtcaaaacaagacgaagagcgccacgcggcgcgcgcgactcaaaaaccccacggtcgggggtgagaaaaaaccacagtcgcggatgaaactctggcagagaggaccaccccaatccggggggggggggaaacgaacgaggcggacccaccaccccagcaaatatcagcgcggcgaggaaaaaaacacacgcgggcggtcac

SEQ ID NO: 338097 - DNA, 987 bp, Homo sapiens
ggccgctcttgcccggcgtggcgactcgctagcgtcagcagcgccgcagccggacgagaaagcggaagatggcggcggcggccgggaggccgtgaggagagcggcggctgcgagggcggccgatggcggccgggaggcgccctcggacacttgcgggtcgttagggcgcgacgctgggaggcatgtcggagcacgtggagcccgcagctccggggcccgggcccaacggcggcggcggcggcccggcccccgcgcgcgggcctcgcacccccaatctcaaccccaaccccctcatcaacgtgcgcgaccggctcttccacgcgctgttcttcaagatggctgtcacctattcgcggctcttcccgcccgccttccgccgtctcttcgagttcttcgtgctgctcaaggccctgtttgtgctcttcgtcctggcctacatccacatcgtcttctcccgctcgcccatcaactgcctggagcacgtgcgtgacaagtggccgcgtgagggcatcctgcgtgtggaagtgcggcacaactcgagccgcgcgcccgtcttcctacagttctgcggcgtccagccagcccgctgggccctgctgggggcctcccccacgccccccaggacagtgtccccccgagtgactccgcagcttctgacacaactcccctgggggctgcggtaggcgggcctagcccggcctccatggccccaacggaggcgccctcgtgccgatgacatgaacaagcaactcgggcgccggtacagcgctgatctgcggcagccccgactggccgttcgctggcagcggagtccggcgggagggccagtctgtgcgggggctagggaaatgcgtgtactggtgtggaaccggacaaaaaggctcggcgagaggccgagggacaagcgggctggggaccctgagccgggaagggcagaagaccggagaggcgagagacgaggacggagaaggggcgcgcgtgcgcggt

SEQ ID NO: 338098 - DNA, 291 bp, Homo sapiens
gaggaagagagaagcgtacgtggtgcggaatacggcgggtcgtggacctgctgcagatgctggagatgaacatggccatcgccttccccgcagcgcccctgctgaccgtcatcctggccctcgtcgggatggaggccatcatgtcggagttcttcaacgacaccaccaccgccttctacatcatcctcatcgtgtggctcgcggaccagtatgacgccatctgctgccacaccagcaccagcaagcggcattggctgcgtcttctatctctaccaccctagtgccgaaatc

SEQ ID NO: 338099 - DNA, 3116 bp, Homo sapiens
  misc_feature (2708)..(2708): n is a, c, g, or t
  misc_feature (2715)..(2715): n is a, c, g, or t
  misc_feature (2751)..(2751): n is a, c, g, or t
ggccgctcttgcccggcgtggcgactcgctagcgtcagcagcgccgcagccggacgagaaagcggaagatggcggcggcggccgggaggccgtgaggagagcggcggctgcgagggcggccgatggcggccgggaggcgccctcggacacttgcgggtcgttagggcgcgacgctgggaggcatgtcggagcacgtggagcccgcagctccggggcccgggcccaacggcggcggcggcggcccggcccccgcgcgcgggcctcgcacccccaatctcaaccccaaccccctcatcaacgtgcgcgaccggctcttccacgcgctgttcttcaagatggctgtcacctattcgcggctcttcccgcccgccttccgccgtctcttcgagttcttcgtgctgctcaaggccctgtttgtgctcttcgtcctggcctacatccacatcgtcttctcccgctcgcccatcaactgcctggagcacgtgcgtgacaagtggccgcgtgagggcatcctgcgtgtggaagtgcggcacaactcgagccgcgcgcccgtcttcctacagttctgtgacagcggcggccgcgggagcttcccgggcctggccgtggaaccaggcagcaacctggacatggaagatgaggaggaggaagagctgaccatggagatgtttgggaacagctccatcaagtttgagctggacatcgagcccaaggtgttcaagccgccgagtagcacagaggccctgaatgacagccaggagttccccttccccgagacgcccaccaaagtgtggccgcaggacgagtacatcgtggagtactcactagagtatggcttccttcgcctgtcgcaggccacccgccagcgcctgagcatccccgtcatggtggtcaccctggaccccacgcgggaccagtgcttcggggaccgcttcagccgcctgctgctggatgagttcctgggctacgatgacatcctcatgtccagcgtgaagggcctggccgagaacgaggagaacaagggcttcctgcggaatgtggtgtcgggcgagcactaccgctttgtgagcatgtggatggcgcggacgtcctacctggccgccttcgccatcatggtcatcttcacgctgagcgtgtccatgctgctgcggtactcacaccaccagatcttcgtcttcatcgcgcccctgctgaccgtcatcctggccctcgtcgggatggaggccatcatgtcggagttcttcaacgacaccaccaccgccttctacatcatcctcatcgtgtggctcgcggaccagtatgacgccatctgctgccacaccagcaccagcaagcggcattggctgcggttcttctatctctaccacttcgccttctatgcctatcactaccgcttcaatgggcagtatagcagcctggccctggtcacctcctggctcttcatccagcattccatgatctacttcttccaccactacgagctgcctgccatcctgcagcaggtccgcatccaggagatgctgcttcaggcgccgccactgggccccgggacccccacggcgctgcccgatgacatgaacaacaactcgggcgccccggctacagcccctgactctgccggccagccccccgccctgggccccgtctcgcccggggccagcgggagtcccgggcctgtggcagcggcgcccagctccctggtggccgcggcagcctcagtggcagcagctgccggtggtgacctgggttggatggcagagaccgctgccatcatcacagacgcctccttcctgtccggcctgagcgcctccctcctggagcggcgtccagccagcccgctgggccctgctgggggcctcccccacgccccccaggacagtgtccccccgagtgactccgcagcttctgacacaactcccctgggggctgcggtaggcgggcctagcccggcctccatggccccaacggaggcgccctcggaggtggggtcctgagccgcacagctgagccgcctctgacccctgctggctgggcctgaccttcccgagcccgtgggggtgggggaggccagccacctccttcctctgggactgcccagcctgtgtcgggggctttcagggtttcgtggggtttgcccggaaggcggctttcctccccctggtgtgaggtcgcgcccgaggcttgtacccgctagtgaggtgtttgagctggtcagcaaggagagggggtggggttccgcggaaggttctggaggggtcttggtaggtctgcagtgaaccgtcctgaggatggagtggggtcccatggtgcaggtctctgagcaaggcggaggtgtggaggagaggccggcttggggtggggcctcgcgccctagtgccggccggcctcagcccggctctgcctggtgctccctgcagtgccttctccatggccccgccctccccgcgtgtgcgccaggcctggggtccccgggagagcagagcttgcgcctcgggcatagggacgtggggtgcaggcgccaacatcagtggcagcagccagggccgtggtccagtcccactcggggatggagtgggccggcggccaaaccagtcactcggggaggaatgcggaggagcgctcattccattctatttaattgcagtgtacaaaattgtgtttgtatatagaataaactgtctgttgacagcgaaaaaaaaaaaaaacanaaaaaanaaaaaaaaaaaaaaaaaaaaaaaaaaaaaaaaaaanaaaaaaaaaaaaaaaaaaaaaaaaaaaaaaaaaaaaaaaaaaaaaagggggggggggggggcgtaaacacaacctcctcggacggggcacccacaatcgataggccaccgcccccagctctttctaagaagaaagacggcggccgccaccaccagaggcgagcagtcaaaacaagacgaagagcgccacgcggcgcgcgcgactcaaaaaccccacggtcgggggtgagaaaaaaccacagtcgcggatgaaactctggcagagaggaccaccccaatccggggggggggggaaacgaacgaggcggacccaccaccccagcaaatatcagcgcggcgaggaaaaaaacacacgcgggcggtcac

SEQ ID NO: 338100 - DNA, 2812 bp, Homo sapiens
  misc_feature (2447)..(2447): n is a, c, g, or t
ggccgctcttgcccggcgtggcgactcgctagcgtcagcagcgccgcagccggacgagaaagcggaagatggcggcggcggccgggaggccgtgaggagagcggcggctgcgagggcggccgatggcggccgggaggcgccctcggacacttgcgggtcgttagggcgcgacgctgggaggcatgtcggagcacgtggagcccgcagctccggggcccgggcccaacggcggcggcggcggcccggcccccgcgcgcgggcctcgcacccccaatctcaaccccaaccccctcatcaacgtgcgcgaccggctcttccacgcgctgttcttcaagatggctgtcacctattcgcggctcttcccgcccgccttccgccgtctcttcgagttcttcgtgctgctcaaggccctgtttgtgctcttcgtcctggcctacatccacatcgtcttctcccgctcgcccatcaactgcctggagcacgtgcgtgacaagtggccgcgtgagggcatcctgcgtgtggaagtgcggcacaactcgagccgcgcgcccgtcttcctacagttctgtgacagcggcggccgcgggagcttcccgggcctggccgtggaaccaggcagcaacctggacatggaagatgaggaggaggaagagctgaccatggagatgtttgggaacagctccatcaagtttgagctggacatcgagcccaaggtgttcaagccgccgagtagcacagaggccctgaatgacagccaggagttccccttccccgagacgcccaccaaagtgtggccgcaggacgagtacatcgtggagtactcactagagtatggcttccttcgcctgtcgcaggccacccgccagcgcctgagcatccccgtcatggtggtcaccctggaccccacgcgggaccagtgcttcggggaccgcttcagccgcctgctgctggatgagttcctgggctacgatgacatcctcatgtccagcgtgaagggcctggccgagaacgaggagaacaagggcttcctgcggaatgtggtgtcgggcgagcactaccgctttgtgagcatgtggatggcgcggacgtcctacctggccgccttcgccatcatggtcatcttcacgctgagcgtgtccatgctgctgcggtactcacaccaccagatcttcgtcttcatcgtggacctgctgcagatgctggagatgaacatggccatcgccttccccgcagcgcccctgctgaccgtcatcctggccctcgtcgggatggaggccatcatgtcggagttcttcaacgacaccaccaccgccttctacatcatcctcatcgtgtggctcgcggaccagtatgacgccatctgctgccacaccagcaccagcaagcggcattggctgcggttcttctatctctaccacttcgccttctatgcctatcactaccgcttcaatgggcagtatagcagcctggccctggtcacctcctggctcttcatccagcattccatgatctacttcttccaccactacgagctgcctgccatcctgcagcaggtccgcatccaggagatgctgcttcaggcgccgccactgggccccgggacccccacggcgctgcccgatgacatgaacaacaactcgggcgccccggctacagcccctgactctgccggccagccccccgccctgggccccgtctcgcccggggccagcgggagtcccgggcctgtggcagcggcgcccagctccctggtggccgcggcagcctcagtggcagcagctgccggtggtgacctgggttggatggcagagaccgctgccatcatcacagacgcctccttcctgtccggcctgagcgcctccctcctggagcggcgtccagccagcccgctgggccctgctgggggcctcccccacgccccccaggacagtgtccccccgagtgactccgcagcttctgacacaactcccctgggggctgcggtaggcgggcctagcccggcctccatggccccaacggaggcgccctcggaggtggggtcctgagccgcacagctgagccgcctctgacccctgctggctgggcctgaccttcccgagcccgtgggggtgggggaggccagccacctccttcctctgggactgcccagcctgtgtcgggggctttcagggtttcgtggggtttgcccggaaggcggctttcctccccctggtgtgagcttgcgcctcgggcatagggacgtggggtgcaggcgccaacatcagtggcagcagccagggccgtggtccagtcccactcggggatggagtgggccggcggccaaaccagtcactcggggaggaatgcggaggagcgctcattccattctatttaattgcagtgtacaaaattgtgtttgtatatagaataaactgtctgttgacagcgaaaaaaaaaaaaaaaaaaanaaaaaaaaaaaaaaaaaaaaaaaaaaaaaaaaaaaaaaaaaaaaaagggggggggggggggcgtaaacacaacctcctcggacggggcacccacaatcgataggccaccgcccccagctctttctaagaagaaagacggcggccgccaccaccagaggcgagcagtcaaaacaagacgaagagcgccacgcggcgcgcgcgactcaaaaaccccacggtcgggggtgagaaaaaaccacagtcgcggatgaaactctggcagagaggaccaccccaatccggggggggggggaaacgaacgaggcggacccaccaccccagcaaatatcagcgcggcgaggaaaaaaacacacgcgggcggtcac

SEQ ID NO: 338101 - DNA, 1960 bp, Homo sapiens
ggccgctcttgcccggcgtggcgactcgctagcgtcagcagcgccgcagccggacgagaaagcggaagatggcggcggcggccgggaggccgtgaggagagcggcggctgcgagggcggccgatggcggccgggaggcgccctcggacacttgcgggtcgttagggcgcgacgctgggaggcatgtcggagcacgtggagcccgcagctccggggcccgggcccaacggcggcggcggcggcccggcccccgcgcgcgggcctcgcacccccaatctcaaccccaaccccctcatcaacgtgcgcgaccggctcttccacgcgctgttcttcaagatggctgtcacctattcgcggctcttcccgcccgccttccgccgtctcttcgagttcttcgtgctgctcaaggccctgtttgtgctcttcgtcctggcctacatccacatcgtcttctcccgctcgcccatcaactgcctggagcacgtgcgtgacaagtggccgcgtgagggcatcctgcgtgtggaagtgcggcacaactcgagccgcgcgcccgtcttcctacagttctgtgacagcggcggccgcgggagcttcccgggcctggccgtggaaccaggcagcaacctggacatggaagatgaggaggaggaagagctgaccatggagatgtttgggaacagctccatcaagtttgagctggacatcgagcccaaggtgttcaagccgccgagtagcacagaggccctgaatgacagccaggagttccccttccccgagacgcccaccaaagtgtggccgcaggacgagtacatcgtggagtactcactagagtatggcttccttcgcctgtcgcaggccacccgccagcgcctgagcatccccgtcatggtggtcaccctggaccccacgcgggaccagtgcttcggggaccgcttcagccgcctgctgctggatgagttcctgggctacgatgacatcctcatgtccagcgtgaagggcctggccgagaacgaggagaacaagggcttcctgcggaatgtggtgtcgggcgagcactaccgctttgtgagcatgtggatggcgcggacgtcctacctggccgccttcgccatcatggtcatcttcacgctgagcgtgtccatgctgctgcggtactcacaccaccagatcttcgtcttcatcgtggacctgctgcagatgctggagatgaacatggccatcgccttccccgcagcgcccctgctgaccgtcatcctggccctcgtcgggatggaggccatcatgtcggagttcttcaacgacaccaccaccgccttctacatcatcctcatcgtgtggctcgcggaccagtatgacgccatctgctgccacaccagcaccagcaagcggcattggctgcggttcttctatctctaccacttcgccttctatgcctatcactaccgcttcaatgggcagtatagcagcctggccctggtcacctcctggctcttcatccagcattccatgatctacttcttccaccactacgagctgcctgccatcctgcagcaggtccgcatccaggagatgctgcttcaggcgccgccactgggccccgggacccccacggcgctgcccgatgacatgaacaacaactcgggcgccccggctacagcccctgactctgccggccagccccccgccctgggccccgtctcgcccggggccagcgggagtcccgggcctgtggcagcggcgcccagctccctggtggccgcggcagcctcagtggcagcagctgccggtggtgacctgggttggatggcagagaccgctgccatcatcacagacgcctccttcctgtccggcggccaaaccagtcactcggggaggaatgcggaggagcgctcattccattctatttaattgcagtgtacaaaattgtgtttgtatatagaataaactgtctgttgacagcg

SEQ ID NO: 338102 - DNA, 3305 bp, Homo sapiens
  misc_feature (2897)..(2897): n is a, c, g, or t
  misc_feature (2904)..(2904): n is a, c, g, or t
  misc_feature (2940)..(2940): n is a, c, g, or t
ggccgctcttgcccggcgtggcgactcgctagcgtcagcagcgccgcagccggacgagaaagcggaagatggcggcggcggccgggaggccgtgaggagagcggcggctgcgagggcggccgatggcggccgggaggcgccctcggacacttgcgggtcgttagggcgcgacgctgggaggcatgtcggagcacgtggagcccgcagctccggggcccgggcccaacggcggcggcggcggcccggcccccgcgcgcgggcctcgcacccccaatctcaaccccaaccccctcatcaacgtgcgcgaccggctcttccacgcgctgttcttcaagatggctgtcacctattcgcggctcttcccgcccgccttccgccgtctcttcgagttcttcgtgctgctcaaggccctgtttgtgctcttcgtcctggcctacatccacatcgtcttctcccgctcgcccatcaactgcctggagcacgtgcgtgacaagtggccgcgtgagggcatcctgcgtgtggaagtgcggcacaactcgagccgcgcgcccgtcttcctacagttctgtgacagcggcggccgcgggagcttcccgggcctggccgtggaaccaggcagcaacctggacatggaagatgaggaggaggaagagctgaccatggagatgtttgggaacagctccatcaagtttgagctggacatcgagcccaaggtgttcaagccgccgagtagcacagaggccctgaatgacagccaggagttccccttccccgagacgcccaccaaagtgtggccgcaggacgagtacatcgtggagtactcactagagtatggcttccttcgcctgtcgcaggccacccgccagcgcctgagcatccccgtcatggtggtcaccctgggtgagtctgagctgctgggcttggggagctccatggcggggcctcccctcctccctcgggtctcctcctgctggtgcgggacggggggctgtgcaggaagcactggggctcccggctccctgattcacccacccgcagaccccacgcgggaccagtgcttcggggaccgcttcagccgcctgctgctggatgagttcctgggctacgatgacatcctcatgtccagcgtgaagggcctggccgagaacgaggagaacaagggcttcctgcggaatgtggtgtcgggcgagcactaccgctttgtgagcatgtggatggcgcggacgtcctacctggccgccttcgccatcatggtcatcttcacgctgagcgtgtccatgctgctgcggtactcacaccaccagatcttcgtcttcatcgtggacctgctgcagatgctggagatgaacatggccatcgccttccccgcagcgcccctgctgaccgtcatcctggccctcgtcgggatggaggccatcatgtcggagttcttcaacgacaccaccaccgccttctacatcatcctcatcgtgtggctcgcggaccagtatgacgccatctgctgccacaccagcaccagcaagcggcattggctgcggttcttctatctctaccacttcgccttctatgcctatcactaccgcttcaatgggcagtatagcagcctggccctggtcacctcctggctcttcatccagcattccatgatctacttcttccaccactacgagctgcctgccatcctgcagcaggtccgcatccaggagatgctgcttcaggcgccgccactgggccccgggacccccacggcgctgcccgatgacatgaacaacaactcgggcgccccggctacagcccctgactctgccggccagccccccgccctgggccccgtctcgcccggggccagcgggagtcccgggcctgtggcagcggcgcccagctccctggtggccgcggcagcctcagtggcagcagctgccggtggtgacctgggttggatggcagagaccgctgccatcatcacagacgcctccttcctgtccggcctgagcgcctccctcctggagcggcgtccagccagcccgctgggccctgctgggggcctcccccacgccccccaggacagtgtccccccgagtgactccgcagcttctgacacaactcccctgggggctgcggtaggcgggcctagcccggcctccatggccccaacggaggcgccctcggaggtggggtcctgagccgcacagctgagccgcctctgacccctgctggctgggcctgaccttcccgagcccgtgggggtgggggaggccagccacctccttcctctgggactgcccagcctgtgtcgggggctttcagggtttcgtggggtttgcccggaaggcggctttcctccccctggtgtgaggtcgcgcccgaggcttgtacccgctagtgaggtgtttgagctggtcagcaaggagagggggtggggttccgcggaaggttctggaggggtcttggtaggtctgcagtgaaccgtcctgaggatggagtggggtcccatggtgcaggtctctgagcaaggcggaggtgtggaggagaggccggcttggggtggggcctcgcgccctagtgccggccggcctcagcccggctctgcctggtgctccctgcagtgccttctccatggccccgccctccccgcgtgtgcgccaggcctggggtccccgggagagcagagcttgcgcctcgggcatagggacgtggggtgcaggcgccaacatcagtggcagcagccagggccgtggtccagtcccactcggggatggagtgggccggcggccaaaccagtcactcggggaggaatgcggaggagcgctcattccattctatttaattgcagtgtacaaaattgtgtttgtatatagaataaactgtctgttgacagcgaaaaaaaaaaaaaacanaaaaaanaaaaaaaaaaaaaaaaaaaaaaaaaaaaaaaaaaanaaaaaaaaaaaaaaaaaaaaaaaaaaaaaaaaaaaaaaaaaaaaaagggggggggggggggcgtaaacacaacctcctcggacggggcacccacaatcgataggccaccgcccccagctctttctaagaagaaagacggcggccgccaccaccagaggcgagcagtcaaaacaagacgaagagcgccacgcggcgcgcgcgactcaaaaaccccacggtcgggggtgagaaaaaaccacagtcgcggatgaaactctggcagagaggaccaccccaatccggggggggggggaaacgaacgaggcggacccaccaccccagcaaatatcagcgcggcgaggaaaaaaacacacgcgggcggtcac

SEQ ID NO: 338103 - DNA, 1431 bp, Homo sapiens
ggccgctcttgcccggcgtggcgactcgctagcgtcagcagcgccgcagccggacgagaaagcggaagatggcggcggcggccgggaggccgtgaggagagcggcggctgcgagggcggccgatggcggccgggaggcgccctcggacacttgcgggtcgttagggcgcgacgctgggaggcatgtcggagcacgtggagcccgcagctccggggcccgggcccaacggcggcggcggcggcccggcccccgcgcgcgggcctcgcacccccaatctcaaccccaaccccctcatcaacgtgcgcgaccggctcttccacgcgctgttcttcaagatggctgtcacctattcgcggctcttcccgcccgccttccgccgtctcttcgagttcttcgtgctgctcaaggccctgtttgtgctcttcgtcctggcctacatccacatcgtcttctcccgctcgcccatcaactgcctggagcacgtgcgtgacaagtggccgcgtgagggcatcctgcgtgtggaagtgcggcacaactcgagccgcgcgcccgtcttcctacagttctgtgacagcggcggccgcgggagcttcccgggcctggccgtggaaccaggcagcaacctggacatggaagatgaggaggaggaagagctgaccatggagatgtttgggaacagctccatcaagtttgagctggacatcgagcccaaggtgttcaagccgccgagtagcacagaggccctgaatgacagccaggagttccccttccccgagacgcccaccaaagtgtggccgcaggacgagtacatcgtggagtactcactagagtatggcttccttcgcctgtcgcaggccacccgccagcgcctgagcatccccgtcatggtggtcaccctggaccccacgcgggaccagtgcttcggggaccgcttcagccgcctgctgctggatgagttcctgggctacgatgacatcctcatgtccagcgtgaagggcctggccgagaacgaggagaacaagggcttcctgcggaatgtggtgtcgggcgagcactaccgctttgtgagcatgtggatggcgcggacgtcctacctggccgccttcgccatcatggtcatcttcacgctgagcgtgtccatgctgctgcggtactcacaccaccagatcttcgtcttcatcgtggacctgctgcagatgctggagatgaacatggccatcgccttccccgcagcgcccctgctgaccgtcatcctggccctcgtcgggatggaggccatcatgtcggagttcttcaacgacaccaccaccgccttctacatcatcctcatcgtgtggctcgcggaccagtatgacgccatctgctgccacaccagcaccagcaagcggcattggctgcgtcttctatctctaccaccctagtgccgaaatc

SEQ ID NO: 338104 - DNA, 3185 bp, Homo sapiens
  misc_feature (2777)..(2777): n is a, c, g, or t
  misc_feature (2784)..(2784): n is a, c, g, or t
  misc_feature (2820)..(2820): n is a, c, g, or t
ggccgctcttgcccggcgtggcgactcgctagcgtcagcagcgccgcagccggacgagaaagcggaagatggcggcggcggccgggaggccgtgaggagagcggcggctgcgagggcggccgatggcggccgggaggcgccctcggacacttgcgggtcgttagggcgcgacgctgggaggcatgtcggagcacgtggagcccgcagctccggggcccgggcccaacggcggcggcggcggcccggcccccgcgcgcgggcctcgcacccccaatctcaaccccaaccccctcatcaacgtgcgcgaccggctcttccacgcgctgttcttcaagatggctgtcacctattcgcggctcttcccgcccgccttccgccgtctcttcgagttcttcgtgctgctcaaggccctgtttgtgctcttcgtcctggcctacatccacatcgtcttctcccgctcgcccatcaactgcctggagcacgtgcgtgacaagtggccgcgtgagggcatcctgcgtgtggaagtgcggcacaactcgagccgcgcgcccgtcttcctacagttctgtgacagcggcggccgcgggagcttcccgggcctggccgtggaaccaggcagcaacctggacatggaagatgaggaggaggaagagctgaccatggagatgtttgggaacagctccatcaaggtccctggtcgcccacagtttgagctggacatcgagcccaaggtgttcaagccgccgagtagcacagaggccctgaatgacagccaggagttccccttccccgagacgcccaccaaagtgtggccgcaggacgagtacatcgtggagtactcactagagtatggcttccttcgcctgtcgcaggccacccgccagcgcctgagcatccccgtcatggtggtcaccctggaccccacgcgggaccagtgcttcggggaccgcttcagccgcctgctgctggatgagttcctgggctacgatgacatcctcatgtccagcgtgaagggcctggccgagaacgaggagaacaagggcttcctgcggaatgtggtgtcgggcgagcactaccgctttgtgagcatgtggatggcgcggacgtcctacctggccgccttcgccatcatggtcatcttcacgctgagcgtgtccatgctgctgcggtactcacaccaccagatcttcgtcttcatcgtggacctgctgcagatgctggagatgaacatggccatcgccttccccgcagcgcccctgctgaccgtcatcctggccctcgtcgggatggaggccatcatgtcggagttcttcaacgacaccaccaccgccttctacatcatcctcatcgtgtggctcgcggaccagtatgacgccatctgctgccacaccagcaccagcaagcggcattggctgcggttcttctatctctaccacttcgccttctatgcctatcactaccgcttcaatgggcagtatagcagcctggccctggtcacctcctggctcttcatccagcattccatgatctacttcttccaccactacgagctgcctgccatcctgcagcaggtccgcatccaggagatgctgcttcaggcgccgccactgggccccgggacccccacggcgctgcccgatgacatgaacaacaactcgggcgccccggctacagcccctgactctgccggccagccccccgccctgggccccgtctcgcccggggccagcgggagtcccgggcctgtggcagcggcgcccagctccctggtggccgcggcagcctcagtggcagcagctgccggtggtgacctgggttggatggcagagaccgctgccatcatcacagacgcctccttcctgtccggcctgagcgcctccctcctggagcggcgtccagccagcccgctgggccctgctgggggcctcccccacgccccccaggacagtgtccccccgagtgactccgcagcttctgacacaactcccctgggggctgcggtaggcgggcctagcccggcctccatggccccaacggaggcgccctcggaggtggggtcctgagccgcacagctgagccgcctctgacccctgctggctgggcctgaccttcccgagcccgtgggggtgggggaggccagccacctccttcctctgggactgcccagcctgtgtcgggggctttcagggtttcgtggggtttgcccggaaggcggctttcctccccctggtgtgaggtcgcgcccgaggcttgtacccgctagtgaggtgtttgagctggtcagcaaggagagggggtggggttccgcggaaggttctggaggggtcttggtaggtctgcagtgaaccgtcctgaggatggagtggggtcccatggtgcaggtctctgagcaaggcggaggtgtggaggagaggccggcttggggtggggcctcgcgccctagtgccggccggcctcagcccggctctgcctggtgctccctgcagtgccttctccatggccccgccctccccgcgtgtgcgccaggcctggggtccccgggagagcagagcttgcgcctcgggcatagggacgtggggtgcaggcgccaacatcagtggcagcagccagggccgtggtccagtcccactcggggatggagtgggccggcggccaaaccagtcactcggggaggaatgcggaggagcgctcattccattctatttaattgcagtgtacaaaattgtgtttgtatatagaataaactgtctgttgacagcgaaaaaaaaaaaaaacanaaaaaanaaaaaaaaaaaaaaaaaaaaaaaaaaaaaaaaaaanaaaaaaaaaaaaaaaaaaaaaaaaaaaaaaaaaaaaaaaaaaaaaagggggggggggggggcgtaaacacaacctcctcggacggggcacccacaatcgataggccaccgcccccagctctttctaagaagaaagacggcggccgccaccaccagaggcgagcagtcaaaacaagacgaagagcgccacgcggcgcgcgcgactcaaaaaccccacggtcgggggtgagaaaaaaccacagtcgcggatgaaactctggcagagaggaccaccccaatccggggggggggggaaacgaacgaggcggacccaccaccccagcaaatatcagcgcggcgaggaaaaaaacacacgcgggcggtcac

SEQ ID NO: 338105 - DNA, 3280 bp, Homo sapiens
  misc_feature (2872)..(2872): n is a, c, g, or t
  misc_feature (2879)..(2879): n is a, c, g, or t
  misc_feature (2915)..(2915): n is a, c, g, or t
ggccgctcttgcccggcgtggcgactcgctagcgtcagcagcgccgcagccggacgagaaagcggaagatggcggcggcggccgggaggccgtgaggagagcggcggctgcgagggcggccgatggcggccgggaggcgccctcggacacttgcgggtcgttagggcgcgacgctgggaggcatgtcggagcacgtggagcccgcagctccggggcccgggcccaacggcggcggcggcggcccggcccccgcgcgcgggcctcgcacccccaatctcaaccccaaccccctcatcaacgtgcgcgaccggctcttccacgcgctgttcttcaagatggctgtcacctattcgcggctcttcccgcccgccttccgccgtctcttcgagttcttcgtgctgctcaagtgacagcggcggccgcgggagcttcccgggcctggccgtggaaccaggcagcaacctggacatggaagatgaggaggaggaagagctgaccatggagatgtttgggaacagctccatcaagtttgagctggacatcgagcccaaggtgttcaagccgccgagtagcacagaggccctgaatgacagccaggagttccccttccccgagacgcccaccaaagtgtggccgcaggacgagtacatcgtggagtactcactagagtatggcttccttcgcctgtcgcaggccacccgccagcgcctgagcatccccgtcatggtggtcaccctgggtgagtctgagctgctgggcttggggagctccatggcggggcctcccctcctccctcgggtctcctcctgctggtgcgggacggggggctgtgcaggaagcactggggtctgccccgccccaggcacgcttcccagggctggggtcctggatgggtttcctaagaatgggcagggccaggaagcaggccaggcctcagcaatggagccagctggggcagggcccagggggtggcctgggcggggctcccggctccctgattcacccacccgcagaccccacgcgggaccagtgcttcggggaccgcttcagccgcctgctgctggatgagttcctgggctacgatgacatcctcatgtccagcgtgaagggcctggccgagaacgaggagaacaagggcttcctgcggaatgtggtgtcgggcgagcactaccgctttgtgagcatgtggatggcgcggacgtcctacctggccgccttcgccatcatggtcatcttcacgctgagcgtgtccatgctgctgcggtactcacaccaccagatcttcgtcttcatcgtggacctgctgcagatgctggagatgaacatggccatcgccttccccgcagcgcccctgctgaccgtcatcctggccctcgtcgggatggaggccatcatgtcggagttcttcaacgacaccaccaccgccttctacatcatcctcatcgtgtggctcgcggaccagtatgacgccatctgctgccacaccagcaccagcaagcggcattggctgcggttcttctatctctaccacttcgccttctatgcctatcactaccgcttcaatgggcagtatagcagcctggccctggtcacctcctggctcttcatccagcattccatgatctacttcttccaccactacgagctgcctgccatcctgcagcaggtccgcatccaggagatgctgcttcaggcgccgccactgggccccgggacccccacggcgctgcccgatgacatgaacaacaactcgggcgccccggctacagcccctgactctgccggccagccccccgccctgggccccgtctcgcccggggccagcgggagtcccgggcctgtggcagcggcgcccagctccctggtggccgcggcagcctcagtggcagcagctgccggtggtgacctgggttggatggcagagaccgctgccatcatcacagacgcctccttcctgtccggcctgagcgcctccctcctggagcggcgtccagccagcccgctgggccctgctgggggcctcccccacgccccccaggacagtgtccccccgagtgactccgcagcttctgacacaactcccctgggggctgcggtaggcgggcctagcccggcctccatggccccaacggaggcgccctcggaggtggggtcctgagccgcacagctgagccgcctctgacccctgctggctgggcctgaccttcccgagcccgtgggggtgggggaggccagccacctccttcctctgggactgcccagcctgtgtcgggggctttcagggtttcgtggggtttgcccggaaggcggctttcctccccctggtgtgaggtcgcgcccgaggcttgtacccgctagtgaggtgtttgagctggtcagcaaggagagggggtggggttccgcggaaggttctggaggggtcttggtaggtctgcagtgaaccgtcctgaggatggagtggggtcccatggtgcaggtctctgagcaaggcggaggtgtggaggagaggccggcttggggtggggcctcgcgccctagtgccggccggcctcagcccggctctgcctggtgctccctgcagtgccttctccatggccccgccctccccgcgtgtgcgccaggcctggggtccccgggagagcagagcttgcgcctcgggcatagggacgtggggtgcaggcgccaacatcagtggcagcagccagggccgtggtccagtcccactcggggatggagtgggccggcggccaaaccagtcactcggggaggaatgcggaggagcgctcattccattctatttaattgcagtgtacaaaattgtgtttgtatatagaataaactgtctgttgacagcgaaaaaaaaaaaaaacanaaaaaanaaaaaaaaaaaaaaaaaaaaaaaaaaaaaaaaaaanaaaaaaaaaaaaaaaaaaaaaaaaaaaaaaaaaaaaaaaaaaaaaagggggggggggggggcgtaaacacaacctcctcggacggggcacccacaatcgataggccaccgcccccagctctttctaagaagaaagacggcggccgccaccaccagaggcgagcagtcaaaacaagacgaagagcgccacgcggcgcgcgcgactcaaaaaccccacggtcgggggtgagaaaaaaccacagtcgcggatgaaactctggcagagaggaccaccccaatccggggggggggggaaacgaacgaggcggacccaccaccccagcaaatatcagcgcggcgaggaaaaaaacacacgcgggcggtcac

SEQ ID NO: 338106 - DNA, 1969 bp, Homo sapiens
  misc_feature (1561)..(1561): n is a, c, g, or t
  misc_feature (1568)..(1568): n is a, c, g, or t
  misc_feature (1604)..(1604): n is a, c, g, or t
cacatgcaggatatgaagaaaaaaagtgccattgagcacctggatgcccgtcatcctggccctcgtcgggatggaggccatcatgtcggagttcttcaacgacaccaccaccgccttctacatcatcctcatcgtgtggctcgcggaccagtatgacgccatctgctgccacaccagcaccagcaagcggcattggctgcggttcttctatctctaccacttcgccttctatgcctatcactaccgcttcaatgggcagtatagcagcctggccctggtcacctcctggctcttcatccagcattccatgatctacttcttccaccactacgagctgcctgccatcctgcagcaggtccgcatccaggagatgctgcttcaggcgccgccactgggccccgggacccccacggcgctgcccgatgacatgaacaacaactcgggcgccccggctacagcccctgactctgccggccagccccccgccctgggccccgtctcgcccggggccagcgggagtcccgggcctgtggcagcggcgcccagctccctggtggccgcggcagcctcagtggcagcagctgccggtggtgacctgggttggatggcagagaccgctgccatcatcacagacgcctccttcctgtccggcctgagcgcctccctcctggagcggcgtccagccagcccgctgggccctgctgggggcctcccccacgccccccaggacagtgtccccccgagtgactccgcagcttctgacacaactcccctgggggctgcggtaggcgggcctagcccggcctccatggccccaacggaggcgccctcggaggtggggtcctgagccgcacagctgagccgcctctgacccctgctggctgggcctgaccttcccgagcccgtgggggtgggggaggccagccacctccttcctctgggactgcccagcctgtgtcgggggctttcagggtttcgtggggtttgcccggaaggcggctttcctccccctggtgtgaggtcgcgcccgaggcttgtacccgctagtgaggtgtttgagctggtcagcaaggagagggggtggggttccgcggaaggttctggaggggtcttggtaggtctgcagtgaaccgtcctgaggatggagtggggtcccatggtgcaggtctctgagcaaggcggaggtgtggaggagaggccggcttggggtggggcctcgcgccctagtgccggccggcctcagcccggctctgcctggtgctccctgcagtgccttctccatggccccgccctccccgcgtgtgcgccaggcctggggtccccgggagagcagagcttgcgcctcgggcatagggacgtggggtgcaggcgccaacatcagtggcagcagccagggccgtggtccagtcccactcggggatggagtgggccggcggccaaaccagtcactcggggaggaatgcggaggagcgctcattccattctatttaattgcagtgtacaaaattgtgtttgtatatagaataaactgtctgttgacagcgaaaaaaaaaaaaaacanaaaaaanaaaaaaaaaaaaaaaaaaaaaaaaaaaaaaaaaaanaaaaaaaaaaaaaaaaaaaaaaaaaaaaaaaaaaaaaaaaaaaaaagggggggggggggggcgtaaacacaacctcctcggacggggcacccacaatcgataggccaccgcccccagctctttctaagaagaaagacggcggccgccaccaccagaggcgagcagtcaaaacaagacgaagagcgccacgcggcgcgcgcgactcaaaaaccccacggtcgggggtgagaaaaaaccacagtcgcggatgaaactctggcagagaggaccaccccaatccggggggggggggaaacgaacgaggcggacccaccaccccagcaaatatcagcgcggcgaggaaaaaaacacacgcgggcggtcac

SEQ ID NO: 338107 - DNA, 1546 bp, Homo sapiens
  misc_feature (1138)..(1138): n is a, c, g, or t
  misc_feature (1145)..(1145): n is a, c, g, or t
  misc_feature (1181)..(1181): n is a, c, g, or t
aaaaaaggcagcagctaccaagaaaccggctacagcccctgactctgccggccagccccccgccctgggccccgtctcgcccggggccagcgggagtcccgggcctgtggcagcggcgcccagctccctggtggccgcggcagcctcagtggcagcagctgccggtggtgacctgggttggatggcagagaccgctgccatcatcacagacgcctccttcctgtccggcctgagcgcctccctcctggagcggcgtccagccagcccgctgggccctgctgggggcctcccccacgccccccaggacagtgtccccccgagtgactccgcagcttctgacacaactcccctgggggctgcggtaggcgggcctagcccggcctccatggccccaacggaggcgccctcggaggtggggtcctgagccgcacagctgagccgcctctgacccctgctggctgggcctgaccttcccgagcccgtgggggtgggggaggccagccacctccttcctctgggactgcccagcctgtgtcgggggctttcagggtttcgtggggtttgcccggaaggcggctttcctccccctggtgtgaggtcgcgcccgaggcttgtacccgctagtgaggtgtttgagctggtcagcaaggagagggggtggggttccgcggaaggttctggaggggtcttggtaggtctgcagtgaaccgtcctgaggatggagtggggtcccatggtgcaggtctctgagcaaggcggaggtgtggaggagaggccggcttggggtggggcctcgcgccctagtgccggccggcctcagcccggctctgcctggtgctccctgcagtgccttctccatggccccgccctccccgcgtgtgcgccaggcctggggtccccgggagagcagagcttgcgcctcgggcatagggacgtggggtgcaggcgccaacatcagtggcagcagccagggccgtggtccagtcccactcggggatggagtgggccggcggccaaaccagtcactcggggaggaatgcggaggagcgctcattccattctatttaattgcagtgtacaaaattgtgtttgtatatagaataaactgtctgttgacagcgaaaaaaaaaaaaaacanaaaaaanaaaaaaaaaaaaaaaaaaaaaaaaaaaaaaaaaaanaaaaaaaaaaaaaaaaaaaaaaaaaaaaaaaaaaaaaaaaaaaaaagggggggggggggggcgtaaacacaacctcctcggacggggcacccacaatcgataggccaccgcccccagctctttctaagaagaaagacggcggccgccaccaccagaggcgagcagtcaaaacaagacgaagagcgccacgcggcgcgcgcgactcaaaaaccccacggtcgggggtgagaaaaaaccacagtcgcggatgaaactctggcagagaggaccaccccaatccggggggggggggaaacgaacgaggcggacccaccaccccagcaaatatcagcgcggcgaggaaaaaaacacacgcgggcggtcac

SEQ ID NO: 338108 - DNA, 338 bp, Homo sapiens
ctctcaaggtgctgggattacaggcgtgagccaccgtgcctggctattttttttctttgaaaagaagtcacatgaataagtcacatgattcaaaagtcaaaaagtatgaaaaaatttgcagtattaatctcccacccttgtgtccttggctatcctgttctcttggtaggaattttttaatgcttcaaattgatttatcatagctaaaagtcttatttctcttatactcttagaactttcaataaaatattggctgacaggtgatttctggatgtcaggaacatttctgattaggtaagcccttaagtgagaacatgtgctatttgttttttttttac

SEQ ID NO: 338109 - DNA, 720 bp, Homo sapiens
gatctaatggctcccttagctgatgagcattgtgtaaccatcaattgaatgggctgaacttaatataattaataggtttgcagcactcccacacctattataagatcatattttgacccatttttcatttcttctttataagcatttagatgtttatgtggcattcacattttaatattccttggatgaacatggcatcatatgattagaaaaccaaaattcatttttgatggctgttgtggtcagatcgtgtcctctaaaattcatgtgctggaaacttaatttctagtgttaacagtgccgagaggtaggggctttgggaaagtttaatggattaatgcccacatataagggcttgttggagggaatttgggctctttgttgccccttccatcctttctaccatgtgaggacgccacactcctcccctttggaagatgcagcaaacaaggtgccatcttggaagcaaagactaagctcttaccacacatcgaacctgttggtgccctgatcttggactcccagcctacagaactgtgaggaagttaagtttctgttatttataaaattaccaagtctcaggtattgtgttatagcagcataaatggactaagacaatgccaaaggtggcacttgccatagatctgctgtgatgatatcaactctttgctttccaggagttaaagctttggattctgatgggttgattttcttttgtgt

SEQ ID NO: 338110 - DNA, 387 bp, Homo sapiens
atcaactctttgctttccaggagttaaagctttggattctgatgggttgattttcttttgtgtggacccttgtactggttactatttaatagttcttttcttatcttaggccgggcgcgatggctcatgcctttaatcccagcactttgggaggccaaggcgggcgaatcacgaggtcaggagatcaagaccatcctggccaacgtggtgaaaccccgtctctactaaaaatacaaaaaattagccgggcgtggtggcgggcacctgtagtcccagctactcaggaggctgaggcagaatggcgtgaacccaggaggcggagcttgcagtgagccgagatggcgccactgcactccagcctgggtgacaaagcgagactttgtctca

SEQ ID NO: 338111 - DNA, 206 bp, Homo sapiens
aggttcaaggaaagagaggagagcatggccccaggtagctcagagggcaagtgccacacacatgaggaagggactgttttattaagctgtgtaaaaaatgagtcaatgtccagaatgcatccacgtacctccccttttgaggcctcctttaacagtgcatgtttctgactgttaattttttttttttttacaattgaggtattacc

SEQ ID NO: 338112 - DNA, 353 bp, Homo sapiens
caaggcttgtattatgatgggccatttgaaatggaaaaattatgagactaatgcctgtgctatctactaacagagctgtaaaaagatcacataagtatagtccggcagttaggaatatggactctgaagtcagaactgaatttcagaatcactttgtcacttactgccttgtattcctgagcaagaccctttacttttctgagcttcagtcacttcaagtgtagaaaggggagatggttataatattttctcttaggttggatggctatgcccattcagtaaacaaagttcattgactacctacttctagtggctggagataaatctgtttaaagggtagtccaatatactca

SEQ ID NO: 338113 - DNA, 392 bp, Homo sapiens
gtgatgcccccacctcggcctctcaaagtgctgggattacaggcgagagccacagcacccaggccctaaaccttatttttccatattctgaataatcttaaactctgttgactgagtttgggtaaaggtagtttgtttcatttaaatactggagaaatattattcagaaacaagtcctaacagtggcttgtaataaacttttcactgaggttaatgatgcctacatctacagaatattgatgaggcagaattgcctaagaagcacttagtataaaataaaataaaaccaagtaccaaaacatagtcaatttcctttgccctatcttataccactgagagttaaccagattggccatttggaatgttgattctcaaaaaaatgtaccttgata

SEQ ID NO: 338114 - DNA, 566 bp, Homo sapiens
gccttcctttcggccggaaccgccatcttccagtaattcgccaaaatgacgaacacaaagggaaagaggagaggcacccgatatatgttctctaggccttttagaaaacatggagttgttcctttggccacatatatgcgaatctataagaaaggtgatattgtagacatcaagggaatgggtactgttcaaaaaggaatgccccacaagtgttaccatggcaaaactggaagagtctacaatgttacccagcatgctgttggcattgttgtaaacaaacaagttaagggcaagattcttgccaagagaattaatgtgcgtattgagcacattaagcactctaagagccgagatagcttcctgaaacgtgtgaaggaaaatgatcagaaaaagaaagaagccaaagagaaaggtacctgggttcaactaaagcgccagcctgctccacccagagaagcacactttgtgagaaccaatgggaaggagcctgagctgctggaacctattccctatgaattcatggcataataggtgttaaaaaaaaaaataaaggacctctgggctac

SEQ ID NO: 338115 - DNA, 901 bp, Homo sapiens
gccttcctttcggccggaaccgccatcttccagtaattcgccaaaatgacgaacacaaagggaaagaggagaggcacccgatatatgttctctaggccttttagaaaacatggagttgttcctttggccacatatatgcgaatctataagaaaggtgatattgtagacatcaagggaatgggtactgttcaaaaaggaatgccccacaagtgttaccatggcaaaactggaagagtctacaatgttacccagcatgctgttggcattgttgtaaacaaacaagttaagggcaagattcttgccaagagaattaatgtgcgtattgagcacattaagcactctaagagccgagatagcttcctgaaacgtgtgaaggaaaatgatcagaaaaagaaagaagccaaagagaaaggtacctgggttcaactaaagcgccagcctgctccacccagagaagcacactttgtgagaaccaatgggaaggagcctgagctgctggaacctattccctatgaattcatggcataataggtgttaaaaaaaaaaataaaggacctctgggctacaaaaaaaaaaaaaacaacaaaaaaaaaaaacaaacaaaaaaaaaaaaaaaaaaaaaaaaaaaaaaaaaaaaaaaaaaaaaaaaaagagagcgcccacaccaacaacaataacagagaaggcggcggcgctgcgcgaagagcaaaaccaacgcaccagcacaggagagcagaggatagagaaaacaaacacaaccacacgagagcggaagacacaaggggcccagcgaacagggatgccagggtacaagaacggcccgaagaggagagcatagagacaacggacggcagcagggccactactatagagaacagaaaaaagaaaatggagaggatat

SEQ ID NO: 338116 - DNA, 788 bp, Homo sapiens
  misc_feature (648)..(648): n is a, c, g, or t
gccttcctttcggccggaaccgccatcttccagtaattcgccaaaatgacgaacacaaagggaaagaggagaggcacccgatatatgttctctaggccttttagaaaacatggagttgttcctttggccacatatatgcgaatctataagaaaggtgatattgtagacatcaagggaatgggtactgttcaaaaaggaatgccccacaagtgttaccatggcaaaactggaagagtctacaatgttacccagcatgctgttggcattgttgtaaacaaacaagttaagggcaagattcttgccaagagaattaatgtgcgtattgagcacattaagcactctaagagccgagatagcttcctgaaacgtgtgaaggaaaatgatcagaaaaagaaagaagccaaagagaaaggtacctgggttcaactaaagcgccagcctgctccacccagagaagcacactttgtgagaaccaatgggaaggagcctgagctgctggaacctattccctatgaattcatggcataataggtgttaaaaaaaaaaataaaggacctctgggctacaaaaaaaaaaaaaacaacaaaaaaaaaaaacaaacaaaaaaaaaaaaacccggggggcatatatatggggggggggcaaaanaagggtcataataaaagtggaccacggtggcaacacacgtgtctctcgagcacaggcttttgttctacacaggggggaaacacgggaggagcccacataagggggaccaaataactgcaaacgcggggttacccggaaat

SEQ ID NO: 338117 - DNA, 881 bp, Homo sapiens
gccttcctttcggccggaaccgccatcttccagtaattcgccaaaatgacgaacacaaagggaaagaggagaggcacccgatatatgttctctaggccttttagaaaacatggagttgttcctttggccacatatatgcgaatctataagaaagggaatgggtactgttcaaaaaggaatgccccacaagtgttaccatggcaaaactggaagagtctacaatgttacccagcatgctgttggcattgttgtaaacaaacaagttaagggcaagattcttgccaagagaattaatgtgcgtattgagcacattaagcactctaagagccgagatagcttcctgaaacgtgtgaaggaaaatgatcagaaaaagaaagaagccaaagagaaaggtacctgggttcaactaaagcgccagcctgctccacccagagaagcacactttgtgagaaccaatgggaaggagcctgagctgctggaacctattccctatgaattcatggcataataggtgttaaaaaaaaaaataaaggacctctgggctacaaaaaaaaaaaaaacaacaaaaaaaaaaaacaaacaaaaaaaaaaaaaaaaaaaaaaaaaaaaaaaaaaaaaaaaaaaaaaaaaagagagcgcccacaccaacaacaataacagagaaggcggcggcgctgcgcgaagagcaaaaccaacgcaccagcacaggagagcagaggatagagaaaacaaacacaaccacacgagagcggaagacacaaggggcccagcgaacagggatgccagggtacaagaacggcccgaagaggagagcatagagacaacggacggcagcagggccactactatagagaacagaaaaaagaaaatggagaggatat

SEQ ID NO: 338118 - DNA, 999 bp, Homo sapiens
catgttgtccaagctggtcttgaactcctgacctcaagtgatccacccgcctcggctcccaaagtgctgggattacagatgtgagccaccacacctggctgtcttttcattattggtgtgaactcatgagttctcatattttccatagtttatcattcattactattctcactgttttcatacttgaattgtcccaaatttggcccatgagagccccctcagttgatgcttttgtatgcttctatcattttgggagattatttccttactttctagaataacaagatgttccgggtttactgtgtacctatcctgccttaattctagaatcagctctttctccaacaagctttggttcttcttagtggcgcatgatatgtattagagaccaagatacgggcactaggtatgggcattattactgggatgtctttgtttctgggccctttaagtagacagaggtagaaaatacatgcatgtattaatacatatactgacaccctagtatacacatatacaagtgttttctcagtcttggcacgattgacattttgggccaaataattccttattgtggggtcagtcttgtatagttttggttgttagcaacatctctggcttccacccactagatgctacaaagaaaattatctccagacattgccagtgtcaccagttgaaaactactgataagtacctacatgtccacatacttaactttagaaatcattaggctacagtgatgcttctaattctggtctgtccccacagaattctttatcttctctcataccatttatttgtatccctcttcttctatagtgagaactctgactcccaataatatcaatagattgattcacttcctcaattctgtaatataggatgagcagcccaagtccagaaatccaaaatgcttcaaaatctgaaactttttgagtgccaacatgacactacaagtggacagttccacacctgactgaccccatgtgacaagtt

SEQ ID NO: 338119 - DNA, 636 bp, Homo sapiens
catgttgtccaagctggtcttgaactcctgacctcaagtgatccacccgcctcggctcccaaagtgctgggattacagatgtgagccaccacacctggctgtcttttcattattggtgtgaactcatgagttctcatattttccatagtttatcattcattactattctcactgttttcatacttgaattgtcccaaataattccttattgtggggtcagtcttgtatagttttggttgttagcaacatctctggcttccacccactagatgctacaaagaaaattatctccagacattgccagtgtcaccagttgaaaactactgataagtacctacatgtccacatacttaactttagaaatcattaggctacagtgatgcttctaattctggtctgtccccacagaattctttatcttctctcataccatttatttgtatccctcttcttctatagtgagaactctgactcccaataatatcaatagattgattcacttcctcaattctgtaatataggatgagcagcccaagtccagaaatccaaaatgcttcaaaatctgaaactttttgagtgccaacatgacactacaagtggacagttccacacctgactgaccccatgtgacaagtt

SEQ ID NO: 338120 - DNA, 900 bp, Homo sapiens
acattgtctacagtcactcagaatggtccagtgtatgacatacaatcatcagctttcctacaacacagccttcaacagaaatagggtgtcccaagcccctggcaatagaactgtttaccaaccaagaaggttgggaaaggcacaagattggcatgtggcatgtgcccagacagacttcgaggggtttgtgccgtgagatttaaagttcttataatgctgtctacaatgaaaaaaacatgtcagcagggcctatcgtggtccaatgtgtgctaaatgaatccatgacaggatcaagggtgccttccttatcaagaagcagaaaatcattgtgaaagtgttgaaagcacaagcacagagtcaaaaagctaaatttggcggggcgcggtggctcaggcctgtaatcccagcactttgggaggctgaggcgggcggatcatgaggtaaggagatcaagatcatcttggccaacatggagaaaccctgtctactaaaatacagaaaattagcccagcatggtggcatgcgcctgtagtcccagctgctcgggaggctgaggcaggggaatcgcttgaacccgggaggcggagattgcagagagccgagatcgtgccactgcactccagcctggcaacagaataagactctgtatcaaaaaaaaaaaaaaaaaaaaaaaagctaaatttaaaaatgaaacttactggaataaacaattcatttcaaaaaaacgtaaagctacaaatttacatagcccagctatgtcctttctaaagataaggaaaagctaagccttcgatatgtgcctacaattcagggataatatatgaagcttagaatttattaggggagataaggctcattacacgtgaaacaaagagcacaagcactcacagtatacaatga

SEQ ID NO: 338121 - DNA, 834 bp, Homo sapiens
gtatgaagctctctttccactagtgttgtcttgtttgatgtttgtctggataaacatagaacaagaaactctacaacaatctggtgtttgctgtaaacaaaagctcaccagtatccagttctcttataatactgatataactcagtttcgacagctatatctggatgacatccgtagggcctttttccttgttttcttcttagtgacagcatttttggaactggaaatatagcttctattaacagcttgatcttgcctctgtctatgctttctgactgtgttcagtccttttatgatgggagccctgatgatgtggaagattttaatccccttttgttcttgttatgtgtgcttttgaagcagttcagttgactactcagttatcgtcaaaaagcctttttctcattggttctcgtcatatcagacattatggtttgcattttttcttcttggtcacggattatggcagtgggttgatattgggacaaggcatcacgccactagtgattgtcatgtgccagtgaccaccttttgggggttcctctcaaaggcctggcccagcggtcccacacaggaaagaaatcaggaactagtgtgggaagccccaaaggtccttcatgggaacggtggggggaacaccataacgcattcgggcacggaatccactatcaagaacaatcactcagggccacagacaaggcacgggaatgacacacacccgggaggaacagcttcgaccacaagcgaattgcacaacacacattcagaggcgagaaaaagaatcaacggacaacaggagaacataatagaggacaccgagaaacacaacgctcc

SEQ ID NO: 338122 - DNA, 279 bp, Homo sapiens
cagctgtgctccttcagccccagaataacatacgtgtgacagaccaggattcagcccacagcctggagccaagacaccatccgacccagatgaacctgcgtggatcacctgagccactagtgacccagagatcctgagagtgaaaaacatgcatggtcctatacaccactgagttttgggatgacttgttacttagcactattatgacaattgctgactaatataccaggctcctggaagatttgttgtgaggttctcataaaatgatgaatgtgaaat

SEQ ID NO: 338123 - DNA, 336 bp, Homo sapiens
  misc_feature (155)..(155): n is a, c, g, or t
  misc_feature (190)..(190): n is a, c, g, or t
  misc_feature (222)..(222): n is a, c, g, or t
aatttcaagtagagtttgaagagaataaagagtccagaaatgtgggatctgatggggctggaaaagccaccttcgtttatcaccctacacagtaggagataaccctgctgctcaaaagatttaataaaaaatgtccattaagaattctcagctgngtgaatgttggttatgatgcatgaccacaccttantgtgctcctggtcagctcctaactttgagaanacacagataggaaggcccatgtcccacgcacaagacaaccagctcgaagcagggacaggcaatgagagctgaaagagacctagtactacagctgtctcatctgggtgcaacttg

SEQ ID NO: 338124 - DNA, 989 bp, Homo sapiens
cggatttcagccaggctgtgccacggagggcagaggccacccaggaggaggccccacagccacttgcagggagctgctttgctgagagtctctgtcctctgcatctggagagcttggctcagagctgaggcaggagggagggctccctgtctgggcctcctccaggaactaaagtccctttccgggaattgaccaaactgcaggcttgcccagggaggacatgctgtgtcctagttcagctcgaggggcagtatccagcttcaaccctcagcggatgccccagacaagattccgagccaggccaacaacgcctaaggaggacgagaccctgggtgtagctcatcagaggtgtcaggtgtggtctgaggccccagctctctctgccctcctgctcctctgctctgtgctggctcctggtccttatggctcatgatgttgagacagctgccctggcctagggggtcacacactgaacaaagcaggaagaaggggaaggggagccctccttctatcacccttatcccttacagcaagaagcacccagaaacccctcagcacactcccctagtgcctctattggcctcactgtcaccatggttgcatgggggccccagacaatagacacctggatgcaagatccctaagacagaggcaggaaataggaagagggaggtgagaggctttcgatgaggatgcttctacacatgaccttgaggatgaaaacgcatcagggggtcccgggaaccactgcgttgttaacataaagtctgggagcaaagaccagcggctggaatggatgtgcctgggagccagctgaaacagatgcagccgaagccacagtaaagaagaaagagataggggcctgcttggagccaacccctacctttgaggggcctgacagggccacctcacagctgcctgggcttgttgttgcctcctcactacagaaaccatggaagtctctagagtcagtgtttccaggctggggc

SEQ ID NO: 338125 - DNA, 456 bp, Homo sapiens
agtctgggagcaaagaccagcggctggaatggatgtgcctgggagccagctgaaacagatgcagccgaagccacagtaaagaagaaagagataggggcctgcttggagccaacccctacctttgaggggcctgacagggccacctcacagctgcctgggcttgttgttgcctcctcactacagaaaccatggaagtctctagagtcagtgtttccaggctggggctgccagatcactcctgtaggtggttgaaccagttgagttcattcttctcagtgagggggacacaggtggaggtccatcggcacctccataaggggtgcgagaaggaacctgttagaatatctgggttctggctgggtgattggcaggagggcctatgaaatggagcccactctggattgggtgttgcagaaagtggggggcaagtctaccagtgggtatctcagcaaatct

SEQ ID NO: 338126 - DNA, 129 bp, Homo sapiens
ggtctgcttctgcatgaactcccccagatccgtgtttgctgctggtcctcacagcaggctcttcgtttctggaccagatgtcttttctgtgcttcagaaccatctagaaaaaagggaactggatatctc

SEQ ID NO: 338127 - DNA, 515 bp, Homo sapiens
gggaccatcttaaaagtctgcctaccataaactgcagcctgaaagcttaagacgaggcaaaggaagagggtgagaatgcaggtacaactgataatctgatataaggaaataacattaaaaagcagggagaagaaattatgcatgattggacttgccttcacaggaaccagcatagtaactggcacatattactagacaagtgaataaaccaacataccaaatattatcaaattaaacaagcaagtatttactaaagagcttatatgcttatagctacaagagaaaagaaattacttataatgctaagccactaggtagaattgagaggtgacataccagggcagacaatatggacaaaaaactaaatttgacataaagaaaactgcgttaagatatctttgagatcttggaaagtgaccaaatggaagcaaccaaatcaaataattccaagggccttagttttgcctcatctgtaacggagttgatttaactacttaatctttaagatccctttc

SEQ ID NO: 338128 - DNA, 405 bp, Homo sapiens
gaaaattcacaaatacgtggaaattaacacgcacctgaacaaccaataggtcaaataggaaatcaaaaggcgtattagaaaatatcttgttcccataactgcgtgcgctctcccctcccattctctttccgccatctttccgcattgccacaatggtgctcatgaatgtcctggctgatgctctcaaaagtatcaacatgcagaaaagagaggcaaacgccaggttcttattaggtcatgctccaaagtcatcatccagcttctcagtgtgatgatgaagtgtggttacactggcaaatttgaaatcactgatgatcacagagctggaaaaattgttgtgaacctcacaggcaggctaaacaagtgtggagtgatcagcccagatttgatgtgcaactcaaaggt

SEQ ID NO: 338129 - DNA, 531 bp, Homo sapiens
actggcccaggtgcttgccttataataggatggggagcatttatcatttgcccactgaacttgctgatgaggaatgtcattatctgagtctctctacagttttctgttggcttcacatgcagagcaaagcaaatctttcttagctctggcggtgggacctctttggaaggcagggggaggagacagacaggacaaggtggacactgtagtcagtcttaagtagtaatgtacaaaagtgcatgctaagtgtctacaggcactttgaggtcactttgccctggaaaatccccatggattgctttagtcagagagtatgctagtagtgcaggtgtgtttcatatgatggaattattgacttaaaaatcttttcaagttttacttacgcatgtaagcactgaaatactgacgctttttagtttggtagtgtggtcactcattaaattatttgagcattttatatactgctctcagcaataattctctcaccggtctctttgaactacctctcacagcctgcactgagtttgggtt

SEQ ID NO: 338130 - DNA, 280 bp, Homo sapiens
ggcagccacattcattaaagacactttagtaaagctcaaagcacacattgcacctcacacaataacagtgggagacttcaacacaccactttcatcaatggacagatcgtggaaacagaaactaaacagggacacagtgaaactaacaaaagtaatgaaacaaatggacttaacagttatcaacagaacattttgtcctaaaacaaaaggatataccttcttctcagcacctcatgggaccttttccaaaattgaccatatacttggtcacaaaacaggc

SEQ ID NO: 338131 - DNA, 146 bp, Homo sapiens
tgtcttggacccttctctcgcaagagctagtccaaaggctctgaagtgataccatgggaaggaagagctttttggaggcagaacctgctcatcaacactctgctattctcctgggatatcagacaaaagccagagctttctgtgca

SEQ ID NO: 338132 - DNA, 227 bp, Homo sapiens
ccacagccaggtcagaagtgggggagggggcatggaagacaaagtaaagaaacttggaaacgctcacccttccgggagagtgggatggtcacagagccctgtgtaggtagatcctggtgaacacaggatgtggacaagggcaggaagataaggctagaacagtaaccaggagcaacatgaaggagtttccattttattataaacataaatgatgactagagtgttag

SEQ ID NO: 338133 - DNA, 224 bp, Homo sapiens
tccatgaggaaagtattactattgtgcatatggggaaactgagacacagagagattaagttacctgctgaagatcatgcagctcctgaaggcagaaccaagatccaaacctgatggtcttggtacaaagtccatggtctaattaagagctacacttcaggccaggcacggtggctcacgcctgtaatcccaacactttaggaggccgaggtgggtggatcgcct

SEQ ID NO: 338134 - DNA, 748 bp, Homo sapiens
tattgccaagtttccctccagaaggattttacctgtttggctgtcaccaggagcgcatgagacctcctgccgctctgcacagctgtctgtaggttattgagggttacactttttagttctttgcctatttggtaggtaaaaatggtatttccttatttgtttttgtttttttcttttctttttttttttttctgtttggagtaggctgctgcttttgtacttgtttgactactttctctccctcttcacccccacctcatgtcccaactcatatttctctgattttcaaccattttcatttgtaagagctctttatatatatcatgagactactgccccttctcttatatgtcacatatctttttcctagtttatctttaattttgtaactttgtggttatgtgtatatgattgcatgatcaaatatgtccattttttttacattctctctcattgctttaatgattaagaaatgccagcccctgcctttctttcttgttttttaatggcttcatttaaaaataattattctttaatttattggaattcatttttttaaatgcaaggtaggaataaaatgtattttttcccaaatattttacctgttattctgaaatctaaaagtaagttgattgaagcgcccacttttcttcatggatttgtaattatatgaagttaggttttagaaaagttggtaggatactaatgggtgctagggtaacgtgtgggcaatgctaggattattaag

SEQ ID NO: 338135 - DNA, 628 bp, Homo sapiens
ctgaggatcccgcacacgccgaaggcccatactgagcagatcttaatggacgaagttgttgctgcacacgccgagtgaccatacatacacagatcgctgtggacgaagttgttgcaaatctgaatggacgaagttattgcgtccagactcatatttctctgattttcaaccattttcatttgtaagagctctttatatatatcatgagactactgccccttctcttatatgtcacatatctttttcctagtttatctttaattttgtaactttgtggttatgtgtatatgattgcatgatcaaatatgtccattttttttacattctctctcattgctttaatgattaagaaatgccagcccctgcctttctttcttgttttttaatggcttcatttaaaaataattattctttaatttattggaattcatttttttaaatgcaaggtaggaataaaatgtattttttcccaaatattttacctgttattctgaaatctaaaagtaagttgattgaagcgcccacttttcttcatggatttgtaattatatgaagttaggttttagaaaagttggtaggatactaatgggtgctagggtaacgtgtgggcaatgctaggattattaag

SEQ ID NO: 338136 - DNA, 388 bp, Homo sapiens
tctgttgcccaggctggagtgatcatggctcactgctgcctcaaactcccaggctcatgcgatcccaagtagctggggctacaggcatgtgccaccacacctggctaatttttatttgtatttttgtagaaacaagttttcccccaggttgcctaggctggtctcaaactcctgggcttaagcgatcctccagcctcggcctcccaaaatgctgggattacaggcatgaaggttgcagtgagttgagatcatgccattgcactacagcctgggtgacagtaagattccacctcaaaaaacaacaacaaaaaaaggaaataccaaacaaaatgtgcttttccctatcttcgaaatcatcatgtcttttcattcctgtatggcaaaaaat

SEQ ID NO: 338137 - DNA, 449 bp, Homo sapiens
atgtgctcagggttccatgtagataagtagatgctcattcagaagagagaccaaggcccctctgacaccgaggccaggcgctgggccaccgtgcttctctgcctccaggagctcatgcgctggtccctgatgagagggtgtggctggcttcataggaatgatctgattgtgtgtacattttttgaggaaagatttttgcccactcagagatgatctctgagctcttgggagagtggcgtctaagcagtcggtggaatgttccataggtccctcccggggaggcttgtgcggcagtgcctggtgtgtgattcctggtgaggtcccttcccttgacatgagagcagagcaaaaagagccggctcttcgctcccccaacacagagatcccgctggaagggcgagttgttgaggaggaggaggaattctcccaggaggaggaggaattcgccc

SEQ ID NO: 338138 - DNA, 537 bp, Homo sapiens
agaagagacgctcaaaccgccaagttaagcgaaaaaaatatacagaggacctggatataaagatcacagatgatgaagaagaagaagaggtggatgtaactggtccaataaaacctgagcctatcctccctgaaccagtgcaagaaccagatggcgagactttgccttccatgcagttctttgtggagaatcccagtgaagaagatgcagccattgtagacaaagtgctttctatgcggattgtgaagaaggagctcccttctggacaatatactgaagcagaagaattctttgtcaagtacaagaactactcctatctgcattgtgaatgggctactatctcccaactagagaaggataagaggatacatcaaaaattaaagcgcttcaaaaccaaaatggctcagatgagacacttcttccatgaggatgaagagccctttaatccagactacgtagaggtggataggatattggatgagtctcacagtattgacaaggacaatggggaggtgagttgttgaggcatggagtaac

SEQ ID NO: 338139 - DNA, 1710 bp, Homo sapiens
agctttttcctgggatagcgatggagacgccgggcgcatcagcgtcgtccttgttgcttcccgccgcgtccaggcccccgaggaagcgcgaggcgggagaggctggggctgcgacgagcaagcagcgggtcctggacgaggaagagtatatcgagggcctccagacggtcatccaaagggatttctttcctgatgtggagaagctccaggcacagaaggagtacctggaagccgaggagaatggagacttggaacggatgcgccagattgccatcaagtttggctctgccttgggcaagatgtcccgggagcccccgccaccctatgtgactccagccacatttgaaacccctgaggtgcatgcaggcactggagtggtgggcaacaagcccaggccccgcggccgaggcctggaggatggagaggctggagaggaggaggagaaggagccgctgcccagcctagatgtcttcctgagccgctacacgagtgaggacaatgcctccttccaggagatcatggaggtggccaaggagagaagccgggcacgccacgcttggctctaccaggctgaggaagagtttgagaagaggcagaaagataatctcgaactcccgtcagcagagcaccaggccatcgagagcagccaggccagtgtggagacctggaagtacaaggccaagaattccctcatgtactatccagagggtgtccctgacgaggagcagctgtttaagaagccccggcaggtggtacataagaacacgcgcttccttagggaccccttcagccaagccctgagcaggtgccagctccagcaggcagccgccctcaatgcccagcacaaacagggcaaggtgggccccgatggcaaggagctgatcccccaggagtcccctcgagtgggtggatttggatttgttgccactccttcccctgcccctggtgtgaacgagtccccgatgatgacctggggggaggttgagaacacacccttgagagttgaagggtcggaaacgccctacgtggacaggacacccggcccagcttttaagatcctggagccaggccgcagggaacggctgggtctgaagatggccaacgaggccgctgccaagaaccgggccaagaagcaggaagccttgcggagagtgacggagaatctggccagcctcacccccaaaggcctgagcccagccatgtcgccagccctacagcgccttgtgagcaggacggccagcaagtacacagaccgggccctgcgggccagctacacaccatccccagcacgctccacccacctcaagaccccggccagtgggctgcagacccccacaagcacaccggcgcctggctctgccacacgcacccctctcacacaggacccggcctccatcacggacaacctgctgcagctccctgcccggcgcaaagcttcggacttcttttagagccaggcctgggctgggctcatagacgcttcacagagcctgcagggcagctgtacacccagcagaggactccagccttctcggggcccaggcctgggccagaagctgttgaccataccaggagtcactggagaaaggggctgtgctggggccagactggcacaaggcactcgtgcccacaccacaccccagggccttgccaagctgtttgctgtttaattggccccttgaactgtcattaaagaacacctaggtacag

SEQ ID NO: 338140 - DNA, 2566 bp, Homo sapiens
cctatagagatgaggtttcattatgttgcccaggctggttttaaacttctgagctcaagtgatcctcccaccttggcctcccgaagtgctaggattacaagtgtgagccatcatgcctagccagtttgcagattttcaatacctgtacacctacatgccagtaaatataggaatccttttcagaacctaagtggtaggaaccatcatcatgtttacaggtgaggaaactgaggctcagaaaggcagtcacttctgcaggtctcagagatggtcagggtttcacttcttatctctctgagatgaatagagtttctgacccctgtcctcatcccgtgggtcttgagcttgtagccactgtgccttgtgcatagcctcacgtgtagcaggtggtcaggactgtcactagacttgaaggcagagctctccaggtggccccaccgaagtttgcaccaccacacgcagcaccagggcaccacctcagtgggagtaccactttccatggtggcagggttggtcggaggggggggtgtttggggttgtggcttagcacctgtgaggccccatccagaggactaagtcatatgagatccctggaattggggctcgctctcaggtcaggatgattaggcgatgaccacccacctgtagtacaggtaccaggaagagaagagtgggtaaggtaaggaaatcctagggagtgagggagagccccagggatttggaggcctggcacccacaggcctggcaccactttggtgggggaggagcctgcctgtgatcacgagctcttgctctaacacctgtattgctttctccagtctgaatcagaccacgtaattcccttggcatccagcacatgagcagagctggccctgaatctgtagggtaccacctgagggctctctgggcagtcagggtgggtggattctgcccccgtggggagtccttggcagtgtgggctttcatgggcagaagccaggaccaggggagaggattccagccctgcatgttgggggctatgattcctgggcctgggtgtcctcctctttcctgactgcaaagggtgctgtgttcctcctcccgcaacccctaagcaggagaggctggagaggaggaggagaaggagccgctgcccagcctagatgtcttcctgagccgctacacgagtgaggacaatgcctccttccaggagatcatggaggtggccaaggagagaagccgggcacgccacgcttggctctaccaggctgaggaagagtttgagaaggtgtctctggggtctggggtgtcacataggcgtaggcaccctctgtggtggttggggagccccagggccatgggtacaatgcccaggggcatctctgaccatcacttttccccatgtgattgcagaggcagaaagataatctcgaactcccgtcagcagagcaccaggccatcgagagcagccaggccagtgtggagacctggaagtacaaggccaagaattccctcatgtactatccagagggtaagtggcgggcctcgcagccaaatggggaggtgttgggtagagctgtgtgtgtctggctgtgtttggagcagccttccaggtgtgtatggccgtgcccccttgcagtttgggcttctgatgggtactggtctgtctaagggtggacaggtctgtgtgaggtcagcagtgagtgagaccctctccagcggcactggggcctgcgttctgctcaatgcttttgttcatctgggagtgacttggccgagaagcgagctcctcatgctccttaggctgctgcccttctgacacctgctgctacctttgcttcgtctgccaggtgtccctgacgaggagcagctgtttaagaagccccggcaggtggtacataagaacacgcgcttccttagggaccccttcagccaagccctgagcaggtgccagctccagcaggcagccgccctcaatgcccaggtgagcaggcgggtcagcagggccgcatgggccaggttggacagggctgcctgggggcaggcatgatctctcccatctctttgagcttggcagagctcagtgagtggaaccatctggggccctgtgcggcaggatcctgagtctttccttggccccagtgggcttccattgaacactgccttggtcacacacgttctgtaggtccagatctgtgccagctcccttgatggcaggggcaggagagaaaagggactgctgggagtgagcccaggctggcagctgcacgcccacacaccgggcagggaagccagagagccgcagagggagcccagccccagggggtggctggggtgggacaggccctgggttggcagagagcagaggctttctgagtctgggagcaagacgagtagatactctctgatggtgactgtggcagtcacagggttgaagtggggaaggcaggaagagactagagcataagcattgcctgtcatcagcattgcctgtcatcagcattgccccctgcaggggcctggcgtcagcatcctctggagttgctgggataggcgcagctcgagtggaggccctggcacctccctg

SEQ ID NO: 338141 - DNA, 2029 bp, Homo sapiens
agctttttcctgggatagcgatggagacgccgggcgcatcagcgtcgtccttgttgcttcccgccgcgtccaggcccccgaggaagcgcgaggcgggagaggctggggctgcgacgagcaagcagcgggtcctggacgaggaagagtatatcgagggcctccagacggtcatccaaagggatttctttcctgatgtggagaagctccaggcacagaaggagtacctggaagccgaggagaatggagacttggaacggatgcgccagattgccatcaagtttggctctgccttgggcaagatgtcccgggagcccccgccaccctatgtgactccagccacatttgaaacccctgaggtgcatgcaggcactggagtggtgggcaacaagcccaggccccgcggccgaggcctggaggatggagaggctggagaggaggaggagaaggagccgctgcccagcctagatgtcttcctgagccgctacacgagtgaggacaatgcctccttccaggagatcatggaggtggccaaggagagaagccgggcacgccacgcttggctctaccaggctgaggaagagtttgagaagaggcagaaagataatctcgaactcccgtcagcagagcaccaggccatcgagagcagccaggccagtgtggagacctggaagtacaaggccaagaattccctcatgtactatccagagggtaagtggcgggcctcgcagccaaatggggaggtgttgggtagagctgtgtgtgtctggctgtgtttggagcagccttccaggtgtgtatggccgtgcccccttgcagtttgggcttctgatgggtactggtctgtctaagggtggacaggtctgtgtgaggtcagcagtgagtgagaccctctccagcggcactggggcctgcgttctgctcaatgcttttgttcatctgggagtgacttggccgagaagcgagctcctcatgctccttaggctgctgcccttctgacacctgctgctacctttgcttcgtctgccaggtgtccctgacgaggagcagctgtttaagaagccccggcaggtggtacataagaacacgcgcttccttagggaccccttcagccaagccctgagcaggtgccagctccagcaggcagccgccctcaatgcccagcacaaacagggcaaggtgggccccgatggcaaggagctgatcccccaggagtcccctcgagtgggtggatttggatttgttgccactccttcccctgcccctggtgtgaacgagtccccgatgatgacctggggggaggttgagaacacacccttgagagttgaagggtcggaaacgccctacgtggacaggacacccggcccagcttttaagatcctggagccaggccgcagggaacggctgggtctgaagatggccaacgaggccgctgccaagaaccgggccaagaagcaggaagccttgcggagagtgacggagaatctggccagcctcacccccaaaggcctgagcccagccatgtcgccagccctacagcgccttgtgagcaggacggccagcaagtacacagaccgggccctgcgggccagctacacaccatccccagcacgctccacccacctcaagaccccggccagtgggctgcagacccccacaagcacaccggcgcctggctctgccacacgcacccctctcacacaggacccggcctccatcacggacaacctgctgcagctccctgcccggcgcaaagcttcggacttcttttagagccaggcctgggctgggctcatagacgcttcacagagcctgcagggcagctgtacacccagcagaggactccagccttctcggggcccaggcctgggccagaagctgttgaccataccaggagtcactggagaaaggggctgtgctggggccagactggcacaaggcactcgtgcccacaccacaccccagggccttgccaagctgtttgctgtttaattggccccttgaactgtcattaaagaacacctaggtacag

SEQ ID NO: 338142 - DNA, 1677 bp, Homo sapiens
tccgtcactctccgcaaggcgcttgaattcaagcgtccaggcccccgaggaagcgcgaggcgggagaggctggggctgcgacgagcaagcagcgggtcctggacgaggaagagtatatcgagggcctccagacggtcatccaaagggatttctttcctgatgtggagaagctccaggcacagaaggagtacctggaagccgaggagaatggagacttggaacggatgcgccagattgccatcaagtttggctctgccttgggcaagatgtcccgggagcccccgccaccctatgtgactccagccacatttgaaacccctgaggtgcatgcaggcactggagtggtgggcaacaagcccaggccccgcggccgaggcctggaggatggagaggctggagaggaggaggagaaggagccgctgcccagcctagatgtcttcctgagccgctacacgagtgaggacaatgcctccttccaggagatcatggaggtggccaaggagagaagccgggcacgccacgcttggctctaccaggctgaggaagagtttgagaagaggcagaaagataatctcgaactcccgtcagcagagcaccaggccatcgagagcagccaggccagtgtggagacctggaagtacaaggccaagaattccctcatgtactatccagagggtgtccctgacgaggagcagctgtttaagaagccccggcaggtggtacataagaacacgcgcttccttagggaccccttcagccaagccctgagcaggtgccagctccagcaggcagccgccctcaatgcccagcacaaacagggcaaggtgggccccgatggcaaggagctgatcccccaggagtcccctcgagtgggtggatttggatttgttgccactccttcccctgcccctggtgtgaacgagtccccgatgatgacctggggggaggttgagaacacacccttgagagttgaagggtcggaaacgccctacgtggacaggacacccggcccagcttttaagatcctggagccaggccgcagggaacggctgggtctgaagatggccaacgaggccgctgccaagaaccgggccaagaagcaggaagccttgcggagagtgacggagaatctggccagcctcacccccaaaggcctgagcccagccatgtcgccagccctacagcgccttgtgagcaggacggccagcaagtacacagaccgggccctgcgggccagctacacaccatccccagcacgctccacccacctcaagaccccggccagtgggctgcagacccccacaagcacaccggcgcctggctctgccacacgcacccctctcacacaggacccggcctccatcacggacaacctgctgcagctccctgcccggcgcaaagcttcggacttcttttagagccaggcctgggctgggctcatagacgcttcacagagcctgcagggcagctgtacacccagcagaggactccagccttctcggggcccaggcctgggccagaagctgttgaccataccaggagtcactggagaaaggggctgtgctggggccagactggcacaaggcactcgtgcccacaccacaccccagggccttgccaagctgtttgctgtttaattggccccttgaactgtcattaaagaacacctaggtacag

SEQ ID NO: 338143 - DNA, 2159 bp, Homo sapiens
agctttttcctgggatagcgatggagacgccgggcgcatcagcgtcgtccttgttgcttcccgccgcgtccaggcccccgaggaagcgcgaggcgggagaggctggggctgcgacgagcaagcagcgggtcctggacgaggaagagtatatcgaggtacgacctcggtgcggacgccggcgacttctgggcccatcctctgcttcaagctcctctcaggttccctctctcgggtgttgacactccgtctcctcgtggaagtggaggagccgggtgtggacggtcccacgagtcaagtaaacagggcagaggaagacgtctgtggtggaagaggctgtagtagtgttgtcagggaaaagagagagcggctctctttgtatgggacgggggtcagggaaagaagattttctgttaaagtgtgagtaggagtttgacaaactggaaggatggtggcaaagagggctttctaaagagcggtggcagcaagtgtgaatgctggggttcctggaaagagaccgcagttgtgacagcatctcgagtgagtggacctgcgtcgccccaccacacgcacacagaaggaggagctgaaacggggattggcggaaggcctccagacggtcatccaaagggatttctttcctgatgtggagaagctccaggcacagaaggagtacctggaagccgaggagaatggagacttggaacggatgcgccagattgccatcaagtttggctctgccttgggcaagatgtcccgggagcccccgccaccctatgtgactccagccacatttgaaacccctgaggtgcatgcaggcactggagtggtgggcaacaagcccaggccccgcggccgaggcctggaggatggagaggctggagaggaggaggagaaggagccgctgcccagcctagatgtcttcctgagccgctacacgagtgaggacaatgcctccttccaggagatcatggaggtggccaaggagagaagccgggcacgccacgcttggctctaccaggctgaggaagagtttgagaagaggcagaaagataatctcgaactcccgtcagcagagcaccaggccatcgagagcagccaggccagtgtggagacctggaagtacaaggccaagaattccctcatgtactatccagagggtgtccctgacgaggagcagctgtttaagaagccccggcaggtggtacataagaacacgcgcttccttagggaccccttcagccaagccctgagcaggtgccagctccagcaggcagccgccctcaatgcccagcacaaacagggcaaggtgggccccgatggcaaggagctgatcccccaggagtcccctcgagtgggtggatttggatttgttgccactccttcccctgcccctggtgtgaacgagtccccgatgatgacctggggggaggttgagaacacacccttgagagttgaagggtcggaaacgccctacgtggacaggacacccggcccagcttttaagatcctggagccaggccgcagggaacggctgggtctgaagatggccaacgaggccgctgccaagaaccgggccaagaagcaggaagccttgcggagagtgacggagaatctggccagcctcacccccaaaggcctgagcccagccatgtcgccagccctacagcgccttgtgagcaggacggccagcaagtacacagaccgggccctgcgggccagctacacaccatccccagcacgctccacccacctcaagaccccggccagtgggctgcagacccccacaagcacaccggcgcctggctctgccacacgcacccctctcacacaggacccggcctccatcacggacaacctgctgcagctccctgcccggcgcaaagcttcggacttcttttagagccaggcctgggctgggctcatagacgcttcacagagcctgcagggcagctgtacacccagcagaggactccagccttctcggggcccaggcctgggccagaagctgttgaccataccaggagtcactggagaaaggggctgtgctggggccagactggcacaaggcactcgtgcccacaccacaccccagggccttgccaagctgtttgctgtttaattggccccttgaactgtcattaaagaacacctaggtacag

SEQ ID NO: 338144 - DNA, 1646 bp, Homo sapiens
agctttttcctgggatagcgatggagacgccgggcgcatcagcgtcgtccttgttgcttcccgccgcgtccaggcccccgaggaagcgcgaggcgggagaggctggggctgcgacgagcaagcagcgggtcctggacgaggaagagtatatcgagggcctccagacggtcatccaaagggatttctttcctgatgtggagaagctccaggcacagaaggagtacctggaagccgaggagaatggagacttggaacggatgcgccagattgccatcaagtttggctctgccttgggcaagatgtcccgggagcccccgccaccctatgtgactccagccacatttgaaacccctgaggtgcatgcaggcactggagtggtgggcaacaagcccaggccccgcggccgaggcctggaggatggagaggctggagaggaggaggagaaggagccgctgcccagcctagatgtcttcctgagccgctacacgagtgaggacaatgcctccttccaggagatcatggaggtggccaaggagagaagccgggcacgccacgcttggctctaccaggctgaggaagagtttgagaagaggcagaaagataatctcgaactcccgtcagcagagcaccaggccatcgagagcagccaggccagtgtggagacctggaagtacaaggccaagaattccctcatgtactatccagagggtgtccctgacgaggagcagctgtttaagaagccccggcaggtggtacataagaacacgcgcttccttagggaccccttcagccaagccctgagcaggtgccagctccagcaggcagccgccctcaatgcccagcacaaacagggcaaggtgggccccgatggcaaggagctgatcccccaggagtcccctcgagtgggtggatttggatttgttgccactccttcccctgcccctggtgtgaacgagtccccgatgatgacctggggggaggttgagaacacacccttgagagttgaagggtcggaaacgccctacgtggacaggacacccggcccagcttttaagatcctggagccaggccgcagggaacggctgggtctgaagatggccaacgaggccgctgccaagaaccgggccaagaagcaggaagccttgcggagagtgacggagaatctggccagcctcacccccaaaggcctgagcccagccatgtcgccagccctacagcgccttgtgagcaggacggccagcaaaccccggccagtgggctgcagacccccacaagcacaccggcgcctggctctgccacacgcacccctctcacacaggacccggcctccatcacggacaacctgctgcagctccctgcccggcgcaaagcttcggacttcttttagagccaggcctgggctgggctcatagacgcttcacagagcctgcagggcagctgtacacccagcagaggactccagccttctcggggcccaggcctgggccagaagctgttgaccataccaggagtcactggagaaaggggctgtgctggggccagactggcacaaggcactcgtgcccacaccacaccccagggccttgccaagctgtttgctgtttaattggccccttgaactgtcattaaagaacacctaggtacag

SEQ ID NO: 338145 - DNA, 903 bp, Homo sapiens
ttttcctgagagattgtcagaggtcatggttttgggaggaacacgaagacaggtgaggagtgctgcgccttgggcaggtcaggtggggtttggggctttccaggggcttttagtgggaggtgatgggttgtgggggttttgtaggcaacaaagagaggctggcacccaccacagtggctttctgtgtgaggggctgcctggcgtgtggcaggcctggcgcagctacccacacacctgctaccttgtagatcctggagccaggccgcagggaacggctgggtctgaagatggccaacgaggccgctgccaagaaccgggccaagaagcaggaagccttgcggagagtgacggagaatctggccagcctcacccccaaaggcctgagcccagccatgtcgccagccctacagcgccttgtgagcaggacggccagcaagtacacagaccgggccctgcgggccagctacacaccatccccagcacgctccacccacctcaagaccccggccagtgggctgcagacccccacaagcacaccggcgcctggctctgccacacgcacccctctcacacaggacccggcctccatcacggacaacctgctgcagctccctgcccggcgcaaagcttcggacttcttttagagccaggcctgggctgggctcatagacgcttcacagagcctgcagggcagctgtacacccagcagaggactccagccttctcggggcccaggcctgggccagaagctgttgaccataccaggagtcactggagaaaggggctgtgctggggccagactggcacaaggcactcgtgcccacaccacaccccagggccttgccaagctgtttgctgtttaattggccccttgaactgtcattaaagaacacctaggtacag

SEQ ID NO: 338146 - DNA, 647 bp, Homo sapiens
tccgtcactctccgcaaggcgcttgaattcaagcgtccaggcccccgaggaagcgcgaggcgggagaggctggggctgcgacgagcaagcagcgggtcctggacgaggaagagtatatcgaggtacgacctcggtgcggacgccggcgacttctgggcccatcctctgcttcaagctcctctcaggttccctctctcgggtgttgacactccgtctcctcgtggaagtggaggagccgggtgtggacggtcccacgagtcaagtaaacagggcagaggaagacgtctgtggtggaagaggctgtagtagtgttgtcagggaaaagagagagcggacggacaacctgctgcagctccctgcccggcgcaaagcttcggacttcttttagagccaggcctgggctgggctcatagacgcttcacagagcctgcagggcagctgtacacccagcagaggactccagccttctcggggcccaggcctgggccagaagctgttgaccataccaggagtcactggagaaaggggctgtgctggggccagactggcacaaggcactcgtgcccacaccacaccccagggccttgccaagctgtttgctgtttaattggccccttgaactgtcattaaagaacacctaggtacag

SEQ ID NO: 338147 - DNA, 492 bp, Homo sapiens
ttttcctgagagattgtcagaggtcatggttttgggaggaacacgaagacaggtgaggagtgctgcgccttgggcaggtcaggtggggtttggggctttccaggggcttttagtgggaggtgatgggttgtgggggttttgtaggcaacaaagagaggctggcacccaccacagtggctttctgtgtgaggggctgcctggcgtgtggcaggcctggcgcagctacccacacacctgctaccttgtagatcctggagccaggccgcagggaacggctgggtctgaagatggccaacgaggccgctgccaagaaccgggccaagaagcaggaagccttgcggagagtgacggagaatctggccaggtgaggggccgcctggctggtggggaagtgcgagggtggctctggcctgctcctgttcggcccctgccctgaccgtgtggaggcatggcccacgcggcagagtccagggcaggtccgcggggttctgc

SEQ ID NO: 338148 - DNA, 2311 bp, Homo sapiens
agctttttcctgggatagcgatggagacgccgggcgcatcagcgtcgtccttgttgcttcccgccgcgtccaggcccccgaggaagcgcgaggcgggagaggctggggctgcgacgagcaagcagcgggtcctggacgaggaagagtatatcgagggcctccagacggtcatccaaagggatttctttcctgatgtggagaagctccaggcacagaaggagtacctggaagccgaggagaatggagacttggaacggatgcgccagattgccatcaagtttggctctgccttgggcaagatgtcccgggagcccccgccaccctatgtgactccagccacatttgaaacccctgaggtgcatgcaggcactggagtggtgggcaacaagcccaggccccgcggccgaggcctggaggatggagaggctggagaggaggaggagaaggagccgctgcccagcctagatgtcttcctgagccgctacacgagtgaggacaatgcctccttccaggagatcatggaggtggccaaggagagaagccgggcacgccacgcttggctctaccaggctgaggaagagtttgagaagaggcagaaagataatctcgaactcccgtcagcagagcaccaggccatcgagagcagccaggccagtgtggagacctggaagtacaaggccaagaattccctcatgtactatccagagggtgtccctgacgaggagcagctgtttaagaagccccggcaggtggtacataagaacacgcgcttccttagggaccccttcagccaagccctgagcaggtgccagctccagcaggcagccgccctcaatgcccagcacaaacagggcaaggtgggccccgatggcaaggagctgatcccccaggagtcccctcgagtgggtggatttggatttgttgccactccttcccctgcccctggtgtgaacgagtccccgatgatgacctggggggaggttgagaacacacccttgagagttgaagggtcggaaacgccctacgtggacaggacacccggcccagcttttaagatcctggagccaggccgcagggaacggctgggtctgaagatggccaacgaggccgctgccaagaaccgggccaagaagcaggaagccttgcggagagtgacggagaatctggccagcctcacccccaaaggcctgagcccagccatgtcgccagccctacagcgccttgtgagcaggacggccagcaagtacacagaccgggccctgcgggccagctacacaccatccccagcacgctccacccacctcaagaccccggccagtgggctgcagacccccacaagcacaccggcgcctggctctgccacacgcacccctctcacacaggacccggcctccatcacggacaacctgctgcagctccctgcccggcgcaaagcttcggacttcttttagagccaggcctgggctgggctcatagacgcttcacagagcctgcagggcagctgtacacccagcagaggactccagccttctcggggcccaggcctgggccagaagctgttgaccataccaggagtcactggagaaaggggctgtgctggggccagactggcacaaggcactcgtgcccacaccacaccccagggccttgccaagctgtttgctgtttaattggccccttgaactgtcattaaagaacacctaggtacagaaaaaaaaaaaaaaaaaaactctcgaaacttagttccttcttcttctccccgctcctgtggcggggttggttctctctctgtggagaccagggttctctttttattccttccgtccgcctttcttcttccttacactataagttgcgttgccgccacccgatgtggaaggatttcagactggacattggaccattgagcccccctgtgaggccccaagaaactattcttttcacggctgtgtagacctataaagggcccgaccaaacgattatattcactttaaagggggtggatatacatctgattgaaaattgaggcacccaagtgtatatctcttttgacaaacgggctcagttctaagggaggcttggttgcactgcggattagagtttgcccatttgtttgacagcagaggcaattagatttcgaaaggcagctccaatttcaaggtaacaccttggcacacttttgaaacttgttcttgtccagcacaaggggttcccatggggggcttggaataaaacccaaccggtgggtcttagggtcgatctgtggtccacgggcccagtgattttagtggacagccttagtagctggcag

SEQ ID NO: 338149 - DNA, 2092 bp, Homo sapiens
agctttttcctgggatagcgatggagacgccgggcgcatcagcgtcgtccttgttgcttcccgccgcgtccaggcccccgaggaagcgcgaggcgggagaggctggggctgcgacgagcaagcagcgggtcctggacgaggaagagtatatcgaggtacgacctcggtgcggacgccggcgacttctgggcccatcctctgcttcaagctcctctcaggttccctctctcgggtgttgacactccgtctcctcgtggaagtggaggagccgggtgtggacggtcccacgagtcaagtaaacagggcagaggaagacgtctgtggtggaagaggctgtagtagtgttgtcagggaaaagagagagcggctctctttgtatgggacgggggtcagggaaagaagattttctgttaaagtgtgagtaggagtttgacaaactggaaggatggtggcaaagagggctttctaaagagcggtggcagcaagtgtgaatgctggggttcctggaaagagaccgcagttgtgacagcatctcgaggcctccagacggtcatccaaagggatttctttcctgatgtggagaagctccaggcacagaaggagtacctggaagccgaggagaatggagacttggaacggatgcgccagattgccatcaagtttggctctgccttgggcaagatgtcccgggagcccccgccaccctatgtgactccagccacatttgaaacccctgaggtgcatgcaggcactggagtggtgggcaacaagcccaggccccgcggccgaggcctggaggatggagaggctggagaggaggaggagaaggagccgctgcccagcctagatgtcttcctgagccgctacacgagtgaggacaatgcctccttccaggagatcatggaggtggccaaggagagaagccgggcacgccacgcttggctctaccaggctgaggaagagtttgagaagaggcagaaagataatctcgaactcccgtcagcagagcaccaggccatcgagagcagccaggccagtgtggagacctggaagtacaaggccaagaattccctcatgtactatccagagggtgtccctgacgaggagcagctgtttaagaagccccggcaggtggtacataagaacacgcgcttccttagggaccccttcagccaagccctgagcaggtgccagctccagcaggcagccgccctcaatgcccagcacaaacagggcaaggtgggccccgatggcaaggagctgatcccccaggagtcccctcgagtgggtggatttggatttgttgccactccttcccctgcccctggtgtgaacgagtccccgatgatgacctggggggaggttgagaacacacccttgagagttgaagggtcggaaacgccctacgtggacaggacacccggcccagcttttaagatcctggagccaggccgcagggaacggctgggtctgaagatggccaacgaggccgctgccaagaaccgggccaagaagcaggaagccttgcggagagtgacggagaatctggccagcctcacccccaaaggcctgagcccagccatgtcgccagccctacagcgccttgtgagcaggacggccagcaagtacacagaccgggccctgcgggccagctacacaccatccccagcacgctccacccacctcaagaccccggccagtgggctgcagacccccacaagcacaccggcgcctggctctgccacacgcacccctctcacacaggacccggcctccatcacggacaacctgctgcagctccctgcccggcgcaaagcttcggacttcttttagagccaggcctgggctgggctcatagacgcttcacagagcctgcagggcagctgtacacccagcagaggactccagccttctcggggcccaggcctgggccagaagctgttgaccataccaggagtcactggagaaaggggctgtgctggggccagactggcacaaggcactcgtgcccacaccacaccccagggccttgccaagctgtttgctgtttaattggccccttgaactgtcattaaagaacacctaggtacag

SEQ ID NO: 338150 - DNA, 2387 bp, Homo sapiens
cctatagagatgaggtttcattatgttgcccaggctggttttaaacttctgagctcaagtgatcctcccaccttggcctcccgaagtgctaggattacaagtgtgagccatcatgcctagccagtttgcagattttcaatacctgtacacctacatgccagtaaatataggaatccttttcagaacctaagtggtaggaaccatcatcatgtttacaggtgaggaaactgaggctcagaaaggcagtcacttctgcaggtctcagagatggtcagggtttcacttcttatctctctgagatgaatagagtttctgacccctgtcctcatcccgtgggtcttgagcttgtagccactgtgccttgtgcatagcctcacgtgtagcaggtggtcaggactgtcactagacttgaaggcagagctctccaggtggccccaccgaagtttgcaccaccacacgcagcaccagggcaccacctcagtgggagtaccactttccatggtggcagggttggtcggaggggggggtgtttggggttgtggcttagcacctgtgaggccccatccagaggactaagtcatatgagatccctggaattggggctcgctctcaggtcaggatgattaggcgatgaccacccacctgtagtacaggtaccaggaagagaagagtgggtaaggtaaggaaatcctagggagtgagggagagccccagggatttggaggcctggcacccacaggcctggcaccactttggtgggggaggagcctgcctgtgatcacgagctcttgctctaacacctgtattgctttctccagtctgaatcagaccacgtaattcccttggcatccagcacatgagcagagctggccctgaatctgtagggtaccacctgagggctctctgggcagtcagggtgggtggattctgcccccgtggggagtccttggcagtgtgggctttcatgggcagaagccaggaccaggggagaggattccagccctgcatgttgggggctatgattcctgggcctgggtgtcctcctctttcctgactgcaaagggtgctgtgttcctcctcccgcaacccctaagcaggagaggctggagaggaggaggagaaggagccgctgcccagcctagatgtcttcctgagccgctacacgagtgaggacaatgcctccttccaggagatcatggaggtggccaaggagagaagccgggcacgccacgcttggctctaccaggctgaggaagagtttgagaagaggcagaaagataatctcgaactcccgtcagcagagcaccaggccatcgagagcagccaggccagtgtggagacctggaagtacaaggccaagaattccctcatgtactatccagagggtgtccctgacgaggagcagctgtttaagaagccccggcaggtggtacataagaacacgcgcttccttagggaccccttcagccaagccctgagcaggtgccagctccagcaggcagccgccctcaatgcccagcacaaacagggcaaggtgggccccgatggcaaggagctgatcccccaggagtcccctcgagtgggtggatttggatttgttgccactccttcccctgcccctggtgtgaacgagtccccgatgatgacctggggggaggttgagaacacacccttgagagttgaagggtcggaaacgccctacgtggacaggacacccggcccagcttttaagatcctggagccaggccgcagggaacggctgggtctgaagatggccaacgaggccgctgccaagaaccgggccaagaagcaggaagccttgcggagagtgacggagaatctggccagcctcacccccaaaggcctgagcccagccatgtcgccagccctacagcgccttgtgagcaggacggccagcaagtacacagaccgggccctgcgggccagctacacaccatccccagcacgctccacccacctcaagaccccggccagtgggctgcagacccccacaagcacaccggcgcctggctctgccacacgcacccctctcacacaggacccggcctccatcacggacaacctgctgcagctccctgcccggcgcaaagcttcggacttcttttagagccaggcctgggctgggctcatagacgcttcacagagcctgcagggcagctgtacacccagcagaggactccagccttctcggggcccaggcctgggccagaagctgttgaccataccaggagtcactggagaaaggggctgtgctggggccagactggcacaaggcactcgtgcccacaccacaccccagggccttgccaagctgtttgctgtttaattggccccttgaactgtcattaaagaacacctaggtacag

SEQ ID NO: 338151 - DNA, 575 bp, Homo sapiens
tccgtcactctccgcaaggcgcttgaattcaagcgtccaggcccccgaggaagcgcgaggcgggagaggctggggctgcgacgagcaagcagcgggtcctggacgaggaagagtatatcgaggtacgacctcggtgcggacgccggcgacttctgggcccatcctctgcttcaagctcctctcaggttccctctctcgggtgttgacactccgtctcctcgtggaagtggaggagccgggtgtggacggtcccacgagtcaaacggacaacctgctgcagctccctgcccggcgcaaagcttcggacttcttttagagccaggcctgggctgggctcatagacgcttcacagagcctgcagggcagctgtacacccagcagaggactccagccttctcggggcccaggcctgggccagaagctgttgaccataccaggagtcactggagaaaggggctgtgctggggccagactggcacaaggcactcgtgcccacaccacaccccagggccttgccaagctgtttgctgtttaattggccccttgaactgtcattaaagaacacctaggtacag

SEQ ID NO: 338152 - DNA, 121 bp, Homo sapiens
tgctcaggctgtcaattcatcatgcatttacactcaagtctcgtgacagatttaggtagggcctgaacaaaactcaggacaccaagagcctcaaggcttgaattgcccatttcttcctttt

SEQ ID NO: 338153 - DNA, 207 bp, Homo sapiens
cgtgttggggagatattagaggccttcgagcaggagcgtgacatgttctgatgtacatttaaagatcaccatggctgctgagtgactaacagactgcgtggaggattcttattcacaccaggagccctagaagcctctgatgaaaacacagggattatatcttgcagacatttttacttacaagggtttggacaaaagcggttgaag

SEQ ID NO: 338154 - DNA, 215 bp, Homo sapiens
gctttaggatgaggaagtggaagcaggggaaagtcaggaagtatggctttttaaaggagagtctagggctgggatatagtagcagagccacctggtttcagtccttgtatcccaaagatcttggggcacacgaacctgggccatcccatgggaaatacattagtccttcccattacatgtggctagtgtgagttaatagaggagtgttgtacatc

SEQ ID NO: 338155 - DNA, 659 bp, Homo sapiens
tggactcagtgagtgtggaggacagggagggaagcatctgtctgccacatagagaaggcaccttgcacacagtaggcactttcctgagggtggccgtgaatgtgaatgttacctgtgaaatagaggtatctagacagagaagttggcccttgtgttttgttgtgtgattgtcttttgccatgatgggccatcagatgtttttgagtagagagtaacttaaatggaatttgtttaggataataaccccattggcagaacagccgggaggcaaggttagagagtaaagtgataaggcctgaactttaggacggaaaagagtaggccagtgttggaagcattttggaggaagcagcagcagtcatgattgcttgactgggcagtggaagagaaaggggtttagaatggctcccagctttctagcttaggttagggattgtggcgataccatctcctgaggcaggaaacaggtgagagagagcaggtttggaaggataaggagttcagctttggctctgaggactgagtgacagagctgcctcagtggtgaggcgcggcaggcagctggatatgaattttgacctcgggaaagacatctgtgaaggtgaagactctcactcactcatcccactcctggcccaggtcttctgctttgttctccc

SEQ ID NO: 338156 - DNA, 330 bp, Homo sapiens
ccgagattgcaccactgcactccagcctggctgacagagcaagactccatctcaaaaaaagaaaaaaaaaatcaagacccaatctattattaagaagcaagtagagaaggaaataacacagaggactcaaacatcaaattgacagtctgatcagaagactattgcagtcctttccaactttgacattcaatgattccatgatcagcaaacattcacaagaaaacatatgggcacaccagaagctgagttaaggaaagccagctaaagatcaaaagtgattagattagacacactcaaataagtgagggggaacagtgaaccatcaaatta

SEQ ID NO: 338157 - DNA, 730 bp, Homo sapiens
aaaaatggaaaaaaaatttagtcaaaaaatattactggtataaagacatgaattcctctgtgaaagagtcttaggtacttgcagagggtgggagtaatgaccatggtcataaagatgtggcaaaaggaaatgtgaggttctgattcaaactgcccccaaatactaggtctgggcatcggcctccccactcatggggcagccaggcctcaatctgcctcttgtctctgcaggataatgaccgtgaacaggcatcagcaaactttttctgtaaaggtccagagagtaaatattttgagctttatggaccatagggtttcagttgcaactgcagtaaattctcaattaatgtcctcgttaggttcttagaaactgcaactttaagcgaaatgacgtacagtaagtccaagtaacgtcgtttcttgtaatgttgatgagaaactgccactgtagagtaaaagcagccgtagatggtatgtaaacaaatgagtatatctgggttccaataaagctttatggacactgaagttttgaatttcacataatttttctgtgtcacaaaatattattctttaaacatttttttcaaccatttaaaaatgtaaaagctggccaggcatggtggctcatatctgtgatcccaggactttggaagaccaaggagggaggattgcttggggccaggagttcaagaccagcctgggcaacatagcaagacccccatctctacaaa

SEQ ID NO: 338158 - DNA, 346 bp, Homo sapiens
tgttggggtcaagaggtagagcatcaagatcagtagctaattcctgcggggcttaatatctaggtgatggattgacaggtgcagcaaaccatcatggcacacgtttacctatgtaacaaacctgcacatctcacacatgtaatctagaccttaagataattttttttaaaaaaattaccttatgttttagtttcttaatcagaatattcattttcagttgatctgtttttaagtctccatggcaatcgaagtcttcatttccaaatacacttaacacatttattgtcatttccaggagtttcttatatctgcagaaacgtacagaattagtaagtcaaatattttt

SEQ ID NO: 338159 - DNA, 250 bp, Homo sapiens
tgacccccatcacctacaccccatcacctacacctcaatcatctataccccatcacctacacctcgatcatctataccccatcacctacacctcaatcatctataccccatcacctacaccttgatcatctataccccatcacctacatctcgatcatctatatcccaatcatctacaccccatcacctacaacctgatcacctataccccgatcacctacaacctgatcatctataccccatcacctat

SEQ ID NO: 338160 - DNA, 396 bp, Homo sapiens
ccaattttacggtattctaagtaacgctaactgaactctaacagtatttagacaattagtgaaaatcaagtgagagaaggagtcagaaaccatgagaccgtgagagttgccctcaaaggtctgctgcttctcccttctcctgttccctcctctcctcactggagcctgggggaactggtcttggaggaggccatctctctgtcaccctcaaaaggtggtgatgtcccagggaaagaccctttctttcacccacccagtatggagctctcctaggaaattttcaaattctcttaggatgctctaagctgctgcttgggctgtgcagctgcccacacccagactgtctcttccagcagactgtggatcatgcaagcaggagtatgacgagtccggccc

SEQ ID NO: 338161 - DNA, 430 bp, Homo sapiens
ccaattttacggtattctaagtaacgctaactgaactctaacagtatttagacaattagtgaaaatcaagtgagagaaggagtcagaaaccatgagaccgtgagagttgccctcaaaggtctgctgcttctcccttctcctgttccctcctctcctcactggagcctgggggaactggtcttggaggaggccatctctctgtcaccctcaaaaggtggtgatgtcccagggaaagaccctttctttcacccacccagtatggagctctcctaggaaattttcaaattctcttaggatgctctaagctgctgcttgggctgtgcagctgcccacacccagactgtccttggacaagctttctaccttctctgtacctcagtttgtccatctgtctggtggtgatcagagccattgctgccactgagtgtct

SEQ ID NO: 338162 - DNA, 248 bp, Homo sapiens
aggacgaggtgggaggatcacttgagcccaggaacttgtggccagcctgggcaacaaaagaagaccccatttggccaacatggccaacctggccaccacggtgaaactctgactctacaaaaatgatctgggcatgggtgacatgcatgtgtagtcccagctacttgggaggttgagatgggaggattgcttgatctcagaaggccaaagctatagtgagctatgatcacatcactgcactccagcct

SEQ ID NO: 338163 - DNA, 377 bp, Homo sapiens
ttggttcacctaagataaaaacttagaagtcatctttgattcatcatgccacttcattcttgtgttaatcatttgccaacacccatcagatttcccctatttgaaacgtgaactagtagaactgccttctccttgccctcctaatgccaagctctccaagccatcccaggcattgcttctgtctaacactcatctaataatactctttctatttgctttaccgttcgaaagtctgcaggttgggcgtggtggttcacgcctgtaatcccagcactttaggaggccaaggagcactttttgagtctcctgtctagatcattctcttcctcaccatcttctgtctctctctggtcttgacactttccctccccacaagc

SEQ ID NO: 338164 - DNA, 537 bp, Homo sapiens
ttggttcacctaagataaaaacttagaagtcatctttgattcatcatgccacttcattcttgtgttaatcatttgccaacacccatcagatttcccctatttgaaacgtgaactagtagaactgccttctccttgccctcctaatgccaagctctccaagccatcccaggcattgcttctgtctaacactcatctaataatactctttctatttgctttaccgttcgaaagtctgcaggttgggcgtggtggttcacgcctgtaatcccagcactttaggaggccaaggagggcagatcacgaggtgcagagatcaagaccatcctggctaacacggtgaaatcccgtctctactaaaaatacaaaaactagctgggcatggtggtgcacgcctgtaatcccagctagtgcctgtaatcccagctatttgggaggctgagacaggagaactgcttgaacctgagaggcagaggttgcagtgagccgagatcgcgccattgcactccagcctaggcaacaagggcgaaactccgtctc

SEQ ID NO: 338165 - DNA, 522 bp, Homo sapiens
catccatttcgccatcctctgtaatggctccctgacttttcactgagtaaccattacccacgtcctactggatatgcttccatgagactgttagggcactcagctgtccacaggccaaggggagtcatgggaggccacaagactcaagctgcaccagtcagaagctctccctggaatttgaatcatgagcttatgtgacaggaggcccaaatctgattgcagctgatttatgttgtacccagggccctgaggaagctgccattccttcctgctacttcaatccctgctactgccctggttctagtcttttctgaaggctgcttcttcagtctctccctctgttgtgagtgccatcttaatctccttctaataaatatctttcttgcttaagttagcaagagtcggtctctgttgctgcagccaaagaaccctaactcatacttgtcctttcaagaatttgggatgagatgaggaggacaatgaaggacaagcacgaggggagcatagcctggaggaaggtag

SEQ ID NO: 338166 - DNA, 200 bp, Homo sapiens
caagctaggactacagccttgtgccatggtgcctagctttgaattctttttttaaaaattgttttattaatagcagttttttagttgattttcttgggccttgtaaatattgatcctatcattaacaaatagtaaaacttttaacttctcttttctaatttttacacatctaacttataacttttttttttttttttttt

SEQ ID NO: 338167 - DNA, 455 bp, Homo sapiens
aatcagatatgggagtgagtggagcaagacggtggaaaagaagcctacaaacattggttcggctgctagaacaccaaattttaactatctgcacacagaaaagcaccgtcacaagaaccaaaaatcaggtgagcaatcacagtggctggttttgacttcatatctttgaaagaggcattgaggagggcagaaaagatggtcttgcatcgccaatgccacccctccctcaccccctagcagcagccagccatgtggtgtggagacagaacctatgcacttgggaaagggagggtacagtggctgggggcctttacactgaactcagtgctgccctgtcacagtggagaataaagctgggctgggctcagccagcgccagcacatggagggagcatttggacctgccccagctagacaggaagcatccatcccagtggtcagaacttgagtttccct

SEQ ID NO: 338168 - DNA, 222 bp, Homo sapiens
tagcgccaccatcatctctctttcctcctcgtccatcccacctcccctcctgactgctgctcataggctaggaagagtggaatttggagctcagttgcctcctaatccagccaccacctccactgccctctcgcacacacatgcagacttcagccttgcatatggacacaaatctgtgatccggtgggtccacgttctctctttgtttcaggcctcatccaa

SEQ ID NO: 338169 - DNA, 530 bp, Homo sapiens
aggggtatggcatccaaccctatcattcttttatgctccacaaaagaggtaaagtatcacgtgggtcaaaattccatcccagtcatccaggagtgggaacagaggggcagcctaaggaaaagatgaggactaggctggggcaaacccaagatagtggttctcaaactttagtgggcatcccaatctactggggagttttctcagaatcagatgtctgggtccctccctacacctgatatatcagaatgtcctggagcacatctatttcaacaaagctcaaactgctgacacaggtccaatagaaagtttagaaataatgagaaatctaccgcaactatcagcagttccaaaataaaagtcatccactgcaaaactaggtttagcaggtcagaaaggggcgaaaaaggatcaccagcctgcatgtctaacaggctgcgctaggctggagcctgtaggagaggtccattattatgaaacaaaaactgtgttctataaacaaaatttttgtgtgagaaatatttcaaacatct

SEQ ID NO: 338170 - DNA, 370 bp, Homo sapiens
gccccatggctgatttgctggaatctcattgtctggccccagtgaccatgggactggatcccagggcttcgcctaaagtctgaatttgggctgactgggctcttggcacagatggtcctccccagcaggtcacccacttgggcagacacacacacactcactcacacacacatacatacactcacagtcacacacacacactcagagatatcctcacacactcacatacacatactacacacactcacagacagcctcacacatacacactgtacacatacactcatatacacacagtctacacacacacacactacacactcacacacactacacattcacactcacgcacacactcatgcactctcac

SEQ ID NO: 338171 - DNA, 323 bp, Homo sapiens
aaatgtgtcctagagttaaagcccaatgctatggacacaccaatgaaatacccaatggtagacttgtgggaagacattcttacctactatcattggaccctatatacaatgtacaagtaacactagcatttggtgtaaataatgatcttttatattctacctcctaaaaactgactgatggacaagtaaagtatgttatatttatattatgaaatactgaccagcaattaaagtggaaaaatgctacatgtatcaacataaaaaatggaaaatgttaagttcaaaaagcaaattgcagaaatatcctacatgattatatatac

SEQ ID NO: 338172 - DNA, 241 bp, Homo sapiens
attttagacttgtaaacacaaatgataaatcaaacaggctataatgggatgggaattaccattcatacagtgggatggggattaattttactagtagtacttgaattgttcatagaaaatttagaaacacaagaaaaaatgtaagtcactataaagccaccagtcaaaaataactaccatcaatattttgggaccttcccttctagtaccttttcttatacgtacactttttttttttttt

SEQ ID NO: 338173 - DNA, 304 bp, Homo sapiens
atttcaagtttcttgctatactgatgcctatgtttcagtttcccaatatagtgatatttgtacctgactagaataaaatttcaattatttatcaattagagaaacaactacagcagtttcaccttgaattaagacaaattatcacataaaatattaaatagtaagcaaaacaataccagcaaaaacatgtcaaacaattaataaaggatagtgcttttttcttaagtaatcagataactacccaattaatcaaataactacccaatgacaaatattttattttactaattaagaaaaggataat

SEQ ID NO: 338174 - DNA, 198 bp, Homo sapiens
tgcactccagcctgggtgaccaaatgagaccctgtctcaagaaaacccctcaaaaacaaagattctattttgatttatttgcagtgtttgagtgtattgctttatatagttttcttagatgttgttgtaggtattacaatatacgtatataacctatcccagtctaatacataacctatcccagtgttttaccaggtt

SEQ ID NO: 338175 - DNA, 309 bp, Homo sapiens
tcatcctgaccctctccttcataaattattcagcttcctacactattaaagtttaccacaaccaccaccccatcatactctttcacccacagcaccaatcctacctccatcgctaaccccactaaaacactcaccaagacctcaacccctgacccccatgcctcaggatactcctcaatagtttatgcattttcctactggggtgcttatgtttctctagttaatttgcgttcttcattgtatttactcaaggtatttttcccccagcgcttgcccttgaaatctacacatgacttttttttttttttt

SEQ ID NO: 338176 - DNA, 220 bp, Homo sapiens
cctggatgggatcctgggacagaaaaaggacttggggaaaaactaaggaaatctaaataaagcatggactttcattagtaataagaatcaaggttgattaattagttgtgaggaatgtaatgtaagatggtaatcatagggaaatctgaaatggaatttatggaaattctgtactacctttgcagttgttctgtaaatctaaaacggttctaaaaaatac

SEQ ID NO: 338177 - DNA, 105 bp, Homo sapiens
caggtggggggtcgaagtaagttcaaatccaaaatagagaccactgggctagtagacacttcacattagaagcatggctaggtgtctactccctgagaaccaaaa

SEQ ID NO: 338178 - DNA, 415 bp, Homo sapiens
tacccctacagttgcctattctaaatatgtgtaagaatatcttctcatttccttgacactgattttcaagattgtatccttcacacaaaattatcttcttccacatgactatgtctatttcatctaactgatgtcattgtcagcatcatttagaatgttaagatttttaaatccaattaatgaattttccaggtgtaacataaaatcacaattttctaaataaaatccaacctgtatttgctactgagtaaaagttttactccacatgtattgtcccaattaaagattacaatacatacttttttttcatttatttatattaaagtctcagaaaacagttgtgtgtgtccacgggcgtgggtatgtagagatggagtctctccatgttgaccaggctggtctcgaactcctgggc

SEQ ID NO: 338179 - DNA, 518 bp, Homo sapiens
aaatgcttcactggaaagtcttgaggaggcacctttgtgggactttccgtgtaggaattgctgggcagaggttcctagaacctgggaatttcccaagctactcaggcagcaacctggtaatctttaataacctcgagtgtgcccagagggggctgtgtgggggcaaaggctggggatgagggtggatagacatagcgaggtaaaaaggctttgcctctcggctgagcctccagtgcttgtttacatgtttgtctcttaactacactgtgaattccttaaaagcagggtcagtgtcttactcttcctggtatccacatctgtgaggtatgctcacagttgtgagcacaggctaggggctcaatcaattatctccttgaatgaaagcaactcttcttccctcttctcttcagagtcacttttatttttggccagtagtaagttgagaagactaactgggaaaagaagggtcaaatcaaggcccttcttgatagtgaagcctcagactctctagtttctgt

SEQ ID NO: 338180 - DNA, 208 bp, Homo sapiens
agagcaaggccaaagaaaactgtagaggaagagggtttgtagcttgttggctcttccaccatcctgctgcttgtgagtgtctctgaacctactatgtgtttggcaatgtggaaggtggtagagacaaaacagagaacaaaatttagtccctctctgggccagatgcagtagctcacgcctgtaataccagcactctgggaggctaagt

SEQ ID NO: 338181 - DNA, 263 bp, Homo sapiens
aggcatgagccaccgctcttgacctcaaatttatatttaattgcacttcatttttcttcgtgattatctgagatactttctttccagatatttccaatgttcatcattttttaagggatgtttcttgttaacagcctgtagatggagtctcatttactgtgttaatacatgcctggctttattgcttccatcttatataatagcagataaaaatgaaatattttctgtttttctttttctccttctcttttgttgaattacat

SEQ ID NO: 338182 - DNA, 128 bp, Homo sapiens
ggaaactcattttgacatgccaactcaaaccacagaagccagagtcagttcagctggtttcagtagtaactcaggaccttgacaattctgttaagccatgtcctttaaaagccagctcttattaagta

SEQ ID NO: 338183 - DNA, 230 bp, Homo sapiens
ttctctgttatgaaactgactgtatctctaaacttaaaaaaaaaaagctttctttttgttattgacagcacaaagaagctatttataaattatgaagtttcgctcccctgctataattttccaatattcagaatgtcagctcaatttgctctgacattcaaagatgagagcatggcaccgcaaagagggcatgtcactgcaaaagaatgcacctccaaacggctttgcaa

SEQ ID NO: 338184 - DNA, 325 bp, Homo sapiens
gagctctagaccagcctgggcaacattgcaagaccccatctcaatatttttttaattttgaaattttaaatgcagcagattgccaggaaatagctgtcaaatgatacgagtgtgatttggaagataatctagaaagacttcttggcaagtatcttaagtttttgttgactttcaagaaatgaaggctggaaatgaaggctgatgcattaacaggtgtagttaatgcatgaaggatgacatgagactccagtcagccaaccagagctcaaaaaatctgcagtgccaggtcctcaaaagatgggcacacattatggagggggatcct

SEQ ID NO: 338185 - DNA, 219 bp, Homo sapiens
gatgggacgggacgggatggggcaggacagagcagggcagcttctgcaggaaggagcctctgcactggcagtggcactgacggcttcaaaggagctgcgaagacacaaactacagaaagaatagaactcaattcttccctccttttacctcaatcaggtggccttttggtcttactgtatttttggcaacctgtatttagcacctacagaaaaagcagg

SEQ ID NO: 338186 - DNA, 362 bp, Homo sapiens
taataatgcaatgtggcaaggaagatgttgctggcttttatttaacagcactcaatcaatcaggtgatgccaggcctgcttctccatagtgcagtgtctttgatatttactgcaatgatgttggctataattctgttacatgataaaagagatttcaagagttttaaaaaccccatcaaaaaaagagttcattctggaaccacagatgtctggtttctttgctgagattcatatagagtaagatcattgaatttagcaatggatttcagacatcaaattctacctttaaaaacatcatttaaaaactaaaattagaatcatcaaccgcttctcaactaccatatgtcagtgattatggggat

SEQ ID NO: 338187 - DNA, 443 bp, Homo sapiens
ttataagcaattctgtgtgtaacataatacaattaaaatacatatttagtcaccaagtggaatgtcaaattgtgctgtcgtgagataccagggattctcctttctttctttttcatagtagatagggccactccactacccattattcttttttttcagctgacccaaaacaggatctgctttggcagaatgagtggtgagggataaggtacaagcagttctaatgtctgcccatcttagccattcctcatctactgcttcctggtctcatcaggttgaactctaaaagaagtgtccctagttcagcatagccccaactagacttctatgactttttgcctaagacatggtctatacctctaactttgagggtactcttagtaaagttaccttaaactatcaatcttgaattgtctttccaaggactgaccggaatatctgca

SEQ ID NO: 338188 - DNA, 279 bp, Homo sapiens
attagagggaagacaacagaagcaacacaataagtgctcaagggagatattacaaggtcctaaagaaaagcagtgacagtaggaaaaaagggagagaaagagagtccacagctactgagaaggtagactcaagaggacttggttatctatgagaattagggatgcgagaaaggcaaagacatcacagatgatgttttccatgatctctgtcctaaataacagggcagatcttttttttcttttctttctttctttttctttttttttttttttttttgc

SEQ ID NO: 338189 - DNA, 387 bp, Homo sapiens
gcaggagaattgtttgaacctgggaggtggaggtgacagtgagccgagattgcgccattgcattccagcctgggcaacaagagcgaaaaaaaactccctctcaaaaaaaaaaaaaaaaatctttaattttaatcaaagccaaatcaaagctatttatgatgttaataatttattcctgcgggctattgatgcactggagtggttccaaggaagaagaactagaactcttagagaagaagctagcattgattagacagggaaagagaaaacctaaacagagcagcatgatagctgactttagatacctgaacttttacatggaaaaaagagttctttatcctgtgttaagcccaaaatatagaactagggttcatgagcgaataatag

SEQ ID NO: 338190 - DNA, 929 bp, Homo sapiens
ctgacctcgtgatccacccgcctctgcctcccaaagtgctgggattacaggcgtgagccaccgcccctggccattattttgagttttttttagaaagcttttacaagattacaagaaatgactctcttagggaagaaaaataaccacccagtttcccttcctagtcttagttcaattcatagagtgttgtgtttatccccaaagggtcttgtagtcttcactgcaaacatttgattctgatctactcacatacaaggaaatgtagattgccaagaccaaaactagaggggtgggcttcccatcagggttttcctgtgtggagatgacaggggaaacagggaggaaatcctaattatggcttgtcctcttccctgaattgctgtctacgacagtgtagttccaatgtaaacaaggtgggttggggatggtttgtatagggcaggaggcccacccagaagtcctacccagggaagagagggcccagaatctagttgcagcatttgcccagtaaccctaccccggcctttctttgtgtgttaggaagctggaaatgcaggctggtctccctttcttgcctttgtcactaaccccgagctgtcagccatttggaatcagaactgctttccagtgttctaagtccttatttgattacaaatatttggtgaatcaaagtaaggcactttggtcctaatttttgacctttggtcctaatttttgtttgtaagatgtggagaataaccctgaccttaccaggggtcctgggaatgtgaatccattcgtcaagtggttccacatctagaagaattttgcctatgccgtgtcaggcatcattcaacacaaggccaactatctgctgccagtctggcataagatcagattgaaactgctaagtaatggtacatccaaataaacaaagttcttccaagaga

SEQ ID NO: 338191 - DNA, 449 bp, Homo sapiens
catgagccaccaagcccagctcatcaatggtatcatcttatgtataaactgcatgagccctgcccagcacatgtggtaagcgtgtagcctgggggacccctttggggtgtctgttgatttcctcaggcctcctcaatttcatgatttctccgcgaatcaaggcagcacagaaacaatgatagtgaaaatttgcttcattcctttttaaatctcttaacagcatgtcaggtgttttgagcgtgttcccacaacaataaatactctttgaaaacataatttttaatgactacataatgttctgccaaatggagataccataatttatttagccgtttccctattattagacacttaagttgtttccactttttttctctctctgtcttttgtttgtttgtttgccattatataacactgtcttaaagatctgtgtatgtaaatctgtttat

SEQ ID NO: 338192 - DNA, 228 bp, Homo sapiens
aattgacaaaatttgaatatgatctatagatgagataatagtactacatcagaggtaatttcctggccgggcatggtggctcacacctgtaatcccagctactcaggaggcggaggcaggagaattgcttgaacccaggaggcggaggttgcagtgagtcgagatggcatcattgcactccagcctgggcaacaagagaaaaactccgtctcaaaaaaaacaaacaaa

SEQ ID NO: 338193 - DNA, 156 bp, Homo sapiens
atggcttcagtaccagatttggctgaaggcagcctaatcctctttacctttagttgatagcaaaaaagcaaacaacaagggaatgtgtggagttgaaatagcttgtttactcttgtggtcctaagaccaaactgatcaacctcaggtgcataattg

SEQ ID NO: 338194 - DNA, 322 bp, Homo sapiens
tgctgagggacagagcggggagatgaggattccaagaatgaatagagtgagttctcttccttttaaagttgcaaatgaatgattactcaatgtggcagctacgagctgcagtgaacagtgcaaaatagcaagtttctgggtcttggggaatcgaggaggcattttttgagtgtggttttgcagaataagtcagcatttacccacagagacaagcaagaaagatgtcctaaaaagcaaagcagcaactgcaggggccacctagggacaaaaccccaagtcctagtctgttgctgtcaccaaatgtcacgttgcctctttgtgc

SEQ ID NO: 338195 - DNA, 675 bp, Homo sapiens
tatgcagaactgcctaaaagaaagcaatatatttggttttagaataaacatcagagccaggagcggtggctcatgcctgtaatcccagcactttgggaggccgaggcgggtggattttatcagctaattttatcagtaatgggtcatgggaacaaaaatgatccttgtttgtgtgtgtgcataaaaatagtggtaaatgcgttattcaacatagcccttaaaaacaccactttcaaatgggccagaaaaaaatgtacataaacagaaaaaagataaataaatgattaacaactagagaatctgggtgaaggtatatgagagtctatctaattcttacatttctgataatttttaaaaagcagtggagactagaaaattaccttttacattaacatagttataaatctaatgctagttatcagtgaaatatgacctaattgatgaggagggtattaagaacaattttcaagtattaaggaacatatcttaattatagctccagatttaatttactgataattgttaccctttacttcaacaggtgtgcttcattcattcactcattcaacaaatagttattgaacgtggtcactatgtttcaggaaccttctgagttttaggagcatggcagtatacaaatacagatgaaatccctgaattccacgtctttgtatg

SEQ ID NO: 338196 - DNA, 517 bp, Homo sapiens
gctggtctcgaactgctgacctcaagtgatctgtctgccttagcctcccaaagtgctgggattacaggtgtgagccaccatgcccagccagtgttagtaaatgttttgtgtgtacttaagaagaatgtgttgagtggagttttctaaaaatgttaactaggtcacattggttgatagtgttcatttaagacttctgtgtcccttttgattttctgtttgtttcaataatttctgaaagagaagtgttcaatattcaacttcaattgtggatttatttttccttttactggttcatgtgtttggaggctctgttactaggtgcatgcgtaataagggtttttatgttttcttgatgaattaggtctttgtcactattaaattttgtgaaatagtttgtgaaatagtttgcatagtttctgacaaaaagtctgctgttcttaccttttgttcccagtatgtaagttttctattttctttggctactcttaagactttattactaggttttagtcatttg

SEQ ID NO: 338197 - DNA, 451 bp, Homo sapiens
ataaaaccatgccccttacatatgaaatccaactcatgtgttttgtatttaaaatatttctcaaagtttaagtattgttgtttcataattattcaagacaattatgcattgcaatacacgttttaaaaagaaaaagcccaattcatataatttctcaaatgcttcagaaaataagcctaactacgtattttttggttttcatttaaagttcctggcaataaatattagccacaactaatgagggggacaatagagtttaattaagtctttacataatataatgtcttacaaagtagtttccaaagtaacatttaaagacattaaaaagtcgcactaagataaaaaattatatgcctttgctaaacatagcattttgaaacatttcctaccatatagtaatctctgattatttggaaagaaatctcctattgatattgtgccaagaaaaatt

SEQ ID NO: 338198 - DNA, 459 bp, Homo sapiens
ttgtttcatagcagatatgtgactaagacagttgaaggagccactctagattggttggtcaagaaaagtctctgaggagttgacatttaaactgagacttcagtgacaaggaggcagtcctgggacgatgtgagtgaaattcattcttgaacgttgcagactctgtggtagaaaaagcttggttaagatgtaataaatggatggggctgggaaagaggatagaagatcctgtaagagggagataggggacagatcatgtagagcaggagtcggcaaactctttctataaagggccagatagtaaatatttagactttgcaagccatgtatggtctctgtcataactattcagccctttggctgggtgcgaatcatgcctgtaattccagcactttgggaggcccaagagagcagatcacttgaggtcagaagttcgagaccagcctggccaacatggca

SEQ ID NO: 338199 - DNA, 435 bp, Homo sapiens
tatagaaaaacatgtttagaaatttgccgtaattggctaaattactgttgctattcaaatgtttcatccctggtaatagaatctcacccaagaaacttgcctttcttccctggggtctgaaatgagaaatacagaaatatctattttaagaagttctcatgtaagaatacctgaattcataatgaagagtgtttgcataccattaaaagcctaccacgtgccaaactctctgacatatattacaacagtcctgcaagatagatattattactcctgttttaaagatgatgaaacagaagctcataaagtttaacaggcttgcccaagatcttatagctagtacctggcagaaccagaacccagagcaaagagacacaacggtagagagtagaaagtgtgtggcacaaagtgtgtgggttcacagcccgactgaac

SEQ ID NO: 338200 - DNA, 874 bp, Homo sapiens
cggggcaggaggcggcgggtcttcgggcctaggcgagcgccaggtctcccgacggaaattaccgaaggctggcagaggcgccgaagccgggagtggtggagccggaggggatagtgggggtggggaattccggccgaaggagcgaatccgggtcggactgcgtgattcggcccggtgggggcgggcagggtgcgcgcctgccgcgcgcccaggttaggtgtgtccgctcttttcacactcgcggccggcgcgcgcgggcacgcggcagaggagggggcgcggcgcggaagggccggcggaggcggcgggagcgccggcgcttggtgtgcgcgccttgggtggtgtcccccgcctgcggaatgggtaatgaggcttttctccgcagcaacagcatcacgagtttcagttcccaggagcccgccgccgcggctgctgccgctgccacgacatgagtcaggctttcttccctggcgcgtggcggaaacctcctccccctcgccgcacctgggctcgcccccggcccttgcctcctcgggggatgccctagggccgggagctgtggggtctatggaaggccggtggctcccggtgataggtgttgtcttttgtgcagtgcagttgctgccatgcggtcccctcgcccttccacgggcaggggcgaggcggccgggcagatgttgcagctgtttccagttaactgcctgagctcctctgggctaggctcttctctaacgaggagtggttgcaatccatccttaactggaggacagaagcaggccggccctgtaatcgactgacctcaacaggtgtctccaagcagcgacgcctttttcgttcatcgtcctggctatatcccccattggtttgactcagg

SEQ ID NO: 338201 - DNA, 742 bp, Homo sapiens
  misc_feature (387)..(387): n is a, c, g, or t
  misc_feature (485)..(485): n is a, c, g, or t
  misc_feature (534)..(534): n is a, c, g, or t
  misc_feature (539)..(539): n is a, c, g, or t
  misc_feature (653)..(653): n is a, c, g, or t
  misc_feature (698)..(698): n is a, c, g, or t
  misc_feature (731)..(731): n is a, c, g, or t
  misc_feature (733)..(733): n is a, c, g, or t
tgctgggtgttaatcggccgagggctgccatgagcaagccgagagccagccggccggcgcactccgactccgagcagtctctgtccttcgacccgagccccgcgccctttccgggacccctgccccgcgggcagcgctgccaacctgccggccatggagaccccgtcccagcggcgcgccacccgcagcggggcgcaggccagctccactccgctgtcgcccacccgcatcaccctgtgcttgcatgtgagaatggatgtgacacttgcatgtgcatgctcacattgcatctgccttgtgctgtgtctttacattctgacctgatgtagctgctactgcttggaaaactgtgatgaaaactgcaggtgcttgcttgcctttctgctnatcaccagattgtcttgaacgaagtgttgtgtacatgcactgctgaagtgtagtacctgtgacattcaaatgtgtcactggccataactgcatgtgcnctagatgccatctgtgtgtgactaagcccactgactaaatgaaacctcntatgnaacgtacaatgattaatgcccaaaatgtgtacgtctagctgacacactgaccttagacatgtctagtgtatgtcattgcatgaccaacactgtagcctgtagacgtgcacgctntcctacatgtggatcgctttgtaatactgtctggctggcatattnacgctatatcgacacgcgacgtgcgtagaaccntngactaatga

SEQ ID NO: 338202 - DNA, 508 bp, Homo sapiens
agggatgtggccttcggtctttcctcgcagctccggggcaagctaggagtgggatggaagtcgagagtcgatcccggagcccggccgcggggagaggttctcggcagagaagacaaagcccgcagcagcgatggggggagagctgggctctgcgtgttgtgggggccaggaaagggtgccaggctggggctggaaccccctggcaaaggatggggtcccctcatccctaaacagcaagccatctcccctcgcccgccccccgcccccccagtctcggagatctcagaggcaccgactgggaaggtgtcatctccagcttccgcttgcccctggcttctggcatccaacacatgggggataatgatgctaccagtcgtttcctgactcgggacgaacaagtacacgggaagctctttgagaacagggattggatctagtctactcctgtattctcagcacccagcacaaagtaggtgcttaataaatgtttgctgttcggaaaaaaaaa

SEQ ID NO: 338203 - DNA, 3212 bp, Homo sapiens
  misc_feature (6)..(6): n is a, c, g, or t
agactnacggctagtacgaggccgggtgttaatcggccgagggagcgccgcacctacaccagccaacccagatcccgaggtccgacagcgcccggcccagatccccacgcctgccaggagcaagccgagagccagccggccggcgcactccgactccgagcagtctctgtccttcgacccgagccccgcgccctttccgggacccctgccccgcgggcagcgctgccaacctgccggccatggagaccccgtcccagcggcgcgccacccgcagcggggcgcaggccagctccactccgctgtcgcccacccgcatcacccggctgcaggagaaggaggacctgcaggagctcaatgatcgcttggcggtctacatcgaccgtgtgcgctcgctggaaacggagaacgcagggctgcgccttcgcatcaccgagtctgaagaggtggtcagccgcgaggtgtccggcatcaaggccgcctacgaggccgagctcggggatgcccgcaagacccttgactcagtagccaaggagcgcgcccgcctgcagctggagctgagcaaagtgcgtgaggagtttaaggagctgaaagcgcgcaataccaagaaggagggtgacctgatagctgctcaggctcggctgaaggacctggaggctctgctgaactccaaggaggccgcactgagcactgctctcagtgagaagcgcacgctggagggcgagctgcatgatctgcggggccaggtggccaagcttgaggcagccctaggtgaggccaagaagcaacttcaggatgagatgctgcggcgggtggatgctgagaacaggctgcagaccatgaaggaggaactggacttccagaagaacatctacagtgaggagctgcgtgagaccaagcgccgtcatgagacccgactggtggagattgacaatgggaagcagcgtgagtttgagagccggctggcggatgcgctgcaggaactgcggggcccagcatgaggaccaggtggagcagtataagaaggagctggagaagacttattctgccaagctggacaatgccaggcagtctgctgagaggaacagcaacctggtgggggctgcccacgaggagctgcagcagtcgcgcatccgcatcgacagcctctctgcccagctcagccagctccagaagcagctggcagccaaggaggcgaagcttcgagacctggaggactcactggcccgtgagcgggacaccagccggcggctgctggcggaaaaggagcgggagatggccgagatgcgggcaaggatgcagcagcagctggacgagtaccaggagcttctggacatcaagctggccctggacatggagatccacgcctaccgcaagctcttggagggcgaggaggagaggctacgcctgtcccccagccctacctcgcagcgcagccgtggccgtgcttcctctcactcatcccagacacagggtgggggcagcgtcaccaaaaagcgcaaactggagtccactgagagccgcagcagcttctcacagcacgcacgcactagcgggcgcgtggccgtggaggaggtggatgaggagggcaagtttgtccggctgcgcaacaagtccaatgaggaccagtccatgggcaattggcagatcaagcgccagaatggagatgatcccttgctgacttaccggttcccaccaaagttcaccctgaaggctgggcaggtggtgacgatctgggctgcaggagctggggccacccacagcccccctaccgacctggtgtggaaggcacagaacacctggggctgcgggaacagcctgcgtacggctctcatcaactccactggggaagaagtggccatgcgcaagctggtgcgctcagtgactgtggttgaggacgacgaggatgaggatggagatgacctgctccatcaccaccacggctcccactgcagcagctcgggggaccccgctgagtacaacctgcgctcgcgcaccgtgctgtgcgggacctgcgggcagcctgccgacaaggcatctgccagcggctcaggagcccaggtgggcggacccatctcctctggctcttctgcctccagtgtcacggtcactcgcagctaccgcagtgtggggggcagtgggggtggcagcttcggggacaatctggtcacccgctcctacctcctgggcaactccagcccccgaacccagagcccccagaactgcagcatcatgtaatctgggacctgccaggcaggggtgggggtggaggcttcctgcgtcctcctcacctcatgcccaccccctgccctgcacgtcatgggagggggcttgaagccaaagaaaaataaccctttggtttttttcttctgtatttttttttctaagagaagttattttctacagtggttttatactgaaggaaaaacacaagcaaaaaaaaaaaaaagcatctatctcatctatctcaatcctaatttctcctcccttccttttccctgcttccaggaaactccacatctgccttaaaaccaaagagggcttcctctagaagccaagggaaaggggtgcttttatagaggctagcttctgcttttctgccctggctgctgcccccaccccggggaccctgtgacatggtgcctgagaggcaggcatagaggcttctccgccagcctcctctggacggcaggctcactgccagggccagcctccgagagggagagagagagagagaggacagcttgagccgggcccctgggcttggccttgctgtgattccactacacctggctgaggttcctctgcctgccccgcccccagtccccacccctgcccccagccccggggtgagtccattctcccaggtaccagctgcgcttgcttttctgtattttatttagacaagagatgggaatgaggtgggaggtggaagaagggagaagaaaggtgagtttgagctgccttccctagctttagaccctgggtgggctctgtgcagtcactggaggttgaagccaagtggggtgctgggaggagggagagggaggtcactggaaaggggagagcctgctggcacccaccgtggaggaggaaggcaagagggggtggaggggtgtggcagtggttttggcaaacgctaaagagcccttgcctccccatttcccatctgcaccccttctctcctccccaaatcaatacactagttgtttcta

SEQ ID NO: 338204 - DNA, 3951 bp, Homo sapiens
  misc_feature (6)..(6): n is a, c, g, or t
agactnacggctagtacgaggccgggtgttaatcggccgagggagcgccgcacctacaccagccaacccagatcccgaggtccgacagcgcccggcccagatccccacgcctgccaggagcaagccgagagccagccggccggcgcactccgactccgagcagtctctgtccttcgacccgagccccgcgccctttccgggacccctgccccgcgggcagcgctgccaacctgccggccatggagaccccgtcccagcggcgcgccacccgcagcggggcgcaggccagctccactccgctgtcgcccacccgcatcacccggctgcaggagaaggaggacctgcaggagctcaatgatcgcttggcggtctacatcgaccgtgtgcgctcgctggaaacggagaacgcagggctgcgccttcgcatcaccgagtctgaagaggtggtcagccgcgaggtgtccggcatcaaggccgcctacgaggccgagctcggggatgcccgcaagacccttgactcagtagccaaggagcgcgcccgcctgcagctggagctgagcaaagtgcgtgaggagtttaaggagctgaaagcgcgcaataccaagaaggagggtgacctgatagctgctcaggctcggctgaaggacctggaggctctgctgaactccaaggaggccgcactgagcactgctctcagtgagaagcgcacgctggagggcgagctgcatgatctgcggggccaggtggccaagcttgaggcagccctaggtgaggccaagaagcaacttcaggatgagatgctgcggcgggtggatgctgagaacaggctgcagaccatgaaggaggaactggacttccagaagaacatctacagtgaggagctgcgtgagaccaagcgccgtcatgagacccgactggtggagattgacaatgggaagcagcgtgagtttgagagccggctggcggatgcgctgcaggaactgcggggcccagcatgaggaccaggtggagcagtataagaaggagctggagaagacttattctgccaagctggacaatgccaggcagtctgctgagaggaacagcaacctggtgggggctgcccacgaggagctgcagcagtcgcgcatccgcatcgacagcctctctgcccagctcagccagctccagaagcagctggcagccaaggaggcgaagcttcgagacctggaggactcactggcccgtgagcgggacaccagccggcggctgctggcggaaaaggagcgggagatggccgagatgcgggcaaggatgcagcagcagctggacgagtaccaggagcttctggacatcaagctggccctggacatggagatccacgcctaccgcaagctcttggagggcgaggaggagaggctacgcctgtcccccagccctacctcgcagcgcagccgtggccgtgcttcctctcactcatcccagacacagggtgggggcagcgtcaccaaaaagcgcaaactggagtccactgagagccgcagcagcttctcacagcacgcacgcactagcgggcgcgtggccgtggaggaggtggatgaggagggcaagtttgtccggctgcgcaacaagtccaatgaggaccagtccatgggcaattggcagatcaagcgccagaatggagatgatcccttgctgacttaccggttcccaccaaagttcaccctgaaggctgggcaggtggtgacgatctgggctgcaggagctggggccacccacagcccccctaccgacctggtgtggaaggcacagaacacctggggctgcgggaacagcctgcgtacggctctcatcaactccactggggaagaagtggccatgcgcaagctggtgcgctcagtgactgtggttgaggacgacgaggatgaggatggagatgacctgctccatcaccaccacggctcccactgcagcagctcgggggaccccgctgagtacaacctgcgctcgcgcaccgtgctgtgcgggacctgcgggcagcctgccgacaaggcatctgccagcggctcaggagcccaggtgggcggacccatctcctctggctcttctgcctccagtgtcacggtcactcgcagctaccgcagtgtggggggcagtgggggtggcagcttcggggacaatctggtcacccgctcctacctcctgggcaactccagcccccgaacccagagcccccagaactgcagcatcatgtaatctgggacctgccaggcaggggtgggggtggaggcttcctgcgtcctcctcacctcatgcccaccccctgccctgcacgtcatgggagggggcttgaagccaaagaaaaataaccctttggtttttttcttctgtatttttttttctaagagaagttattttctacagtggttttatactgaaggaaaaacacaagcaaaaaaaaaaaaaagcatctatctcatctatctcaatcctaatttctcctcccttccttttccctgcttccaggaaactccacatctgccttaaaaccaaagagggcttcctctagaagccaagggaaaggggtgcttttatagaggctagcttctgcttttctgccctggctgctgcccccaccccggggaccctgtgacatggtgcctgagaggcaggcatagaggcttctccgccagcctcctctggacggcaggctcactgccagggccagcctccgagagggagagagagagagagaggacagcttgagccgggcccctgggcttggccttgctgtgattccactacacctggctgaggttcctctgcctgccccgcccccagtccccacccctgcccccagccccggggtgagtccattctcccaggtaccagctgcgcttgcttttctgtattttatttagacaagagatgggaatgaggtgggaggtggaagaagggagaagaaaggtgagtttgagctgccttccctagctttagaccctgggtgggctctgtgcagtcactggaggttgaagccaagtggggtgctgggaggagggagagggaggtcactggaaaggggagagcctgctggcacccaccgtggaggaggaaggcaagagggggtggaggggtgtggcagtggttttggcaaacgctaaagagcccttgcctccccatttcccatctgcaccccttctctcctccccaaatcaatacactagttgtttctaaaaaaaaaaaaaaaaaaaaaaaaaaaaaaaaaaaaaaaaaaaaaaaaaaaaaaaaaaaaaaaaaaaaaaaaaaaaagaagagagagagagcgcgggagagagaaagaaaaataacgcagagaagggagagacaacaagatcctcccgaccacagcacgggtcgtcacggcaagaggggcggcacccacaacgggcggcgtactctatataacacgaccagagacgcgaggcgggaggcagagaaacaaacaaccaagcgagagaggggggacacagagaagacaaggagggaacaaaaaagaagagagaagcgaacacacaaaccagggcgagagagaaaacacaaaaaggaggaaagaaaaacaaaataaagcggagaaaagagaaagagagcgccagacgaggcaagcacaaaaaaaaaaaagagaagagagaggagatcaacggagggagaaaaaaccccacgacaggacaacacaaggcaaggaagggcggcgagaagaagaacacgagaaaacgacgaacggacagaaacaaagcgacagaaacaacaaaaatatgacaacgagcgcgaggaagacacgcgcacgaagcaaacaaaaggaaaccgaagaagaaaacaacaacccaccagagacgaacaacgccagagaaaaacagacacaacaaaggaagagagcaaaaagaaacagcagaagcacaaacaacgagcaaagagcaaaaacaaagaagcaaacga

SEQ ID NO: 338205 - DNA, 2061 bp, Homo sapiens
  misc_feature (6)..(6): n is a, c, g, or t
agactnacggctagtacgaggccgggtgttaatcggccgagggagcgccgcacctacaccagccaacccagatcccgaggtccgacagcgcccggcccagatccccacgcctgccaggagcaagccgagagccagccggccggcgcactccgactccgagcagtctctgtccttcgacccgagccccgcgccctttccgggacccctgccccgcgggcagcgctgccaacctgccggccatggagaccccgtcccagcggcgcgccacccgcagcggggcgcaggccagctccactccgctgtcgcccacccgcatcacccggctgcaggagaaggaggacctgcaggagctcaatgatcgcttggcggtctacatcgaccgtgtgcgctcgctggaaacggagaacgcagggctgcgccttcgcatcaccgagtctgaagaggtggtcagccgcgaggtgtccggcatcaaggccgcctacgaggccgagctcggggatgcccgcaagacccttgactcagtagccaaggagcgcgcccgcctgcagctggagctgagcaaagtgcgtgaggagtttaaggagctgaaagcgcgcaataccaagaaggagggtgacctgatagctgctcaggctcggctgaaggacctggaggctctgctgaactccaaggaggccgcactgagcactgctctcagtgagaagcgcacgctggagggcgagctgcatgatctgcggggccaggtggccaagcttgaggcagccctaggtgaggccaagaagcaacttcaggatgagatgctgcggcgggtggatgctgagaacaggctgcagaccatgaaggaggaactggacttccagaagaacatctacagtgaggagctgcgtgagaccaagcgccgtcatgagacccgactggtggagattgacaatgggaagcagcgtgagtttgagagccggctggcggatgcgctgcaggaactgcggggcccagcatgaggaccaggtggagcagtataagaaggagctggagaagacttattctgccaagctggacaatgccaggcagtctgctgagaggaacagcaacctggtgggggctgcccacgaggagctgcagcagtcgcgcatccgcatcgacagcctctctgcccagctcagccagctccagaagcagctggcagccaaggaggcgaagcttcgagacctggaggactcactggcccgtgagcgggacaccagccggcggctgctggcggaaaaggagcgggagatggccgagatgcgggcaaggatgcagcagcagctggacgagtaccaggagcttctggacatcaagctggccctggacatggagatccacgcctaccgcaagctcttggagggcgaggaggagaggctacgcctgtcccccagccctacctcgcagcgcagccgtggccgtgcttcctctcactcatcccagacacagggtgggggcagcgtcaccaaaaagcgcaaactggagtccactgagagccgcagcagcttctcacagcacgcacgcactagcgggcgcgtggccgtggaggaggtggatgaggagggcaagtttgtccggctgcgcaacaagtccaatgaggaccagtccatgggcaattggcagatcaagcgccagaatggagatgatcccttgctgacttaccggttcccaccaaagttcaccctgaaggctgggcaggtggtgacgatctgggctgcaggagctggggccacccacagcccccctaccgacctggtgtggaaggcacagaacacctggggctgcgggaacagcctgcgtacggctctcatcaactccactggggaagaagtggccatgcgcaagctggtgcgctcagtgactgtggttgaggacgacgaggatgaggatggagatgacctgctccatcaccaccacgtgagtggtagccgccgctgaggccgagcctgcactggggccacccagccaggcctgggggcagcctctccccagcctccccgtgccaaaaatcttttcattaaagaatgttttggaacttta

SEQ ID NO: 338206 - DNA, 3645 bp, Homo sapiens
  misc_feature (6)..(6): n is a, c, g, or t
agactnacggctagtacgaggccgggtgttaatcggccgagggagcgccgcacctacaccagccaacccagatcccgaggtccgacagcgcccggcccagatccccacgcctgccaggagcaagccgagagccagccggccggcgcactccgactccgagcagtctctgtccttcgacccgagccccgcgccctttccgggacccctgccccgcgggcagcgctgccaacctgccggccatggagaccccgtcccagcggcgcgccacccgcagcggggcgcaggccagctccactccgctgtcgcccacccgcatcacccggctgcaggagaaggaggacctgcaggagctcaatgatcgcttggcggtctacatcgaccgtgtgcgctcgctggaaacggagaacgcagggctgcgccttcgcatcaccgagtctgaagaggtggtcagccgcgaggtgtccggcatcaaggccgcctacgaggccgagctcggggatgcccgcaagacccttgactcagtagccaaggagcgcgcccgcctgcagctggagctgagcaaagtgcgtgaggagtttaaggagctgaaagcgcgcaataccaagaaggagggtgacctgatagctgctcaggctcggctgaaggacctggaggctctgctgaactccaaggaggccgcactgagcactgctctcagtgagaagcgcacgctggagggcgagctgcatgatctgcggggccaggtggccaagcttgaggcagccctaggtgaggccaagaagcaacttcaggatgagatgctgcggcgggtggatgctgagaacaggctgcagaccatgaaggaggaactggacttccagaagaacatctacagtgaggagctgcgtgagaccaagcgccgtcatgagacccgactggtggagattgacaatgggaagcagcgtgagtttgagagccggctggcggatgcgctgcaggaactgcggggcccagcatgaggaccaggtggagcagtataagaaggagctggagaagacttattctgccaagctggacaatgccaggcagtctgctgagaggaacagcaacctggtgggggctgcccacgaggagctgcagcagtcgcgcatccgcatcgacagcctctctgcccagctcagccagctccagaagcagctggcagccaaggaggcgaagcttcgagacctggaggactcactggcccgtgagcgggacaccagccggcggctgctggcggaaaaggagcgggagatggccgagatgcgggcaaggatgcagcagcagctggacgagtaccaggagcttctggacatcaagctggccctggacatggagatccacgcctaccgcaagctcttggagggcgaggaggagaggctacgcctgtcccccagccctacctcgcagcgcagccgtggccgtgcttcctctcactcatcccagacacagggtgggggcagcgtcaccaaaaagcgcaaactggagtccactgagagccgcagcagcttctcacagcacgcacgcactagcgggcgcgtggccgtggaggaggtggatgaggagggcaagtttgtccggctgcgcaacaagtccaatgaggaccagtccatgggcaattggcagatcaagcgccagaatggagatgatcccttgctgacttaccggttcccaccaaagttcaccctgaaggctgggcaggtggtgacgatctgggctgcaggagctggggccacccacagcccccctaccgacctggtgtggaaggcacagaacacctggggctgcgggaacagcctgcgtacggctctcatcaactccactggggaagaagtggccatggtaagtaggcctgggcctggctgcttgctggacgaggctccccctgatggccaacatcggagccagctgcccccaacccaagtttgccaattcagggcccctttctagagctctctgttgcaggctccagacttctccacccagtaggcaaaccaaaagatgcttcctcaacagcacaaggggtggaagttagacagtgaggattgttaaaggcagagccatactcctacccggagagcttgacagtgtccctctggggtggaaatgagttccttagctccatcaccacagaggacagagtaagcagcaggccggacaaagggcaggccacaagaaaagttgcaggtggtcactggggtagacatgctgtacaacccttccctggccctgacccttggacctggttccatgtccccaccaggaagtggccatgcgcaagctggtgcgctcagtgactgtggttgaggacgacgaggatgaggatggagatgacctgctccatcaccaccacggctcccactgcagcagctcgggggaccccgctgagtacaacctgcgctcgcgcaccgtgctgtgcgggacctgcgggcagcctgccgacaaggcatctgccagcggctcaggagcccaggtgggcggacccatctcctctggctcttctgcctccagtgtcacggtcactcgcagctaccgcagtgtggggggcagtgggggtggcagcttcggggacaatctggtcacccgctcctacctcctgggcaactccagcccccgaacccagagcccccagaactgcagcatcatgtaatctgggacctgccaggcaggggtgggggtggaggcttcctgcgtcctcctcacctcatgcccaccccctgccctgcacgtcatgggagggggcttgaagccaaagaaaaataaccctttggtttttttcttctgtatttttttttctaagagaagttattttctacagtggttttatactgaaggaaaaacacaagcaaaaaaaaaaaaaagcatctatctcatctatctcaatcctaatttctcctcccttccttttccctgcttccaggaaactccacatctgccttaaaaccaaagagggcttcctctagaagccaagggaaaggggtgcttttatagaggctagcttctgcttttctgccctggctgctgcccccaccccggggaccctgtgacatggtgcctgagaggcaggcatagaggcttctccgccagcctcctctggacggcaggctcactgccagggccagcctccgagagggagagagagagagagaggacagcttgagccgggcccctgggcttggccttgctgtgattccactacacctggctgaggttcctctgcctgccccgcccccagtccccacccctgcccccagccccggggtgagtccattctcccaggtaccagctgcgcttgcttttctgtattttatttagacaagagatgggaatgaggtgggaggtggaagaagggagaagaaaggtgagtttgagctgccttccctagctttagaccctgggtgggctctgtgcagtcactggaggttgaagccaagtggggtgctgggaggagggagagggaggtcactggaaaggggagagcctgctggcacccaccgtggaggaggaaggcaagagggggtggaggggtgtggcagtggttttggcaaacgctaaagagcccttgcctccccatttcccatctgcaccccttctctcctccccaaatcaatacactagttgtttcta

SEQ ID NO: 338207 - DNA, 4278 bp, Homo sapiens
  misc_feature (6)..(6): n is a, c, g, or t
agactnacggctagtacgaggccgggtgttaatcggccgagggagcgccgcacctacaccagccaacccagatcccgaggtccgacagcgcccggcccagatccccacgcctgccaggagcaagccgagagccagccggccggcgcactccgactccgagcagtctctgtccttcgacccgagccccgcgccctttccgggacccctgccccgcgggcagcgctgccaacctgccggccatggagaccccgtcccagcggcgcgccacccgcagcggggcgcaggccagctccactccgctgtcgcccacccgcatcacccggctgcaggagaaggaggacctgcaggagctcaatgatcgcttggcggtctacatcgaccgtgtgcgctcgctggaaacggagaacgcagggctgcgccttcgcatcaccgagtctgaagaggtggtcagccgcgaggtgtccggcatcaaggccgcctacgaggccgagctcggggatgcccgcaagacccttgactcagtagccaaggagcgcgcccgcctgcagctggagctgagcaaagtgcgtgaggagtttaaggagctgaaagcgcgcaataccaagaaggagggtgacctgatagctgctcaggctcggctgaaggacctggaggctctgctgaactccaaggaggccgcactgagcactgctctcagtgagaagcgcacgctggagggcgagctgcatgatctgcggggccaggtggccaagcttgaggcagccctaggtgaggccaagaagcaacttcaggatgagatgctgcggcgggtggatgctgagaacaggctgcagaccatgaaggaggaactggacttccagaagaacatctacagtgaggagctgcgtgagaccaagcgccgtcatgagacccgactggtggagattgacaatgggaagcagcgtgagtttgagagccggctggcggatgcgctgcaggaactgcggggcccagcatgaggaccaggtggagcagtataagaaggagctggagaagacttattctgccaagctggacaatgccaggcagtctgctgagaggaacagcaacctggtgggggctgcccacgaggagctgcagcagtcgcgcatccgcatcgacagcctctctgcccagctcagccagctccagaagcagctggcagccaaggaggcgaagcttcgagacctggaggactcactggcccgtgagcgggacaccagccggcggctgctggcggaaaaggagcgggagatggccgagatgcgggcaaggatgcagcagcagctggacgagtaccaggagcttctggacatcaagctggccctggacatggagatccacgcctaccgcaagctcttggagggcgaggaggagaggctacgcctgtcccccagccctacctcgcagcgcagccgtggccgtgcttcctctcactcatcccagacacagggtgggggcagcgtcaccaaaaagcgcaaactggagtccactgagagccgcagcagcttctcacagcacgcacgcactagcgggcgcgtggccgtggaggaggtggatgaggagggcaagtttgtccggctgcgcaacaagtccaatgaggaccagtccatgggcaattggcagatcaagcgccagaatggagatgatcccttgctgacttaccggttcccaccaaagttcaccctgaaggctgggcaggtggtgacgatctgggctgcaggagctggggccacccacagcccccctaccgacctggtgtggaaggcacagaacacctggggctgcgggaacagcctgcgtacggctctcatcaactccactggggaagaagtggccatgcgcaagctggtgcgctcagtgactgtggttgaggacgacgaggatgaggatggagatgacctgctccatcaccaccacgtgagtggtagccgccgctgaggccgagcctgcactggggccacccagccaggcctgggggcagcctctccccagcctccccgtgccaaaaatcttttcattaaagaatgttttggaactttactcgctggcctggcctttcttctctctcctccctataccttgaacagggaacccaggtgtctgggtgccctactctggtaaggaagggagtgggaactttctgatgccatggaatattcctgtgggagcagtggacaagggtctggatttgtcttctgggaaagggaggggaggacagacgtggggcatgcccgccctgcctctctcccccattcttgttgcatgcatatcctctcatttccctcatttttcctgcaagaatgttctctctcattcctgaccgcccctccactccaattaatagtgcatgcctgctgccctacaagcttgctcccgttctctcttcttttcctcttaagctcagagtagctagaacagagtcagagtcactgctctggttctctgtccccaagtcttcctgagccttctccccttttatgtcttccctctcctcctccgggcccctagcctcccaaacccccattgcccgctggctccttgggcacagaaccacaccttcctgcctggcggctgggagcctgcaggagcctggagcctggttgggcctgagtggtcagtcccagactcgccgtcccgcctgagccttgtctcccttcccagggctcccactgcagcagctcgggggaccccgctgagtacaacctgcgctcgcgcaccgtgctgtgcgggacctgcgggcagcctgccgacaaggcatctgccagcggctcaggagcccaggtgggcggacccatctcctctggctcttctgcctccagtgtcacggtcactcgcagctaccgcagtgtggggggcagtgggggtggcagcttcggggacaatctggtcacccgctcctacctcctgggcaactccagcccccgaacccaggtgagttgtctctgctttgtctccaaatcctgcaggcgggtccctggtcatcgaggggtaggacgaggtggccttgcaggggggagagcctgccttctcttccgcagcccgggggagtgggagcctcctccccacagcctgagtcctagacagcccacctctgcatcctgcccctcttgtctgagccccagactggagggcaggggcagggctggagtgtgagggatgggggagatgctacctcccttctaggggccaggggagggagggtctgggtccaggccctgctgctcacacctctctcctctgttttctctcttagagcccccagaactgcagcatcatgtaatctgggacctgccaggcaggggtgggggtggaggcttcctgcgtcctcctcacctcatgcccaccccctgccctgcacgtcatgggagggggcttgaagccaaagaaaaataaccctttggtttttttcttctgtatttttttttctaagagaagttattttctacagtggttttatactgaaggaaaaacacaagcaaaaaaaaaaaaaagcatctatctcatctatctcaatcctaatttctcctcccttccttttccctgcttccaggaaactccacatctgccttaaaaccaaagagggcttcctctagaagccaagggaaaggggtgcttttatagaggctagcttctgcttttctgccctggctgctgcccccaccccggggaccctgtgacatggtgcctgagaggcaggcatagaggcttctccgccagcctcctctggacggcaggctcactgccagggccagcctccgagagggagagagagagagagaggacagcttgagccgggcccctgggcttggccttgctgtgattccactacacctggctgaggttcctctgcctgccccgcccccagtccccacccctgcccccagccccggggtgagtccattctcccaggtaccagctgcgcttgcttttctgtattttatttagacaagagatgggaatgaggtgggaggtggaagaagggagaagaaaggtgagtttgagctgccttccctagctttagaccctgggtgggctctgtgcagtcactggaggttgaagccaagtggggtgctgggaggagggagagggaggtcactggaaaggggagagcctgctggcacccaccgtggaggaggaaggcaagagggggtggaggggtgtggcagtggttttggcaaacgctaaagagcccttgcctccccatttcccatctgcaccccttctctcctccccaaatcaatacactagttgtttcta

SEQ ID NO: 338208 - DNA, 3107 bp, Homo sapiens
  misc_feature (6)..(6): n is a, c, g, or t
agactnacggctagtacgaggccgggtgttaatcggccgagggagcgccgcacctacaccagccaacccagatcccgaggtccgacagcgcccggcccagatccccacgcctgccaggagcaagccgagagccagccggccggcgcactccgactccgagcagtctctgtccttcgacccgagccccgcgccctttccgggacccctgccccgcgggcagcgctgccaacctgccggccatggagaccccgtcccagcggcgcgccacccgcagcggggcgcaggccagctccactccgctgtcgcccacccgcatcacccggctgcaggagaaggaggacctgcaggagctcaatgatcgcttggcggtctacatcgaccgtgtgcgctcgctggaaacggagaacgcagggctgcgccttcgcatcaccgagtctgaagaggtggtcagccgcgaggtgtccggcatcaaggccgcctacgaggccgagctcggggatgcccgcaagacccttgactcagtagccaaggagcgcgcccgcctgcagctggagctgagcaaagtgcgtgaggagtttaaggagctgaaagcgcgcaataccaagaaggagggtgacctgatagctgctcaggctcggctgaaggacctggaggctctgctgaactccaaggaggccgcactgagcactgctctcagtgagaagcgcacgctggagggcgagctgcatgatctgcggggccaggtggccaagcttgaggcagccctaggtgaggccaagaagcaacttcaggatgagatgctgcggcgggtggatgctgagaacaggctgcagaccatgaaggaggaactggacttccagaagaacatctacagtgaggagctgcgtgagaccaagcgccgtcatgagacccgactggtggagattgacaatgggaagcagcgtgagtttgagagccggctggcggatgcgctgcaggaactgcggggcccagcatgaggaccaggtggagcagtataagaaggagctggagaagacttattctgccaagctggacaatgccaggcagtctgctgagaggaacagcaacctggtgggggctgcccacgaggagctgcagcagtcgcgcatccgcatcgacagcctctctgcccagctcagccagctccagaagcagctggcagccaaggaggcgaagcttcgagacctggaggactcactggcccgtgagcgggacaccagccggcggctgctggcggaaaaggagcgggagatggccgagatgcgggcaaggatgcagcagcagctggacgagtaccaggagcttctggacatcaagctggccctggacatggagatccacgcctaccgcaagctcttggagggcgaggaggagaggctacgcctgtcccccagccctacctcgcagcgcagccgtggccgtgcttcctctcactcatcccagacacagggtgggggcagcgtcaccaaaaagcgcaaactggagtccaatgaggaccagtccatgggcaattggcagatcaagcgccagaatggagatgatcccttgctgacttaccggttcccaccaaagttcaccctgaaggctgggcaggtggtgacgatctgggctgcaggagctggggccacccacagcccccctaccgacctggtgtggaaggcacagaacacctggggctgcgggaacagcctgcgtacggctctcatcaactccactggggaagaagtggccatgcgcaagctggtgcgctcagtgactgtggttgaggacgacgaggatgaggatggagatgacctgctccatcaccaccacggctcccactgcagcagctcgggggaccccgctgagtacaacctgcgctcgcgcaccgtgctgtgcgggacctgcgggcagcctgccgacaaggcatctgccagcggctcaggagcccaggtgggcggacccatctcctctggctcttctgcctccagtgtcacggtcactcgcagctaccgcagtgtggggggcagtgggggtggcagcttcggggacaatctggtcacccgctcctacctcctgggcaactccagcccccgaacccagagcccccagaactgcagcatcatgtaatctgggacctgccaggcaggggtgggggtggaggcttcctgcgtcctcctcacctcatgcccaccccctgccctgcacgtcatgggagggggcttgaagccaaagaaaaataaccctttggtttttttcttctgtatttttttttctaagagaagttattttctacagtggttttatactgaaggaaaaacacaagcaaaaaaaaaaaaaagcatctatctcatctatctcaatcctaatttctcctcccttccttttccctgcttccaggaaactccacatctgccttaaaaccaaagagggcttcctctagaagccaagggaaaggggtgcttttatagaggctagcttctgcttttctgccctggctgctgcccccaccccggggaccctgtgacatggtgcctgagaggcaggcatagaggcttctccgccagcctcctctggacggcaggctcactgccagggccagcctccgagagggagagagagagagagaggacagcttgagccgggcccctgggcttggccttgctgtgattccactacacctggctgaggttcctctgcctgccccgcccccagtccccacccctgcccccagccccggggtgagtccattctcccaggtaccagctgcgcttgcttttctgtattttatttagacaagagatgggaatgaggtgggaggtggaagaagggagaagaaaggtgagtttgagctgccttccctagctttagaccctgggtgggctctgtgcagtcactggaggttgaagccaagtggggtgctgggaggagggagagggaggtcactggaaaggggagagcctgctggcacccaccgtggaggaggaaggcaagagggggtggaggggtgtggcagtggttttggcaaacgctaaagagcccttgcctccccatttcccatctgcaccccttctctcctccccaaatcaatacactagttgtttcta

SEQ ID NO: 338209 - DNA, 3063 bp, Homo sapiens
  misc_feature (6)..(6): n is a, c, g, or t
agactnacggctagtacgaggccgggtgttaatcggccgagggagcgccgcacctacaccagccaacccagatcccgaggtccgacagcgcccggcccagatccccacgcctgccaggagcaagccgagagccagccggccggcgcactccgactccgagcagtctctgtccttcgacccgagccccgcgccctttccgggacccctgccccgcgggcagcgctgccaacctgccggccatggagaccccgtcccagcggcgcgccacccgcagcggggcgcaggccagctccactccgctgtcgcccacccgcatcacccggctgcaggagaaggaggacctgcaggagctcaatgatcgcttggcggtctacatcgaccgtgtgcgctcgctggaaacggagaacgcagggctgcgccttcgcatcaccgagtctgaagaggtggtcagccgcgaggtgtccggcatcaaggccgcctacgaggccgagctcggggatgcccgcaagacccttgactcagtagccaaggagcgcgcccgcctgcagctggagctgagcaaagtgcgtgaggagtttaaggagctgaaagcgcgcaataccaagaaggagggtgacctgatagctgctcaggctcggctgaaggacctggaggctctgctgaactccaaggaggccgcactgagcactgctctcagtgagaagcgcacgctggagggcgagctgcatgatctgcggggccaggtggccaagcttgaggcagccctaggtgaggccaagaagcaacttcaggatgagatgctgcggcgggtggatgctgagaacaggctgcagaccatgaaggaggaactggacttccagaagaacatctacagtgaggagctgcgtgagaccaagcgccgtcatgagacccgactggtggagattgacaatgggaagcagcgtgagtttgagagccggctggcggatgcgctgcaggaactgcggggcccagcatgaggaccaggtggagcagtataagaaggagctggagaagacttattctgccaagctggacaatgccaggcagtctgctgagaggaacagcaacctggtgggggctgcccacgaggagctgcagcagtcgcgcatccgcatcgacagcctctctgcccagctcagccagctccagaagcagctggcagccaaggaggcgaagcttcgagacctggaggactcactggcccgtgagcgggacaccagccggcggctgctggcggaaaaggagcgggagatggccgagatgcgggcaaggatgcagcagcagctggacgagtaccaggagcttctggacatcaagctggccctggacatggagatccacgcctaccgcaagctcttggagggcgaggaggagaggctacgcctgtcccccagccctacctcgcagcgcagccgtggccgtgcttcctctcactcatcccagacacagggtgggggcagcgtcaccaaaaagcgcaaactggagtccactgagagccgcagcagcttctcacagcacgcacgcactagcgggcgcgtggccgtggaggaggtggatgaggagggcaagtttgtccggctgcgcaacaagtccaatgaggaccagtccatgggcaattggcagatcaagcgccagaatggagatgatcccttgctgacttaccggttcccaccaaagttcaccctgaaggctgggcaggtggtgacgatctgggctgcaggagctggggccacccacagcccccctaccgacctggtgtggaaggcacagaacacctggggctgcgggaacagcctgcgtacggctctcatcaactccactggggaagaagtggccatgcgcaagctggtgcgctcagtgactgtggttgaggacgacgaggatgaggatggagatgacctgctccatcaccaccacgtgagtggtagccgccgctgaggccgagcctgcactggggccacccagccaggcctgggggagggagggtctgggtccaggccctgctgctcacacctctctcctctgttttctctcttagagcccccagaactgcagcatcatgtaatctgggacctgccaggcaggggtgggggtggaggcttcctgcgtcctcctcacctcatgcccaccccctgccctgcacgtcatgggagggggcttgaagccaaagaaaaataaccctttggtttttttcttctgtatttttttttctaagagaagttattttctacagtggttttatactgaaggaaaaacacaagcaaaaaaaaaaaaaagcatctatctcatctatctcaatcctaatttctcctcccttccttttccctgcttccaggaaactccacatctgccttaaaaccaaagagggcttcctctagaagccaagggaaaggggtgcttttatagaggctagcttctgcttttctgccctggctgctgcccccaccccggggaccctgtgacatggtgcctgagaggcaggcatagaggcttctccgccagcctcctctggacggcaggctcactgccagggccagcctccgagagggagagagagagagagaggacagcttgagccgggcccctgggcttggccttgctgtgattccactacacctggctgaggttcctctgcctgccccgcccccagtccccacccctgcccccagccccggggtgagtccattctcccaggtaccagctgcgcttgcttttctgtattttatttagacaagagatgggaatgaggtgggaggtggaagaagggagaagaaaggtgagtttgagctgccttccctagctttagaccctgggtgggctctgtgcagtcactggaggttgaagccaagtggggtgctgggaggagggagagggaggtcactggaaaggggagagcctgctggcacccaccgtggaggaggaaggcaagagggggtggaggggtgtggcagtggttttggcaaacgctaaagagcccttgcctccccatttcccatctgcaccccttctctcctccccaaatcaatacactagttgtttcta

SEQ ID NO: 338210 - DNA, 3761 bp, Homo sapiens
  misc_feature (6)..(6): n is a, c, g, or t
agactnacggctagtacgaggccgggtgttaatcggccgagggagcgccgcacctacaccagccaacccagatcccgaggtccgacagcgcccggcccagatccccacgcctgccaggagcaagccgagagccagccggccggcgcactccgactccgagcagtctctgtccttcgacccgagccccgcgccctttccgggacccctgccccgcgggcagcgctgccaacctgccggccatggagaccccgtcccagcggcgcgccacccgcagcggggcgcaggccagctccactccgctgtcgcccacccgcatcacccggctgcaggagaaggaggacctgcaggagctcaatgatcgcttggcggtctacatcgaccgtgtgcgctcgctggaaacggagaacgcagggctgcgccttcgcatcaccgagtctgaagaggtggtcagccgcgaggtgtccggcatcaaggccgcctacgaggccgagctcggggatgcccgcaagacccttgactcagtagccaaggagcgcgcccgcctgcagctggagctgagcaaagtgcgtgaggagtttaaggagctgaaagcgcgcaataccaagaaggagggtgacctgatagctgctcaggctcggctgaaggacctggaggctctgctgaactccaaggaggccgcactgagcactgctctcagtgagaagcgcacgctggagggcgagctgcatgatctgcggggccaggtggccaagcttgaggcagccctaggtgaggccaagaagcaacttcaggatgagatgctgcggcgggtggatgctgagaacaggctgcagaccatgaaggaggaactggacttccagaagaacatctacagtgaggagctgcgtgagaccaagcgccgtcatgagacccgactggtggagattgacaatgggaagcagcgtgagtttgagagccggctggcggatgcgctgcaggaactgcggggcccagcatgaggaccaggtggagcagtataagaaggagctggagaagacttattctgccaagctggacaatgccaggcagtctgctgagaggaacagcaacctggtgggggctgcccacgaggagctgcagcagtcgcgcatccgcatcgacagcctctctgcccagctcagccagctccagaagcagctggcagccaaggaggcgaagcttcgagacctggaggactcactggcccgtgagcgggacaccagccggcggctgctggcggaaaaggagcgggagatggccgagatgcgggcaaggatgcagcagcagctggacgagtaccaggagcttctggacatcaagctggccctggacatggagatccacgcctaccgcaagctcttggagggcgaggaggagaggctacgcctgtcccccagccctacctcgcagcgcagccgtggccgtgcttcctctcactcatcccagacacagggtgggggcagcgtcaccaaaaagcgcaaactggagtccactgagagccgcagcagcttctcacagcacgcacgcactagcgggcgcgtggccgtggaggaggtggatgaggagggcaagtttgtccggctgcgcaacaagtccaatgaggaccagtccatgggcaattggcagatcaagcgccagaatggagatgatcccttgctgacttaccggttcccaccaaagttcaccctgaaggctgggcaggtggtgacgatctgggctgcaggagctggggccacccacagcccccctaccgacctggtgtggaaggcacagaacacctggggctgcgggaacagcctgcgtacggctctcatcaactccactggggaagaagtggccatgcgcaagctggtgcgctcagtgactgtggttgaggacgacgaggatgaggatggagatgacctgctccatcaccaccacgtgagtggtagccgccgctgaggccgagcctgcactggggccacccagccaggcctgggggcagcctctccccagcctccccgtgccaaaaatcttttcattaaagaatgttttggaactttactcgctggcctggcctttcttctctctcctccctataccttgaacagggaacccaggtgtctgggtgccctactctggtaaggaagggagtgggaactttctgatgccatggaatattcctgtgggagcagtggacaagggtctggatttgtcttctgggaaagggaggggaggacagacgtggggcatgcccgccctgcctctctcccccattcttgttgcatgcatatcctctcatttccctcatttttcctgcaagaatgttctctctcattcctgaccgcccctccactccaattaatagtgcatgcctgctgccctacaagcttgctcccgttctctcttcttttcctcttaagctcagagtagctagaacagagtcagagtcactgctctggttctctgtccccaagtcttcctgagccttctccccttttatgtcttccctctcctcctccgggcccctagcctcccaaacccccattgcccgctggctccttgggcacagaaccacaccttcctgcctggcggctgggagcctgcaggagcctggagcctggttgggcctgagtggtcagtcccagactcgccgtcccgcctgagccttgtctcccttcccagggctcccactgcagcagctcgggggaccccgctgagtacaacctgcgctcgcgcaccgtgctgtgcgggacctgcgggcagcctgccgacaaggcatctgccagcggctcaggagcccaggtgggcggacccatctcctctggctcttctgcctccagtgtcacggtcactcgcagctaccgcagtgtggggggcagtgggggtggcagcttcggggacaatctggtcacccgctcctacctcctgggcaactccagcccccgaacccaggtgagttgtctctgctttgtctccaaatcctgcaggcgggtccctggtcatcgaggggtaggacgaggtggccttgcaggggggagagcctgccttctcttccgcagcccgggggagtgggagcctcctccccacagcctgagtcctagacagcccacctctgcatcctgcccctcttgtctgagccccagactggagggcaggggcagggctggagtgtgagggatgggggagatgctacctcccttctaggggccaggggagggagggtctgggtccaggccctgctgctcacacctctctcctctgttttctctcttagagcccccagaactgcagcatcatgtaatctgggacctgccaggcaggggtgggggtggaggcttcctgcgtcctcctcacctcatgcccaccccctgccctgcacgtcatgggagggggcttgaagccaaagaaaaataaccctttggtttttttcttctgtatttttttttctaagagaagttattttctacagtggttttatactgaaggaaaaactcatgccaacaccaaaaagcaaactccagggggttccccgtacccaatagggcccatggtgagtcggcccacaattaacttgcccttctattacaaccgtctagtcttgcgaaaacccctgcggttacccaccctaaatggccttgcagaacttcccccttttgcccgattgccgtaacatccaaacaggcccctaccgatctgcccttccaacaaatgggcaacccttaatgggcgaatggcaaattgaaagcgggaaaattttggta

SEQ ID NO: 338211 - DNA, 3287 bp, Homo sapiens
  misc_feature (6)..(6): n is a, c, g, or t
agactnacggctagtacgaggccgggtgttaatcggccgagggagcgccgcacctacaccagccaacccagatcccgaggtccgacagcgcccggcccagatccccacgcctgccaggagcaagccgagagccagccggccggcgcactccgactccgagcagtctctgtccttcgacccgagccccgcgccctttccgggacccctgccccgcgggcagcgctgccaacctgccggccatggagaccccgtcccagcggcgcgccacccgcagcggggcgcaggccagctccactccgctgtcgcccacccgcatcacccggctgcaggagaaggaggacctgcaggagctcaatgatcgcttggcggtctacatcgaccgtgtgcgctcgctggaaacggagaacgcagggctgcgccttcgcatcaccgagtctgaagaggtggtcagccgcgaggtgtccggcatcaaggccgcctacgaggccgagctcggggatgcccgcaagacccttgactcagtagccaaggagcgcgcccgcctgcagctggagctgagcaaagtgcgtgaggagtttaaggagctgaaagcgcgcaataccaagaaggagggtgacctgatagctgctcaggctcggctgaaggacctggaggctctgctgaactccaaggaggccgcactgagcactgctctcagtgagaagcgcacgctggagggcgagctgcatgatctgcggggccaggtggccaagcttgaggcagccctaggtgaggccaagaagcaacttcaggatgagatgctgcggcgggtggatgctgagaacaggctgcagaccatgaaggaggaactggacttccagaagaacatctacagtgaggagctgcgtgagaccaagcgccgtcatgagacccgactggtggagattgacaatgggaagcagcgtgagtttgagagccggctggcggatgcgctgcaggaactgcggggcccagcatgaggaccaggtggagcagtataagaaggagctggagaagacttattctgccaagctggacaatgccaggcagtctgctgagaggaacagcaacctggtgggggctgcccacgaggagctgcagcagtcgcgcatccgcatcgacagcctctctgcccagctcagccagctccagaagcagctggcagccaaggaggcgaagcttcgagacctggaggactcactggcccgtgagcgggacaccagccggcggctgctggcggaaaaggagcgggagatggccgagatgcgggcaaggatgcagcagcagctggacgagtaccaggagcttctggacatcaagctggccctggacatggagatccacgcctaccgcaagctcttggagggcgaggaggagaggctacgcctgtcccccagccctacctcgcagcgcagccgtggccgtgcttcctctcactcatcccagacacagggtgggggcagcgtcaccaaaaagcgcaaactggagtccactgagagccgcagcagcttctcacagcacgcacgcactagcgggcgcgtggccgtggaggaggtggatgaggagggcaagtttgtccggctgcgcaacaagtccaatgaggaccagtccatgggcaattggcagatcaagcgccagaatggagatgatcccttgctgacttaccggttcccaccaaagttcaccctgaaggctgggcaggtggtgacgatctgggctgcaggagctggggccacccacagcccccctaccgacctggtgtggaaggcacagaacacctggggctgcgggaacagcctgcgtacggctctcatcaactccactggggaagaagtggccatgcgcaagctggtgcgctcagtgactgtggttgaggacgacgaggatgaggatggagatgacctgctccatcaccaccacgtgagtggtagccgccgctgaggccgagcctgcactggggccacccagccaggcctgggggcagcctctccccagcctccccgtgccaaaaatcttttcattaaagaatgttttggaactttactcgctggcctggcctttcttctctctcctccctataccttgaacagggaacccaggtgtctgggtgccctactctggtaaggaagggagtgggaactttctgatgccatggaatattcctgtgggagcagtggacaagggtctggatttgtcttctgggaaagggaggggaggacagacgtggggcatgcccgccctgcctctctcccccattcttgttgcatgcatatcctctcatttccctcatttttcctgcaagaatgttctctctcattcctgaccgcccctccactccaattaatagtgcatgcctgctgccctacaagcttgctcccgttctctcttcttttcctcttaagctcagagtagctagaacagagtcagagtcactgctctggttctctgtccccaagtcttcctgagccttctccccttttatgtcttccctctcctcctccgggcccctagcctcccaaacccccattgcccgctggctccttgggcacagaaccacaccttcctgcctggcggctgggagcctgcaggagcctggagcctggttgggcctgagtggtcagtcccagactcgccgtcccgcctgagccttgtctcccttcccagggctcccactgcagcagctcgggggaccccgctgagtacaacctgcgctcgcgcaccgtgctgtgcgggacctgcgggcagcctgccgacaaggcatctgccagcggctcaggagcccaggtgggcggacccatctcctctggctcttctgcctccagtgtcacggtcactcgcagctaccgcagtgtggggggcagtgggggtggcagcttcggggacaatctggtcacccgctcctacctcctgggcaactccagcccccgaacccagagcccccagaactgcagcatcatacaagagatgggaatgaggtgggaggtggaagaagggagaagaaaggtgagtttgagctgccttccctagctttagaccctgggtgggctctgtgcagtcactggaggttgaagccaagtggggtgctgggaggagggagagggaggtcactggaaaggggagagcctgctggcacccaccgtggaggaggaaggcaagagggggtggaggggtgtggcagtggttttggcaaacgctaaagagcccttgcctccccatttcccatctgcaccccttctctcctccccaaatcaatacactagttgtttcta

SEQ ID NO: 338212 - DNA, 2482 bp, Homo sapiens
  misc_feature (6)..(6): n is a, c, g, or t
agactnacggctagtacgaggccgggtgttaatcggccgagggagcgccgcacctacaccagccaacccagatcccgaggtccgacagcgcccggcccagatccccacgcctgccaggagcaagccgagagccagccggccggcgcactccgactccgagcagtctctgtccttcgacccgagccccgcgccctttccgggacccctgccccgcgggcagcgctgccaacctgccggccatggagaccccgtcccagcggcgcgccacccgcagcggggcgcaggccagctccactccgctgtcgcccacccgcatcacccggctgcaggagaaggaggacctgcaggagctcaatgatcgcttggcggtctacatcgaccgtgtgcgctcgctggaaacggagaacgcagggctgcgccttcgcatcaccgagtctgaagaggtggtcagccgcgaggtgtccggcatcaaggccgcctacgaggccgagctcggggatgcccgcaagacccttgactcagtagccaaggagcgcgcccgcctgcagctggagctgagcaaagtgcgtgaggagtttaaggagctgaaagcgcgcaataccaagaaggagggtgacctgatagctgctcaggctcggctgaaggacctggaggctctgctgaactccaaggaggccgcactgagcactgctctcagtgagaagcgcacgctggagggcgagctgcatgatctgcggggccaggtggccaagcttgaggcagccctaggtgaggccaagaagcaacttcaggatgagatgctgcggcgggtggatgctgagaacaggctgcagaccatgaaggaggaactggacttccagaagaacatctacagtgaggagctgcgtgagaccaagcgccgtcatgagacccgactggtggagattgacaatgggaagcagcgtgagtttgagagccggctggcggatgcgctgcaggaactgcggggcccagcatgaggaccaggtggagcagtataagaaggagctggagaagacttattctgccaagctggacaatgccaggcagtctgctgagaggaacagcaacctggtgggggctgcccacgaggagctgcagcagtcgcgcatccgcatcgacagcctctctgcccagctcagccagctccagaagcagctggcagccaaggaggcgaagcttcgagacctggaggactcactggcccgtgagcgggacaccagccggcggctgctggcggaaaaggagcgggagatggccgagatgcgggcaaggatgcagcagcagctggacgagtaccaggagcttctggacatcaagctggccctggacatggagatccacgcctaccgcaagctcttggagggcgaggaggagaggctacgcctgtcccccagccctacctcgcagcgcagccgtggccgtgcttcctctcactcatcccagacacagggtgggggcagcgtcaccaaaaagcgcaaactggagtccactgagagccgcagcagcttctcacagcacgcacgcactagcgggcgcgtggccgtggaggaggtggatgaggagggcaagtttgtccggctgcgcaacaagtccaatgaggaccagtccatgggcaattggcagatcaagcgccagaatggagatgatcccttgctgacttaccggttcccaccaaagttcaccctgaaggctgggcaggtggtgacgatctgggctgcaggagctggggccacccacagcccccctaccgacctggtgtggaaggcacagaacacctggggctgcgggaacagcctgcgtacggctctcatcaactccactggggaagaagtggccatgcgcaagctggtgcgctcagtgactgtggttgaggacgacgaggatgaggatggagatgacctgctccatcaccaccacggctcccactgcagcagctcgggggaccccgctgagtacaacctgcgctcgcgcaccgtgctgtgcgggacctgcgggcagcctgccgacaaggcatctgccagcggctcaggagcccaggtgggcggacccatctcctctggctcttctgcctccagtgtcacggtcactcgcagctaccgcagtgtggggggcagtgggggtggcagcttcggggacaatctggtcacccgctcctacctcctgggcaactccagcccccgaacccagagcccccagaactgcagcatcatgtaatctgggacctgccaggcaggggtgggggtggaggcttcctgcgtcctcctcacctcatgcccaccccctgccctgcacgtcatgggagggggcttgaagccaaagaaaaataaccctttggtttttttcttctgtatttttttttctaagagaagttattttctacagtggttttatactgaaggaaaaacacaagcaaaaaacaataaaggattttatcaaatcaattaaatcgaaatttctactc

SEQ ID NO: 338213 - DNA, 2785 bp, Homo sapiens
  misc_feature (6)..(6): n is a, c, g, or t
agactnacggctagtacgaggccgggtgttaatcggccgagggagcgccgcacctacaccagccaacccagatcccgaggtccgacagcgcccggcccagatccccacgcctgccaggagcaagccgagagccagccggccggcgcactccgactccgagcagtctctgtccttcgacccgagccccgcgccctttccgggacccctgccccgcgggcagcgctgccaacctgccggccatggagaccccgtcccagcggcgcgccacccgcagcggggcgcaggccagctccactccgctgtcgcccacccgcatcacccggctgcaggagaaggaggacctgcaggagctcaatgatcgcttggcggtctacatcgaccgtgtgcgctcgctggaaacggagaacgcagggctgcgccttcgcatcaccgagtctgaagaggtggtcagccgcgaggtgtccggcatcaaggccgcctacgaggccgagctcggggatgcccgcaagacccttgactcagtagccaaggagcgcgcccgcctgcagctggagctgagcaaagtgcgtgaggagtttaaggagctgaaagcgcgcaataccaagaaggagggtgacctgatagctgctcaggctcggctgaaggacctggaggctctgctgaactccaaggaggccgcactgagcactgctctcagtgagaagcgcacgctggagggcgagctgcatgatctgcggggccaggtggccaagcttgaggcagccctaggtgaggccaagaagcaacttcaggatgagatgctgcggcgggtggatgctgagaacaggctgcagaccatgaaggaggaactggacttccagaagaacatctacagtgaggagctgcgtgagaccaagcgccgtcatgagacccgactggtggagattgacaatgggaagcagcgtgagtttgagagccggctggcggatgcgctgcaggaactgcggggcccagcatgaggaccaggtggagcagtataagaaggagctggagaagacttattctgccaagctggacaatgccaggcagtctgctgagaggaacagcaacctggtgggggctgcccacgaggagctgcagcagtcgcgcatccgcatcgacagcctctctgcccagctcagccagctccagaagcagctggcagccaaggaggcgaagcttcgagacctggaggactcactggcccgtgagcgggacaccagccggcggctgctggcggaaaaggagcgggagatggccgagatgcgggcaaggatgcagcagcagctggacgagtaccaggagcttctggacatcaagctggccctggacatggagatccacgcctaccgcaagctcttggagggcgaggaggagaggctacgcctgtcccccagccctacctcgcagcgcagccgtggccgtgcttcctctcactcatcccagacacagggtgggggcagcgtcaccaaaaagcgcaaactggagtccactgagagccgcagcagcttctcacagcacgcacgcactagcgggcgcgtggccgtggaggaggtggatgaggagggcaagtttgtccggctgcgcaacaagtccaatgaggaccagtccatgggcaattggcagatcaagcgccagaatggagatgatcccttgctgacttaccggttcccaccaaagttcaccctgaaggctgggcaggtggtgacgacaatctggtcacccgctcctacctcctgggcaactccagcccccgaacccagagcccccagaactgcagcatcatgtaatctgggacctgccaggcaggggtgggggtggaggcttcctgcgtcctcctcacctcatgcccaccccctgccctgcacgtcatgggagggggcttgaagccaaagaaaaataaccctttggtttttttcttctgtatttttttttctaagagaagttattttctacagtggttttatactgaaggaaaaacacaagcaaaaaaaaaaaaaagcatctatctcatctatctcaatcctaatttctcctcccttccttttccctgcttccaggaaactccacatctgccttaaaaccaaagagggcttcctctagaagccaagggaaaggggtgcttttatagaggctagcttctgcttttctgccctggctgctgcccccaccccggggaccctgtgacatggtgcctgagaggcaggcatagaggcttctccgccagcctcctctggacggcaggctcactgccagggccagcctccgagagggagagagagagagagaggacagcttgagccgggcccctgggcttggccttgctgtgattccactacacctggctgaggttcctctgcctgccccgcccccagtccccacccctgcccccagccccggggtgagtccattctcccaggtaccagctgcgcttgcttttctgtattttatttagacaagagatgggaatgaggtgggaggtggaagaagggagaagaaaggtgagtttgagctgccttccctagctttagaccctgggtgggctctgtgcagtcactggaggttgaagccaagtggggtgctgggaggagggagagggaggtcactggaaaggggagagcctgctggcacccaccgtggaggaggaaggcaagagggggtggaggggtgtggcagtggttttggcaaacgctaaagagcccttgcctccccatttcccatctgcaccccttctctcctccccaaatcaatacactagttgtttcta

SEQ ID NO: 338214 - DNA, 3174 bp, Homo sapiens
tgtcatgttagttaagcaggcaagaaatcctagatcccgaggtccgacagcgcccggcccagatccccacgcctgccaggagcaagccgagagccagccggccggcgcactccgactccgagcagtctctgtccttcgacccgagccccgcgccctttccgggacccctgccccgcgggcagcgctgccaacctgccggccatggagaccccgtcccagcggcgcgccacccgcagcggggcgcaggccagctccactccgctgtcgcccacccgcatcacccggctgcaggagaaggaggacctgcaggagctcaatgatcgcttggcggtctacatcgaccgtgtgcgctcgctggaaacggagaacgcagggctgcgccttcgcatcaccgagtctgaagaggtggtcagccgcgaggtgtccggcatcaaggccgcctacgaggccgagctcggggatgcccgcaagacccttgactcagtagccaaggagcgcgcccgcctgcagctggagctgagcaaagtgcgtgaggagtttaaggagctgaaagcgcgcaataccaagaaggagggtgacctgatagctgctcaggctcggctgaaggacctggaggctctgctgaactccaaggaggccgcactgagcactgctctcagtgagaagcgcacgctggagggcgagctgcatgatctgcggggccaggtggccaagcttgaggcagccctaggtgaggccaagaagcaacttcaggatgagatgctgcggcgggtggatgctgagaacaggctgcagaccatgaaggaggaactggacttccagaagaacatctacagtgaggagctgcgtgagaccaagcgccgtcatgagacccgactggtggagattgacaatgggaagcagcgtgagtttgagagccggctggcggatgcgctgcaggaactgcggggcccagcatgaggaccaggtggagcagtataagaaggagctggagaagacttattctgccaagctggacaatgccaggcagtctgctgagaggaacagcaacctggtgggggctgcccacgaggagctgcagcagtcgcgcatccgcatcgacagcctctctgcccagctcagccagctccagaagcagctggcagccaaggaggcgaagcttcgagacctggaggactcactggcccgtgagcgggacaccagccggcggctgctggcggaaaaggagcgggagatggccgagatgcgggcaaggatgcagcagcagctggacgagtaccaggagcttctggacatcaagctggccctggacatggagatccacgcctaccgcaagctcttggagggcgaggaggagaggctacgcctgtcccccagccctacctcgcagcgcagccgtggccgtgcttcctctcactcatcccagacacagggtgggggcagcgtcaccaaaaagcgcaaactggagtccactgagagccgcagcagcttctcacagcacgcacgcactagcgggcgcgtggccgtggaggaggtggatgaggagggcaagtttgtccggctgcgcaacaagtccaatgaggaccagtccatgggcaattggcagatcaagcgccagaatggagatgatcccttgctgacttaccggttcccaccaaagttcaccctgaaggctgggcaggtggtgacgatctgggctgcaggagctggggccacccacagcccccctaccgacctggtgtggaaggcacagaacacctggggctgcgggaacagcctgcgtacggctctcatcaactccactggggaagaagtggccatgcgcaagctggtgcgctcagtgactgtggttgaggacgacgaggatgaggatggagatgacctgctccatcaccaccacggctcccactgcagcagctcgggggaccccgctgagtacaacctgcgctcgcgcaccgtgctgtgcgggacctgcgggcagcctgccgacaaggcatctgccagcggctcaggagcccaggtgggcggacccatctcctctggctcttctgcctccagtgtcacggtcactcgcagctaccgcagtgtggggggcagtgggggtggcagcttcggggacaatctggtcacccgctcctacctcctgggcaactccagcccccgaacccagagcccccagaactgcagcatcatgtaatctgggacctgccaggcaggggtgggggtggaggcttcctgcgtcctcctcacctcatgcccaccccctgccctgcacgtcatgggagggggcttgaagccaaagaaaaataaccctttggtttttttcttctgtatttttttttctaagagaagttattttctacagtggttttatactgaaggaaaaacacaagcaaaaaaaaaaaaaagcatctatctcatctatctcaatcctaatttctcctcccttccttttccctgcttccaggaaactccacatctgccttaaaaccaaagagggcttcctctagaagccaagggaaaggggtgcttttatagaggctagcttctgcttttctgccctggctgctgcccccaccccggggaccctgtgacatggtgcctgagaggcaggcatagaggcttctccgccagcctcctctggacggcaggctcactgccagggccagcctccgagagggagagagagagagagaggacagcttgagccgggcccctgggcttggccttgctgtgattccactacacctggctgaggttcctctgcctgccccgcccccagtccccacccctgcccccagccccggggtgagtccattctcccaggtaccagctgcgcttgcttttctgtattttatttagacaagagatgggaatgaggtgggaggtggaagaagggagaagaaaggtgagtttgagctgccttccctagctttagaccctgggtgggctctgtgcagtcactggaggttgaagccaagtggggtgctgggaggagggagagggaggtcactggaaaggggagagcctgctggcacccaccgtggaggaggaaggcaagagggggtggaggggtgtggcagtggttttggcaaacgctaaagagcccttgcctccccatttcccatctgcaccccttctctcctccccaaatcaatacactagttgtttcta

SEQ ID NO: 338215 - DNA, 2494 bp, Homo sapiens
  misc_feature (6)..(6): n is a, c, g, or t
agactnacggctagtacgaggccgggtgttaatcggccgagggagcgccgcacctacaccagccaacccagatcccgaggtccgacagcgcccggcccagatccccacgcctgccaggagcaagccgagagccagccggccggcgcactccgactccgagcagtctctgtccttcgacccgagccccgcgccctttccgggacccctgccccgcgggcagcgctgccaacctgccggccatggagaccccgtcccagcggcgcgccacccgcagcggggcgcaggccagctccactccgctgtcgcccacccgcatcacccggctgcaggagaaggaggacctgcaggagctcaatgatcgcttggcggtctacatcgaccgtgtgcgctcgctggaaacggagaacgcagggctgcgccttcgcatcaccgagtctgaagaggtggtcagccgcgaggtgtccggcatcaaggccgcctacgaggccgagctcggggatgcccgcaagacccttgactcagtagccaaggagcgcgcccgcctgcagctggagctgagcaaagtgcgtgaggagtttaaggagctgaaagcgcgcaataccaagaaggagggtgacctgatagctgctcaggctcggctgaaggacctggaggctctgctgaactccaaggaggccgcactgagcactgctctcagtgagaagcgcacgctggagggcgagctgcatgatctgcggggccaggtggccaagcttgaggcagccctaggtgaggccaagaagcaacttcaggatgagatgctgcggcgggtggatgctgagaacaggctgcagaccatgaaggaggaactggacttccagaagaacatctacagtgaggagctgcgtgagaccaagcgccgtcatgagacccgactggtggagattgacaatgggaagcagcgtgagtttgagagccggctggcggatgcgctgcaggaactgcggggcccagcatgaggaccaggtggagcagtataagaaggagctggagaagacttattctgccaagctggacaatgccaggcagtctgctgagaggaacagcaacctggtgggggctgcccacgaggagctgcagcagtcgcgcatccgcatcgacagcctctctgcccagctcagccagctccagaagcagctggcagccaaggaggcgaagcttcgagacctggaggactcactggcccgtgagcgggacaccagccggcggctgctggcggaaaaggagcgggagatggccgagatgcgggcaaggatgcagcagcagctggacgagtaccaggagcttctggacatcaagctggccctggacatggagatccacgcctaccgcaagctcttggagggcgaggaggagaggctacgcctgtcccccagccctacctcgcagcgcagccgtggccgtgcttcctctcactcatcccagacacagggtgggggcagcgtcaccaaaaagcgcaaactggagtccactgagagccgcagcagcttctcacagcacgcacgcactagcgggcgcgtggccgtggaggaggtggatgaggagggcaagtttgtccggctgcgcaacaagtccaatgaggaccagtccatgggcaattggcagatcaagcgccagaatggagatgatcccttgctgacttaccggttcccaccaaagttcaccctgaaggctgggcaggtggtgacgatctgggctgcaggagctggggccacccacagcccccctaccgacctggtgtggaaggcacagaacacctggggctgcgggaacagcctgcgtacggctctcatcaactccactggggaagaagtggccatggtaagtaggcctgggcctggctgcttgctggacgaggctccccctgatggccaacatcggagccagctgcccccaacccaagtttgccaattcagggcccctttctagagctctctgttgcaggctccagacttctccacccagtaggcaaaccaaaagatgcttcctcaacagcacaaggggtggaagttagacagtgaggattgttaaaggcagagccatactcctacccggagagcttgacagtgtccctctggggtggaaatgagttccttagctccatcaccacagaggacagagtaagcagcaggccggacaaagggcaggccacaagaaaagttgcaggtggtcactggggtagacatgctgtacaacccttccctggccctgacccttggacctggttccatgtccccaccaggaagtggccatgcgcaagctggtgcgctcagtgactgtggttgaggacgacgaggatgaggatggagatgacctgctccatcaccaccacgtgagtggtagccgccgctgaggccgagcctgcactggggccacccagccaggcctgggggcagcctctccccagcctccccgtgccaaaaatcttttcattaaagaatgttttggaacttta

SEQ ID NO: 338216 - DNA, 1819 bp, Homo sapiens
  misc_feature (6)..(6): n is a, c, g, or t
  misc_feature (1768)..(1768): n is a, c, g, or t
  misc_feature (1807)..(1807): n is a, c, g, or t
agactnacggctagtacgaggccgggtgttaatcggccgagggagcgccgcacctacaccagccaacccagatcccgaggtccgacagcgcccggcccagatccccacgcctgccaggagcaagccgagagccagccggccggcgcactccgactccgagcagtctctgtccttcgacccgagccccgcgccctttccgggacccctgccccgcgggcagcgctgccaacctgccggccatggagaccccgtcccagcggcgcgccacccgcagcggggcgcaggccagctccactccgctgtcgcccacccgcatcacccggctgcaggagaaggaggacctgcaggagctcaatgatcgcttggcggtctacatcgaccgtgtgcgctcgctggaaacggagaacgcagggctgcgccttcgcatcaccgagtctgaagaggtggtcagccgcgaggtgtccggcatcaaggccgcctacgaggccgagctcggggatgcccgcaagacccttgactcagtagccaaggagcgcgcccgcctgcagctggagctgagcaaagtgcgtgaggagtttaaggagctgaaagcgcgcaataccaagaaggagggtgacctgatagctgctcaggctcggctgaaggacctggaggctctgctgaactccaaggaggccgcactgagcactgctctcagtgagaagcgcacgctggagggcgagctgcatgatctgcggggccaggtggccaagcttgaggcagccctaggtgaggccaagaagcaacttcaggatgagatgctgcggcgggtggatgctgagaacaggctgcagaccatgaaggaggaactggacttccagaagaacatctacagtgaggagctgcgtgagaccaagcgccgtcatgagacccgactggtggagattgacaatgggaagcagcgtgagtttgagagccggctggcggatgcgctgcaggaactgcggggcccagcatgaggaccaggtggagcagtataagaaggagctggagaagacttattctgccaagctggacaatgccaggcagtctgctgagaggaacagcaacctggtgggggctgcccacgaggagctgcagcagtcgcgcatccgcatcgacagcctctctgcccagctcagccagctccagaagcagctggcagccaaggaggcgaagcttcgagacctggaggactcactggcccgtgagcgggacaccagccggcggctgctggcggaaaaggagcgggagatggccgagatgcgggcaaggatgcagcagcagctggacgagtaccaggagcttctggacatcaagctggccctggacatggagatccacgcctaccgcaagctcttggagggcgaggaggagaggctacgcctgtcccccagccctacctcgcagcgcagccgtggccgtgcttcctctcactcatcccagacacagggtgggggcagcgtcaccaaaaagcgcaaactggagtccactgagagccgcagcagcttctcacagcacgcacgcactagcgggcgcgtggccgtggaggaggtggatgaggagggcaagtttgtccggctgcgcaacaagtccaatgaggaccagtccatgggcaattggcagatcaagcgccagaatggagatgatcccttgctgacttaccggttcccaccaaagttcaccctgaaggctgggcaggtggtgacgattctgggcttgcaaggaagctggggggccaacccacaanccccccctaacggacccttggtggtgggaaagggcacangaacaaccttgg

SEQ ID NO: 338217 - DNA, 2060 bp, Homo sapiens
  misc_feature (6)..(6): n is a, c, g, or t
agactnacggctagtacgaggccgggtgttaatcggccgagggagcgccgcacctacaccagccaacccagatcccgaggtccgacagcgcccggcccagatccccacgcctgccaggagcaagccgagagccagccggccggcgcactccgactccgagcagtctctgtccttcgacccgagccccgcgccctttccgggacccctgccccgcgggcagcgctgccaacctgccggccatggagaccccgtcccagcggcgcgccacccgcagcggggcgcaggccagctccactccgctgtcgcccacccgcatcacccggctgcaggagaaggaggacctgcaggagctcaatgatcgcttggcggtctacatcgaccgtgtgcgctcgctggaaacggagaacgcagggctgcgccttcgcatcaccgagtctgaagaggtggtcagccgcgaggtgtccggcatcaaggccgcctacgaggccgagctcggggatgcccgcaagacccttgactcagtagccaaggagcgcgcccgcctgcagctggagctgagcaaagtgcgtgaggagtttaaggagctgaaagcgcgcaataccaagaaggagggtgacctgatagctgctcaggctcggctgaaggacctggaggctctgctgaactccaaggaggccgcactgagcactgctctcagtgagaagcgcacgctggagggcgagctgcatgatctgcggggccaggtggccaagcttgaggcagccctaggtgaggccaagaagcaacttcaggatgagatgctgcggcgggtggatgctgagaacaggctgcagaccatgaaggaggaactggacttccagaagaacatctacagtgaggagctgcgtgagaccaagcgccgtcatgagacccgactggtggagattgacaatgggaagcagcgtgagtttgagagccggctggcggatgcgctgcaggaactgcggggcccagcatgaggaccaggtggagcagtataagaaggagctggagaagacttattctgccaagctggacaatgccaggcagtctgctgagaggaacagcaacctggtgggggctgcccacgaggagctgcagcagtcgcgcatccgcatcgacagcctctctgcccagctcagccagctccagaagcagctggcagccaaggaggcgaagcttcgagacctggaggactcactggcccgtgagcgggacaccagccggcggctgctggcggaaaaggagcgggagatggccgagatgcgggcaaggatgcagcagcagctggacgagtaccaggagcttctggacatcaagctggccctggacatggagatccacgcctaccgcaagctcttggagggcgaggaggagaggctacgcctgtcccccagccctacctcgcagcgcagccgtggccgtgcttcctctcactcatcccaccccggggaccctgtgacatggtgcctgagaggcaggcatagaggcttctccgccagcctcctctggacggcaggctcactgccagggccagcctccgagagggagagagagagagagaggacagcttgagccgggcccctgggcttggccttgctgtgattccactacacctggctgaggttcctctgcctgccccgcccccagtccccacccctgcccccagccccggggtgagtccattctcccaggtaccagctgcgcttgcttttctgtattttatttagacaagagatgggaatgaggtgggaggtggaagaagggagaagaaaggtgagtttgagctgccttccctagctttagaccctgggtgggctctgtgcagtcactggaggttgaagccaagtggggtgctgggaggagggagagggaggtcactggaaaggggagagcctgctggcacccaccgtggaggaggaaggcaagagggggtggaggggtgtggcagtggttttggcaaacgctaaagagcccttgcctccccatttcccatctgcaccccttctctcctccccaaatcaatacactagttgtttcta

SEQ ID NO: 338218 - DNA, 1739 bp, Homo sapiens
  misc_feature (6)..(6): n is a, c, g, or t
agactnacggctagtacgaggccgggtgttaatcggccgagggagcgccgcacctacaccagccaacccagatcccgaggtccgacagcgcccggcccagatccccacgcctgccaggagcaagccgagagccagccggccggcgcactccgactccgagcagtctctgtccttcgacccgagccccgcgccctttccgggacccctgccccgcgggcagcgctgccaacctgccggccatggagaccccgtcccagcggcgcgccacccgcagcggggcgcaggccagctccactccgctgtcgcccacccgcatcacccggctgcaggagaaggaggacctgcaggagctcaatgatcgcttggcggtctacatcgaccgtgtgcgctcgctggaaacggagaacgcagggctgcgccttcgcatcaccgagtctgaagaggtggtcagccgcgaggtgtccggcatcaaggccgcctacgaggccgagctcggggatgcccgcaagacccttgactcagtagccaaggagcgcgcccgcctgcagctggagctgagcaaagtgcgtgaggagtttaaggagctgaaagcgcgcaataccaagaaggagggtgacctgatagctgctcaggctcggctgaaggacctggaggctctgctgaactccaaggaggccgcactgagcactgctctcagtgagaagcgcacgctggagggcgagctgcatgatctgcggggccaggtggccaagcttgaggcagccctaggtgaggccaagaagcaacttcaggatgagatgctgcggcgggtggatgctgagaacaggctgcagaccatgaaggaggaactggacttccagaagaacatctacagtgaggagctgcgtgagaccaagcgccgtcatgagacccgactggtggagattgacaatgggaagcagcgtgagtttgagagccggctggcggatgcgctgcaggaactgcggggcccagcatgaggaccaggtggagcagtataagaaggagctggagaagacttattctgccaagctggacaatgccaggcagtctgctgagaggaacagcaacctggtgggggctgcccacgaggagctgcagcagtcgcgcatccgcatcgacagcctctctgcccagctcagccagctccagaagcagctggcagccaaggaggcgaagcttcgagacctggaggactcactggcccgtgagcgggacaccagccggcggctgctggcggaaaaggagcgggagatggccgagatgcgggcaaggatgcagcagcagctggacgagtaccaggagcttctggacatcaagctggccctggacatggagatccacgcctaccgcaagctcttggagggcgaggaggagaggctacgcctgtcccccagccctacctcgcagcgcagccgtggccgtgcttcctctcactcatcccagacacagggtgggggcagcgtcaccaaaaagcgcaaactggagtccactgagagccgcagcagcttctcacagcacgcaagctggtgcgctcagtgactgtggttgaggacgacgaggatgaggatggagatgacctgctccatcaccaccacgtgagtggtagccgccgctgaggccgagcctgcactggggccacccagccaggcctgggggcagcctctccccagcctccccgtgccaaaaatcttttcattaaagaatgttttggaacttta

SEQ ID NO: 338219 - DNA, 1498 bp, Homo sapiens
  misc_feature (6)..(6): n is a, c, g, or t
  misc_feature (1392)..(1392): n is a, c, g, or t
agactnacggctagtacgaggccgggtgttaatcggccgagggagcgccgcacctacaccagccaacccagatcccgaggtccgacagcgcccggcccagatccccacgcctgccaggagcaagccgagagccagccggccggcgcactccgactccgagcagtctctgtccttcgacccgagccccgcgccctttccgggacccctgccccgcgggcagcgctgccaacctgccggccatggagaccccgtcccagcggcgcgccacccgcagcggggcgcaggccagctccactccgctgtcgcccacccgcatcacccggctgcaggagaaggaggacctgcaggagctcaatgatcgcttggcggtctacatcgaccgtgtgcgctcgctggaaacggagaacgcagggctgcgccttcgcatcaccgagtctgaagaggtggtcagccgcgaggtgtccggcatcaaggccgcctacgaggccgagctcggggatgcccgcaagacccttgactcagtagccaaggagcgcgcccgcctgcagctggagctgagcaaagtgcgtgaggagtttaaggagctgaaagcgcgcaataccaagaaggagggtgacctgatagctgctcaggctcggctgaaggacctggaggctctgctgaactccaaggaggccgcactgagcactgctctcagtgagaagcgcacgctggagggcgagctgcatgatctgcggggccaggtggccaagcttgaggcagccctaggtgaggccaagaagcaacttcaggatgagatgctgcggcgggtggatgctgagaacaggctgcagaccatgaaggaggaactggacttccagaagaacatctacagtgaggagctgcgtgagaccaagcgccgtcatgagacccgactggtggagattgacaatgggaagcagcgtgagtttgagagccggctggcggatgcgctgcaggaactgcggggcccagcatgaggaccaggtggagcagtataagaaggagctggagaagacttattctgccaagctggacaatgccaggcagtctgctgagaggaacagcaacctggtgggggctgcccacgaggagctgcagcagtcgcgcatccgcatcgacagcctctctgcccagctcagccagctccagaagcagctggcagccaaggaggcgaagcttcgagacctggaggactcactggcccgtgagcgggacaccagccggcggctgctggcggaaaaggagcgggagatggccgagatgcgggcaaggatgcagcagcagctggacgagtaccaggagcttctggacatcaagctggccctggacatggagatccacgcctaccgcgaagctctggagggcgaaggnggaaaggtacgctgtcccaaggcttaccgggcacggggcgcgttccctcctctcccgcacgggggcccgtcccaccgcactgggccgcgaccggtttcccgccgca

SEQ ID NO: 338220 - DNA, 2620 bp, Homo sapiens
  misc_feature (6)..(6): n is a, c, g, or t
agactnacggctagtacgaggccgggtgttaatcggccgagggagcgccgcacctacaccagccaacccagatcccgaggtccgacagcgcccggcccagatccccacgcctgccaggagcaagccgagagccagccggccggcgcactccgactccgagcagtctctgtccttcgacccgagccccgcgccctttccgggacccctgccccgcgggcagcgctgccaacctgccggccatggagaccccgtcccagcggcgcgccacccgcagcggggcgcaggccagctccactccgctgtcgcccacccgcatcacccggctgcaggagaaggaggacctgcaggagctcaatgatcgcttggcggtctacatcgaccgtgtgcgctcgctggaaacggagaacgcagggctgcgccttcgcatcaccgagtctgaagaggtggtcagccgcgaggtgtccggcatcaaggccgcctacgaggccgagctcggggatgcccgcaagacccttgactcagtagccaaggagcgcgcccgcctgcagctggagctgagcaaagtgcgtgaggagtttaaggagctgaaagcgcgcaataccaagaaggagggtgacctgatagctgctcaggctcggctgaaggacctggaggctctgctgaactccaaggaggccgcactgagcactgctctcagtgagaagcgcacgctggagggcgagctgcatgatctgcggggccaggtggccaagcttgaggcagccctaggtgaggccaagaagctcttggagggcgaggaggagaggctacgcctgtcccccagccctacctcgcagcgcagccgtggccgtgcttcctctcactcatcccagacacagggtgggggcagcgtcaccaaaaagcgcaaactggagtccactgagagccgcagcagcttctcacagcacgcacgcactagcgggcgcgtggccgtggaggaggtggatgaggagggcaagtttgtccggctgcgcaacaagtccaatgaggaccagtccatgggcaattggcagatcaagcgccagaatggagatgatcccttgctgacttaccggttcccaccaaagttcaccctgaaggctgggcaggtggtgacgatctgggctgcaggagctggggccacccacagcccccctaccgacctggtgtggaaggcacagaacacctggggctgcgggaacagcctgcgtacggctctcatcaactccactggggaagaagtggccatgcgcaagctggtgcgctcagtgactgtggttgaggacgacgaggatgaggatggagatgacctgctccatcaccaccacggctcccactgcagcagctcgggggaccccgctgagtacaacctgcgctcgcgcaccgtgctgtgcgggacctgcgggcagcctgccgacaaggcatctgccagcggctcaggagcccaggtgggcggacccatctcctctggctcttctgcctccagtgtcacggtcactcgcagctaccgcagtgtggggggcagtgggggtggcagcttcggggacaatctggtcacccgctcctacctcctgggcaactccagcccccgaacccagagcccccagaactgcagcatcatgtaatctgggacctgccaggcaggggtgggggtggaggcttcctgcgtcctcctcacctcatgcccaccccctgccctgcacgtcatgggagggggcttgaagccaaagaaaaataaccctttggtttttttcttctgtatttttttttctaagagaagttattttctacagtggttttatactgaaggaaaaacacaagcaaaaaaaaaaaaaagcatctatctcatctatctcaatcctaatttctcctcccttccttttccctgcttccaggaaactccacatctgccttaaaaccaaagagggcttcctctagaagccaagggaaaggggtgcttttatagaggctagcttctgcttttctgccctggctgctgcccccaccccggggaccctgtgacatggtgcctgagaggcaggcatagaggcttctccgccagcctcctctggacggcaggctcactgccagggccagcctccgagagggagagagagagagagaggacagcttgagccgggcccctgggcttggccttgctgtgattccactacacctggctgaggttcctctgcctgccccgcccccagtccccacccctgcccccagccccggggtgagtccattctcccaggtaccagctgcgcttgcttttctgtattttatttagacaagagatgggaatgaggtgggaggtggaagaagggagaagaaaggtgagtttgagctgccttccctagctttagaccctgggtgggctctgtgcagtcactggaggttgaagccaagtggggtgctgggaggagggagagggaggtcactggaaaggggagagcctgctggcacccaccgtggaggaggaaggcaagagggggtggaggggtgtggcagtggttttggcaaacgctaaagagcccttgcctccccatttcccatctgcaccccttctctcctccccaaatcaatacactagttgtttcta

SEQ ID NO: 338221 - DNA, 1225 bp, Homo sapiens
  misc_feature (6)..(6): n is a, c, g, or t
agactnacggctagtacgaggccgggtgttaatcggccgagggagcgccgcacctacaccagccaacccagatcccgaggtccgacagcgcccggcccagatccccacgcctgccaggagcaagccgagagccagccggccggcgcactccgactccgagcagtctctgtccttcgacccgagccccgcgccctttccgggacccctgccccgcgggcagcgctgccaacctgccggccatggagaccccgtcccagcggcgcgccacccgcagcggggcgcaggccagctccactccgctgtcgcccacccgcatcacccggctgcaggagaaggaggacctgcaggagctcaatgatcgcttggcggtctacatcgaccgtgtgcgctcgctggaaacggagaacgcagggctgcgccttcgcatcaccgagtctgaagaggtggtcagccgcgaggtgtccggcatcaaggccgcctacgaggccgagctcggggatgcccgcaagacccttgactcagtagccaaggagcgcgcccgcctgcagctggagctgagcaaagtgcgtgaggagtttaaggagctgaaagcgcgcaataccaagaaggagggtgacctgatagctgctcaggctcggctgaaggacctggaggctctgctgaactccaaggaggccgcactgagcactgctctcagtgagaagcgcacgctggagggcgagctgcatgatctgcggggccaggtggccaagcttgaggcagccctaggtgaggccaagaagcaacttcaggatgagatgctgcggcgggtggatgctgagaacaggctgcagaccatgaaggaggaactggacttccagaagaacatctacagtgaggagctgcgtgagaccaagcgccgtcatgagacccgactggtggagattgacaatgggaagcagcgtgagtttgagagccggctggcggatgcgctgcaggaactgcggggcccagcatgaggaccaggtggagcagtataagaaggcgcaagctggtgcgctcagtgactgtggttgaggacgacgaggatgaggatggagatgacctgctccatcaccaccacgtgagtggtagccgccgctgaggccgagcctgcactggggccacccagccaggcctgggggcagcctctccccagcctccccgtgccaaaaatcttttcattaaagaatgttttggaacttta

SEQ ID NO: 338222 - DNA, 1048 bp, Homo sapiens
  misc_feature (6)..(6): n is a, c, g, or t
  misc_feature (920)..(920): n is a, c, g, or t
  misc_feature (924)..(924): n is a, c, g, or t
  misc_feature (927)..(927): n is a, c, g, or t
  misc_feature (930)..(930): n is a, c, g, or t
  misc_feature (941)..(941): n is a, c, g, or t
  misc_feature (944)..(944): n is a, c, g, or t
agactnacggctagtacgaggccgggtgttaatcggccgagggagcgccgcacctacaccagccaacccagatcccgaggtccgacagcgcccggcccagatccccacgcctgccaggagcaagccgagagccagccggccggcgcactccgactccgagcagtctctgtccttcgacccgagccccgcgccctttccgggacccctgccccgcgggcagcgctgccaacctgccggccatggagaccccgtcccagcggcgcgccacccgcagcggggcgcaggccagctccactccgctgtcgcccacccgcatcacccggctgcaggagaaggaggacctgcaggagctcaatgatcgcttggcggtctacatcgaccgtgtgcgctcgctggaaacggagaacgcagggctgcgccttcgcatcaccgagtctgaagaggtggtcagccgcgaggtgtccggcatcaaggccgcctacgaggccgagctcggggatgcccgcaagacccttgactcagtagccaaggagcgcgcccgcctgcagctggagctgagcaaagtgcgtgaggagtttaaggagctgaaagcgcgcaataccaagaaggagggtgacctgatagctgctcaggctcggctgaaggacctggaggctctgctgaactccaaggaggccgcactgagcactgctctcagtgagaagcgcacgctggagggcgagctgcatgatctgcggggccaggtggccaagcttgaggcagccctaggtgaggccaagaagcaacttcaggatgagatgctgcggcgggtggatgctgagaacaggctgcagaccatgaaggaggaactggacttccagaagaacatctacagtgaggagctgcgtgagaccaagcgcgtctgaagaccgactggtggngatngcnacnggacaccgganttnaaaccggtggggattccctgggactgctgccccctgggaccgtgggccttaaagggcggaaactttttgccccggaatgccggtttttgggacccccttgggcc

SEQ ID NO: 338223 - DNA, 897 bp, Homo sapiens
  misc_feature (6)..(6): n is a, c, g, or t
  misc_feature (841)..(841): n is a, c, g, or t
  misc_feature (843)..(843): n is a, c, g, or t
  misc_feature (845)..(845): n is a, c, g, or t
  misc_feature (851)..(851): n is a, c, g, or t
agactnacggctagtacgaggccgggtgttaatcggccgagggagcgccgcacctacaccagccaacccagatcccgaggtccgacagcgcccggcccagatccccacgcctgccaggagcaagccgagagccagccggccggcgcactccgactccgagcagtctctgtccttcgacccgagccccgcgccctttccgggacccctgccccgcgggcagcgctgccaacctgccggccatggagaccccgtcccagcggcgcgccacccgcagcggggcgcaggccagctccactccgctgtcgcccacccgcatcacccggctgcaggagaaggaggacctgcaggagctcaatgatcgcttggcggtctacatcgaccgtgtgcgctcgctggaaacggagaacgcagggctgcgccttcgcatcaccgagtctgaagaggtggtcagccgcgaggtgtccggcatcaaggccgcctacgaggccgagctcggggatgcccgcaagacccttgactcagtagccaaggagcgcgcccgcctgcagctggagctgagcaaagtgcgtgaggagtttaaggagctgaaagcgcgcaataccaagaaggagggtgacctgatagctgctcaggctcggctgaaggacctggaggctctgctgaactccaaggaggccgcactgagcactgctctcagtgagaagcgcacgctggagggcgagctgcatgatctgcggggccaggtggccaagcttgaggcagccctaggtgaggccaagaagcaacttcaggatgagatgctgcggcgggtggatgctgagaacaggctgcagacctgcangngnacggantccgcacacactttcacggagagcacggggacaagcccataacccg

SEQ ID NO: 338224 - DNA, 1113 bp, Homo sapiens
  misc_feature (6)..(6): n is a, c, g, or t
agactnacggctagtacgaggccgggtgttaatcggccgagggagcgccgcacctacaccagccaacccagatcccgaggtccgacagcgcccggcccagatccccacgcctgccaggagcaagccgagagccagccggccggcgcactccgactccgagcagtctctgtccttcgacccgagccccgcgccctttccgggacccctgccccgcgggcagcgctgccaacctgccggccatggagaccccgtcccagcggcgcgccacccgcagcggggcgcaggccagctccactccgctgtcgcccacccgcatcacccggctgcaggagaaggaggacctgcaggagctcaatgatcgcttggcggtctacatcgaccgtgtgcgctcgctggaaacggagaacgcagggctgcgccttcgcatcaccgagtctgaagaggtggtcagccgcgaggtgtccggcatcaaggccgcctacgaggccgagctcggggatgcccgcaagacccttgactcagtagccaaggagcgcgcccgcctgcagctggagctgagcaaagtgcgtgaggagtttaaggagctgaaagcgcgcaataccaagaaggagggtgacctgatagctgctcaggctcggctgaaggacctggaggctctgctgaactccaaggaggccgcactgagcactgctctcagtgagaagcgcacgctggagggcgagctgcatgatctgcggggccaggtggccaagcttgaggcagccctaggtgaggccaagaagtccaatgaggaccagtccagcgcagccgtggccgtgcttcctctcactcatcccagacacagggtgggggcagcgtcaccaaaaagcgcaaactggagtccactgagagccgcagcagcttctcacagcacgcaagctggtgcgctcagtgactgtggttgaggacgacgaggatgaggatggagatgacctgctccatcaccaccacgtgagtggtagccgccgctgaggccgagcctgcactggggccacccagccaggcctgggggcagcctctccccagcctccccgtgccaaaaatcttttcattaaagaatgttttggaacttta

SEQ ID NO: 338225 - DNA, 1551 bp, Homo sapiens
ctagaagccaagggaaaggggtgcttttatagaggctagcttctgcttttctgccctggctgctgcccccagccccggggtgagtccattctcccaggtaccagctgcgcttgcttttctgtattttatttagacaagagatgggaatgaggtgggaggtggaagaagggagaagaaaggtgagtttgagctgccttccctagctttagaccctgggtgggctctgtgcagtcactggaggttgaagccaagtggggtgctgggaggagggagagggaggtcactggaaaggggagagcctgctggcacccaccgtggaggaggaaggcaagagggggtggaggggtgtggcagtggttttggcaaacgctaaagagcccttgcctccccatttcccatctgcaccccttctctcctccccaaatcaatacactagttgtttctaaaaaaaagaaaagcaaaaaaaaaaaagaaaaaaaaaaaaaaagccaatcaacacagaatagaaagagagagatggcatgcaacagacaggagaaacaaatagagacaagagaaggacaacagagggagagcacgagaagaacaaataagcaccgacaatgtccacccagagcgagagaccaacgtgtcatgagtgacaatcgagaagcaaaaagtcaagcgaagcgcggaggcaggatggaggtaggagaggcggcacagccgtcccagagcggggcgagcagtggggcgagcaggcaagcgcgaggcaaacagcgcagtcaaggacagcggaaggaacggagcaaggagcacgaagaagtcagagccgaggggaaggaacggtgacgggagaacgaaggagaagcgagcgaaggaagaacgaaaggggaggcgaggagagagctacgcctgtccccaagcctactctgcaagcgcagccgtggccgtgcttcctctcactcatcccagacacagggtgggggcagcgtcaccaaaaagcgcaaactggagtccactgagagccgcagcagcttctcacagcacgcacgcactagcgggcgcgtggccgtggaggaggtggatgaggagggcaagtttgtccggctgcgcaacaagtccaatgaggaccagtccatgggcaattggcagatcaagcgccagaatggagatgatcccttgctgacttaccggttcccaccaaagttcaccctgaaggctgggcaggtggtgacgatctgggctgcaggagctggggccacccacagcccccctaccgacctggtgtggaaggcacagaacacctggggctgcgggaacagcctgcgtacggctctcatcaactccactggggaagaagtggccatgcgcaagctggtgcgctcagtgactgtggttgaggacgacgaggatgaggatggagatgacctgctccatcaccaccacgtgagtggtagccgccgctgaggccgagcctgcactggggccacccagccaggcctgggggcagcctctccccagcctccccgtgccaaaaatcttttcattaaagaatgttttggaacttta

SEQ ID NO: 338226 - DNA, 1028 bp, Homo sapiens
ccagccccggggtgagtccattctcccaggtaccagctgcgcttgcttttctgtattttatttagacaagaggtgggggtggaggcttcctgcgtcctcctcacctcatgcccaccccctgccctgcacgtcatgggagggggcttgaagccaaagaaaaataaccctttggtttttttcttctgtatttttttttctaagagaagttattttctacagtggttttatactgaaggaaaaacacaagcaaaaaaaaaaaaaagcatctatctcatctatctcaatcctaatttctcctcccttccttttccctgcttccaggaaactccacatctgccttaaaaccaaagagggcttcctctagaagccaagggaaaggggtgcttttatagaggctagcttctgcttttctgccctggctgctgcccccaccccggggaccctgtgacatggtgcctgagaggcaggcatagaggcttctccgccagcctcctctggacggcaggctcactgccagggccagcctccgagagggagagagagagagagaggacagcttgagccgggcccctgggcttggccttgctgtgattccactacacctggctgaggttcctctgcctgccccgcccccagtccccacccctgcccccagccccggggtgagtccattctcccaggtaccagctgcgcttgcttttctgtattttatttagacaagagatgggaatgaggtgggaggtggaagaagggagaagaaaggtgagtttgagctgccttccctagctttagaccctgggtgggctctgtgcagtcactggaggttgaagccaagtggggtgctgggaggagggagagggaggtcactggaaaggggagagcctgctggcacccaccgtggaggaggaaggcaagagggggtggaggggtgtggcagtggttttggcaaacgctaaagagcccttgcctccccatttcccatctgcaccccttctctcctccccaaatcaatacactagttgtttcta

SEQ ID NO: 338227 - DNA, 135 bp, Homo sapiens
cctagaagcggctccagcctcagcgccctcactagggcccaggtatgacttcgctgctcagccagggctccatgctcggcttgcttcctcaggtgtcatctccagcttccgcttgcccctggcttctggcatcca

SEQ ID NO: 338228 - DNA, 299 bp, Homo sapiens
tttcaaggaccttggggaggtgggagcccagccccagaggcaagcagatgcaaaccaacctaatgcaaggatgccctctcctggtaattgcaggcatagcagcgccagcccccatggctgacctcctgggagcctggcactgtctaggcacacagactccttctcttaaatctactctcccctctcttctttagcaataccaagaaggagggtgacctgatagctgctcaggctcggctgaaggacctggaggctctgctgaactccaaggaggccgcactgagcactgctctcagtga

SEQ ID NO: 338229 - DNA, 614 bp, Homo sapiens
gggagggtgcggggagaaggggtagtatgcggaaacagagcgggtatgaagctggctaacgccgcgcgccccctcccaggacccgctcctgccccgcgccggccggtcctgggggcccgcttttttatggaaatgaggagggggggccggggccgggggcggggagccgggagccgtccccgctcgctcactgcggctttctctctcgctcccctctccccgctccctgccgcgctcactctccgcttccccctcccgctctcccagagtcgatcccggagcccggccgcggggagaggttctcggcagagaagacaaagcccgcagcagcgatggggggagagctgggctctgcgtgttgtgggggccaggaaagggtgccaggctggggctggaaccccctggcaaaggatggggtcccctcatccctaaacagcaagccatctcccctcgcccgccccccgcccccccagtctcggagatctcagaggcaccgactgggaagtacacgggaagctctttgagaacagggattggatctagtctactcctgtattctcagcacccagcacaaagtaggtgcttaataaatgtttgctgttcggaaaaaaaaa

SEQ ID NO: 338230 - DNA, 598 bp, Homo sapiens
  misc_feature (17)..(17): n is a, c, g, or t
  misc_feature (20)..(20): n is a, c, g, or t
  misc_feature (23)..(23): n is a, c, g, or t
  misc_feature (27)..(27): n is a, c, g, or t
  misc_feature (30)..(31): n is a, c, g, or t
  misc_feature (36)..(41): n is a, c, g, or t
gcctcgtgccgaatctngcncgngccnaannggcannnnnnagtccactgagagccgcagcagcttctcacagcacgcacgcactagcgggcgcgtggccgtggaggaggtggatgaggagggcaagtttgtccggctgcgcaacaagtccaatgaggaccagtccatgggcaattggcagatcaagcgccagaatggagatgatcccttgctgacttaccggttcccaccaaagttcaccctgaaggctgggcaggtggtgacgatctgggctgcaggagctggggccacccacagcccccctaccgacctggtgtggaaggcacagaacacctggggctgcgggaacagcctgcgtacggctctcatcaactccactggggaagaagtggccatgcgcaagctggtgcgctcagtgactgtggttgaggacgacgaggatgaggatggagatgacctgctccatcaccaccacgtgagtggtagccgccgctgaggccgagcctgcactggggccacccagccaggcctgggggcagcctctccccagcctccccgtgccaaaaatcttttcattaaagaatgttttggaacttta

SEQ ID NO: 338231 - DNA, 3782 bp, Homo sapiens
  misc_feature (6)..(6): n is a, c, g, or t
agactnacggctagtacgaggccgggtgttaatcggccgagggagcgccgcacctacaccagccaacccagatcccgaggtccgacagcgcccggcccagatccccacgcctgccaggagcaagccgagagccagccggccggcgcactccgactccgagcagtctctgtccttcgacccgagccccgcgccctttccgggacccctgccccgcgggcagcgctgccaacctgccggccatggagaccccgtcccagcggcgcgccacccgcagcggggcgcaggccagctccactccgctgtcgcccacccgcatcacccggctgcaggagaaggaggacctgcaggagctcaatgatcgcttggcggtctacatcgaccgtgtgcgctcgctggaaacggagaacgcagggctgcgccttcgcatcaccgagtctgaagaggtggtcagccgcgaggtgtccggcatcaaggccgcctacgaggccgagctcggggatgcccgcaagacccttgactcagtagccaaggagcgcgcccgcctgcagctggagctgagcaaagtgcgtgaggagtttaaggagctgaaagcgcgcaataccaagaaggagggtgacctgatagctgctcaggctcggctgaaggacctggaggctctgctgaactccaaggaggccgcactgagcactgctctcagtgagaagcgcacgctggagggcgagctgcatgatctgcggggccaggtggccaagcttgaggcagccctaggtgaggccaagaagcaacttcaggatgagatgctgcggcgggtggatgctgagaacaggctgcagaccatgaaggaggaactggacttccagaagaacatctacagtgaggagctgcgtgagaccaagcgccgtcatgagacccgactggtggagattgacaatgggaagcagcgtgagtttgagagccggctggcggatgcgctgcaggaactgcggggcccagcatgaggaccaggtggagcagtataagaaggagctggagaagacttattctgccaagctggacaatgccaggcagtctgctgagaggaacagcaacctggtgggggctgcccacgaggagctgcagcagtcgcgcatccgcatcgacagcctctctgcccagctcagccagctccagaagcagctggcagccaaggaggcgaagcttcgagacctggaggactcactggcccgtgagcgggacaccagccggcggctgctggcggaaaaggagcgggagatggccgagatgcgggcaaggatgcagcagcagctggacgagtaccaggagcttctggacatcaagctggccctggacatggagatccacgcctaccgcaagctcttggagggcgaggaggagaggctacgcctgtcccccagccctacctcgcagcgcagccgtggccgtgcttcctctcactcatcccagacacagggtgggggcagcgtcaccaaaaagcgcaaactggagtccactgagagccgcagcagcttctcacagcacgcacgcactagcgggcgcgtggccgtggaggaggtggatgaggagggcaagtttgtccggctgcgcaacaagtccaatgaggaccagtccatgggcaattggcagatcaagcgccagaatggagatgatcccttgctgacttaccggttcccaccaaagttcaccctgaaggctgggcaggtggtgacgatctgggctgcaggagctggggccacccacagcccccctaccgacctggtgtggaaggcacagaacacctggggctgcgggaacagcctgcgtacggctctcatcaactccactggggaagaagtggccatgcgcaagctggtgcgctcagtgactgtggttgaggacgacgaggatgaggatggagatgacctgctccatcaccaccacggctcccactgcagcagctcgggggaccccgctgagtacaacctgcgctcgcgcaccgtgctgtgcgggacctgcgggcagcctgccgacaaggcatctgccagcggctcaggagcccaggtgggcggacccatctcctctggctcttctgcctccagtgtcacggtcactcgcagctaccgcagtgtggggggcagtgggggtggcagcttcggggacaatctggtcacccgctcctacctcctgggcaactccagcccccgaacccagagcccccagaactgcagcatcatgtaatctgggacctgccaggcaggggtgggggtggaggcttcctgcgtcctcctcacctcatgcccaccccctgccctgcacgtcatgggagggggcttgaagccaaagaaaaataaccctttggtttttttcttctgtatttttttttctaagagaagttattttctacagtggttttatactgaaggaaaaacacaagcaaaaaaaaaaaaaagcatctatctcatctatctcaatcctaatttctcctcccttccttttccctgcttccaggaaactccacatctgccttaaaaccaaagagggcttcctctagaagccaagggaaaggggtgcttttatagaggctagcttctgcttttctgccctggctgctgcccccaccccggggaccctgtgacatggtgcctgagaggcaggcatagaggcttctccgccagcctcctctggacggcaggctcactgccagggccagcctccgagagggagagagagagagagaggacagcttgagccgggcccctgggcttggccttgctgtgattccactacacctggctgaggttcctctgcctgccccgcccccagtccccacccctgcccccagccccggggtgagtccattctcccaggtaccagctgcgcttgcttttctgtattttatttagacaagagatgggaatgaggtgggaggtggaagaagggagaagaaaggtgagtttgagctgccttccctagctttagaccctgggtgggctctgtgcagtcactggaggttgaagccaagtggggtgctgggaggagggagagggaggtcactggaaaggggagagcctgctggcacccaccgtggaggaggaaggcaagagggggtggaggggtgtggcagtggttttggcaaacgctaaagagcccttgcctccccatttcccatctgcaccccttctctcctccccaaatcaatacactagttgtttctacccctggctgctgtggtgtctttgttggtggacgtcgctgtgtgtactgaggtgcagactcgtgggcatgcgcgcgcgtacacacacacacacacacacacacacacacacacacacacagcgccgcacggtcactgcatcctcctgctcattgctgcccagccctgccctgctccaggggaaacaattagagatcagagcactttgggtgcacatctgggcactcggtggtggctgagggggaaggctttgatataaccatcaccacccactgtacggctctctcccagtggaagtccttcagagaagcagcacctgaaggagggcatttgctaactaacttccctcgtccaccagcacttactgagtgctttctctgtgctgggccctgagcgaagcatgaatataagacatatgatatagacccagtctgagggtggtgacatatcaggacgtaaggacaaggacacccggtgaggagggaacagaagctgcaggagagggcagaggaaaggagcagttaatgtccctttgtgccatgttgtgctcaggttgggggattgggaaatg

SEQ ID NO: 338232 - DNA, 3956 bp, Homo sapiens
  misc_feature (6)..(6): n is a, c, g, or t
agactnacggctagtacgaggccgggtgttaatcggccgagggagcgccgcacctacaccagccaacccagatcccgaggtccgacagcgcccggcccagatccccacgcctgccaggagcaagccgagagccagccggccggcgcactccgactccgagcagtctctgtccttcgacccgagccccgcgccctttccgggacccctgccccgcgggcagcgctgccaacctgccggccatggagaccccgtcccagcggcgcgccacccgcagcggggcgcaggccagctccactccgctgtcgcccacccgcatcacccggctgcaggagaaggaggacctgcaggagctcaatgatcgcttggcggtctacatcgaccgtgtgcgctcgctggaaacggagaacgcagggctgcgccttcgcatcaccgagtctgaagaggtggtcagccgcgaggtgtccggcatcaaggccgcctacgaggccgagctcggggatgcccgcaagacccttgactcagtagccaaggagcgcgcccgcctgcagctggagctgagcaaagtgcgtgaggagtttaaggagctgaaagcgcgcaataccaagaaggagggtgacctgatagctgctcaggctcggctgaaggacctggaggctctgctgaactccaaggaggccgcactgagcactgctctcagtgagaagcgcacgctggagggcgagctgcatgatctgcggggccaggtggccaagcttgaggcagccctaggtgaggccaagaagcaacttcaggatgagatgctgcggcgggtggatgctgagaacaggctgcagaccatgaaggaggaactggacttccagaagaacatctacagtgaggagctgcgtgagaccaagcgccgtcatgagacccgactggtggagattgacaatgggaagcagcgtgagtttgagagccggctggcggatgcgctgcaggaactgcggggcccagcatgaggaccaggtggagcagtataagaaggagctggagaagacttattctgccaagctggacaatgccaggcagtctgctgagaggaacagcaacctggtgggggctgcccacgaggagctgcagcagtcgcgcatccgcatcgacagcctctctgcccagctcagccagctccagaagcagctggcagccaaggaggcgaagcttcgagacctggaggactcactggcccgtgagcgggacaccagccggcggctgctggcggaaaaggagcgggagatggccgagatgcgggcaaggatgcagcagcagctggacgagtaccaggagcttctggacatcaagctggccctggacatggagatccacgcctaccgcaagctcttggagggcgaggaggagaggctacgcctgtcccccagccctacctcgcagcgcagccgtggccgtgcttcctctcactcatcccagacacagggtgggggcagcgtcaccaaaaagcgcaaactggagtccactgagagccgcagcagcttctcacagcacgcacgcactagcgggcgcgtggccgtggaggaggtggatgaggagggcaagtttgtccggctgcgcaacaagtccaatgaggaccagtccatgggcaattggcagatcaagcgccagaatggagatgatcccttgctgacttaccggttcccaccaaagttcaccctgaaggctgggcaggtggtgacgatctgggctgcaggagctggggccacccacagcccccctaccgacctggtgtggaaggcacagaacacctggggctgcgggaacagcctgcgtacggctctcatcaactccactggggaagaagtggccatgcgcaagctggtgcgctcagtgactgtggttgaggacgacgaggatgaggatggagatgacctgctccatcaccaccacgtgagtggtagccgccgctgaggccgagcctgcactggggccacccagccaggcctgggggcagcctctccccagcctccccgtgccaaaaatcttttcattaaagaatgttttggaactttactcgctggcctggcctttcttctctctcctccctataccttgaacagggaacccaggtgtctgggtgccctactctggtaaggaagggagtgggaactttctgatgccatggaatattcctgtgggagcagtggacaagggtctggatttgtcttctgggaaagggaggggaggacagacgtggggcatgcccgccctgcctctctcccccattcttgttgcatgcatatcctctcatttccctcatttttcctgcaagaatgttctctctcattcctgaccgcccctccactccaattaatagtgcatgcctgctgccctacaagcttgctcccgttctctcttcttttcctcttaagctcagagtagctagaacagagtcagagtcactgctctggttctctgtccccaagtcttcctgagccttctccccttttatgtcttccctctcctcctccgggcccctagcctcccaaacccccattgcccgctggctccttgggcacagaaccacaccttcctgcctggcggctgggagcctgcaggagcctggagcctggttgggcctgagtggtcagtcccagactcgccgtcccgcctgagccttgtctcccttcccagggctcccactgcagcagctcgggggaccccgctgagtacaacctgcgctcgcgcaccgtgctgtgcgggacctgcgggcagcctgccgacaaggcatctgccagcggctcaggagcccaggtgggcggacccatctcctctggctcttctgcctccagtgtcacggtcactcgcagctaccgcagtgtggggggcagtgggggtggcagcttcggggacaatctggtcacccgctcctacctcctgggcaactccagcccccgaacccagagcccccagaactgcagcatcatgtaatctgggacctgccaggcaggggtgggggtggaggcttcctgcgtcctcctcacctcatgcccaccccctgccctgcacgtcatgggagggggcttgaagccaaagaaaaataaccctttggtttttttcttctgtatttttttttctaagagaagttattttctacagtggttttatactgaaggaaaaacacaagcaaaaaaaaaaaaaagcatctatctcatctatctcaatcctaatttctcctcccttccttttccctgcttccaggaaactccacatctgccttaaaaccaaagagggcttcctctagaagccaagggaaaggggtgcttttatagaggctagcttctgcttttctgccctggctgctgcccccaccccggggaccctgtgacatggtgcctgagaggcaggcatagaggcttctccgccagcctcctctggacggcaggctcactgccagggccagcctccgagagggagagagagagagagaggacagcttgagccgggcccctgggcttggccttgctgtgattccactacacctggctgaggttcctctgcctgccccgcccccagtccccacccctgcccccagccccggggtgagtccattctcccaggtaccagctgcgcttgcttttctgtattttatttagacaagagatgggaatgaggtgggaggtggaagaagggagaagaaaggtgagtttgagctgccttccctagctttagaccctgggtgggctctgtgcagtcactggaggttgaagccaagtggggtgctgggaggagggagagggaggtcactggaaaggggagagcctgctggcacccaccgtggaggaggaaggcaagagggggtggaggggtgtggcagtggttttggcaaacgctaaagagcccttgcctccccatttcccatctgcaccccttctctcctccccaaatcaatacactagttgtttcta

SEQ ID NO: 338233 - DNA, 4389 bp, Homo sapiens
  misc_feature (6)..(6): n is a, c, g, or t
agactnacggctagtacgaggccgggtgttaatcggccgagggagcgccgcacctacaccagccaacccagatcccgaggtccgacagcgcccggcccagatccccacgcctgccaggagcaagccgagagccagccggccggcgcactccgactccgagcagtctctgtccttcgacccgagccccgcgccctttccgggacccctgccccgcgggcagcgctgccaacctgccggccatggagaccccgtcccagcggcgcgccacccgcagcggggcgcaggccagctccactccgctgtcgcccacccgcatcacccggctgcaggagaaggaggacctgcaggagctcaatgatcgcttggcggtctacatcgaccgtgtgcgctcgctggaaacggagaacgcagggctgcgccttcgcatcaccgagtctgaagaggtggtcagccgcgaggtgtccggcatcaaggccgcctacgaggccgagctcggggatgcccgcaagacccttgactcagtagccaaggagcgcgcccgcctgcagctggagctgagcaaagtgcgtgaggagtttaaggagctgaaagcgcgcaataccaagaaggagggtgacctgatagctgctcaggctcggctgaaggacctggaggctctgctgaactccaaggaggccgcactgagcactgctctcagtgagaagcgcacgctggagggcgagctgcatgatctgcggggccaggtggccaagcttgaggcagccctaggtgaggccaagaagcaacttcaggatgagatgctgcggcgggtggatgctgagaacaggctgcagaccatgaaggaggaactggacttccagaagaacatctacagtgaggagctgcgtgagaccaagcgccgtcatgagacccgactggtggagattgacaatgggaagcagcgtgagtttgagagccggctggcggatgcgctgcaggaactgcggggcccagcatgaggaccaggtggagcagtataagaaggagctggagaagacttattctgccaagctggacaatgccaggcagtctgctgagaggaacagcaacctggtgggggctgcccacgaggagctgcagcagtcgcgcatccgcatcgacagcctctctgcccagctcagccagctccagaagcagctggcagccaaggaggcgaagcttcgagacctggaggactcactggcccgtgagcgggacaccagccggcggctgctggcggaaaaggagcgggagatggccgagatgcgggcaaggatgcagcagcagctggacgagtaccaggagcttctggacatcaagctggccctggacatggagatccacgcctaccgcaagctcttggagggcgaggaggagaggctacgcctgtcccccagccctacctcgcagcgcagccgtggccgtgcttcctctcactcatcccagacacagggtgggggcagcgtcaccaaaaagcgcaaactggagtccactgagagccgcagcagcttctcacagcacgcacgcactagcgggcgcgtggccgtggaggaggtggatgaggagggcaagtttgtccggctgcgcaacaagtccaatgaggaccagtccatgggcaattggcagatcaagcgccagaatggagatgatcccttgctgacttaccggttcccaccaaagttcaccctgaaggctgggcaggtggtgacgatctgggctgcaggagctggggccacccacagcccccctaccgacctggtgtggaaggcacagaacacctggggctgcgggaacagcctgcgtacggctctcatcaactccactggggaagaagtggccatggtaagtaggcctgggcctggctgcttgctggacgaggctccccctgatggccaacatcggagccagctgcccccaacccaagtttgccaattcagggcccctttctagagctctctgttgcaggctccagacttctccacccagtaggcaaaccaaaagatgcttcctcaacagcacaaggggtggaagttagacagtgaggattgttaaaggcagagccatactcctacccggagagcttgacagtgtccctctggggtggaaatgagttccttagctccatcaccacagaggacagagtaagcagcaggccggacaaagggcaggccacaagaaaagttgcaggtggtcactggggtagacatgctgtacaacccttccctggccctgacccttggacctggttccatgtccccaccaggaagtggccatgcgcaagctggtgcgctcagtgactgtggttgaggacgacgaggatgaggatggagatgacctgctccatcaccaccacgtgagtggtagccgccgctgaggccgagcctgcactggggccacccagccaggcctgggggcagcctctccccagcctccccgtgccaaaaatcttttcattaaagaatgttttggaactttactcgctggcctggcctttcttctctctcctccctataccttgaacagggaacccaggtgtctgggtgccctactctggtaaggaagggagtgggaactttctgatgccatggaatattcctgtgggagcagtggacaagggtctggatttgtcttctgggaaagggaggggaggacagacgtggggcatgcccgccctgcctctctcccccattcttgttgcatgcatatcctctcatttccctcatttttcctgcaagaatgttctctctcattcctgaccgcccctccactccaattaatagtgcatgcctgctgccctacaagcttgctcccgttctctcttcttttcctcttaagctcagagtagctagaacagagtcagagtcactgctctggttctctgtccccaagtcttcctgagccttctccccttttatgtcttccctctcctcctccgggcccctagcctcccaaacccccattgcccgctggctccttgggcacagaaccacaccttcctgcctggcggctgggagcctgcaggagcctggagcctggttgggcctgagtggtcagtcccagactcgccgtcccgcctgagccttgtctcccttcccagggctcccactgcagcagctcgggggaccccgctgagtacaacctgcgctcgcgcaccgtgctgtgcgggacctgcgggcagcctgccgacaaggcatctgccagcggctcaggagcccaggtgggcggacccatctcctctggctcttctgcctccagtgtcacggtcactcgcagctaccgcagtgtggggggcagtgggggtggcagcttcggggacaatctggtcacccgctcctacctcctgggcaactccagcccccgaacccagagcccccagaactgcagcatcatgtaatctgggacctgccaggcaggggtgggggtggaggcttcctgcgtcctcctcacctcatgcccaccccctgccctgcacgtcatgggagggggcttgaagccaaagaaaaataaccctttggtttttttcttctgtatttttttttctaagagaagttattttctacagtggttttatactgaaggaaaaacacaagcaaaaaaaaaaaaaagcatctatctcatctatctcaatcctaatttctcctcccttccttttccctgcttccaggaaactccacatctgccttaaaaccaaagagggcttcctctagaagccaagggaaaggggtgcttttatagaggctagcttctgcttttctgccctggctgctgcccccaccccggggaccctgtgacatggtgcctgagaggcaggcatagaggcttctccgccagcctcctctggacggcaggctcactgccagggccagcctccgagagggagagagagagagagaggacagcttgagccgggcccctgggcttggccttgctgtgattccactacacctggctgaggttcctctgcctgccccgcccccagtccccacccctgcccccagccccggggtgagtccattctcccaggtaccagctgcgcttgcttttctgtattttatttagacaagagatgggaatgaggtgggaggtggaagaagggagaagaaaggtgagtttgagctgccttccctagctttagaccctgggtgggctctgtgcagtcactggaggttgaagccaagtggggtgctgggaggagggagagggaggtcactggaaaggggagagcctgctggcacccaccgtggaggaggaaggcaagagggggtggaggggtgtggcagtggttttggcaaacgctaaagagcccttgcctccccatttcccatctgcaccccttctctcctccccaaatcaatacactagttgtttcta

SEQ ID NO: 338234 - DNA, 3133 bp, Homo sapiens
  misc_feature (6)..(6): n is a, c, g, or t
agactnacggctagtacgaggccgggtgttaatcggccgagggagcgccgcacctacaccagccaacccagatcccgaggtccgacagcgcccggcccagatccccacgcctgccaggagcaagccgagagccagccggccggcgcactccgactccgagcagtctctgtccttcgacccgagccccgcgccctttccgggacccctgccccgcgggcagcgctgccaacctgccggccatggagaccccgtcccagcggcgcgccacccgcagcggggcgcaggccagctccactccgctgtcgcccacccgcatcacccggctgcaggagaaggaggacctgcaggagctcaatgatcgcttggcggtctacatcgaccgtgtgcgctcgctggaaacggagaacgcagggctgcgccttcgcatcaccgagtctgaagaggtggtcagccgcgaggtgtccggcatcaaggccgcctacgaggccgagctcggggatgcccgcaagacccttgactcagtagccaaggagcgcgcccgcctgcagctggagctgagcaaagtgcgtgaggagtttaaggagctgaaagcgcgcaataccaagaaggagggtgacctgatagctgctcaggctcggctgaaggacctggaggctctgctgaactccaaggaggccgcactgagcactgctctcagtgagaagcgcacgctggagggcgagctgcatgatctgcggggccaggtggccaagcttgaggcagccctaggtgaggccaagaagcaacttcaggatgagatgctgcggcgggtggatgctgagaacaggctgcagaccatgaaggaggaactggacttccagaagaacatctacagtgaggagctgcgtgagaccaagcgccgtcatgagacccgactggtggagattgacaatgggaagcagcgtgagtttgagagccggctggcggatgcgctgcaggaactgcggggcccagcatgaggaccaggtggagcagtataagaaggagctggagaagacttattctgccaagctggacaatgccaggcagtctgctgagaggaacagcaacctggtgggggctgcccacgaggagctgcagcagtcgcgcatccgcatcgacagcctctctgcccagctcagccagctccagaagcagctggcagccaaggaggcgaagcttcgagacctggaggactcactggcccgtgagcgggacaccagccggcggctgctggcggaaaaggagcgggagatggccgagatgcgggcaaggatgcagcagcagctggacgagtaccaggagcttctggacatcaagctggccctggacatggagatccacgcctaccgcaagctcttggagggcgaggaggagaggctacgcctgtcccccagccctacctcgcagcgcagccgtggccgtgcttcctctcactcatcccagacacagggtgggggcagcgtcaccaaaaagcgcaaactggagtccactgagagccgcagcagcttctcacagcacgcacgcactagcgggcgcgtggccgtggaggaggtggatgaggagggcaagtttgtccggctgcgcaacaagtccaatgaggaccagtccatgggcaattggcagatcaagcgccagaatggagatgatcccttgctgacttaccggttcccaccaaagttcaccctgaaggctgggcaggtggtgacgatctgggctgcaggagctggggccacccacagcccccctaccgacctggtgtggaaggcacagaacacctggggctgcgggaacagcctgcgtacggctctcatcaactccactggggaagaagtggccatggctcccactgcagcagctcgggggaccccgctgagtacaacctgcgctcgcgcaccgtgctgtgcgggacctgcgggcagcctgccgacaaggcatctgccagcggctcaggagcccaggtgggcggacccatctcctctggctcttctgcctccagtgtcacggtcactcgcagctaccgcagtgtggggggcagtgggggtggcagcttcggggacaatctggtcacccgctcctacctcctgggcaactccagcccccgaacccagagcccccagaactgcagcatcatgtaatctgggacctgccaggcaggggtgggggtggaggcttcctgcgtcctcctcacctcatgcccaccccctgccctgcacgtcatgggagggggcttgaagccaaagaaaaataaccctttggtttttttcttctgtatttttttttctaagagaagttattttctacagtggttttatactgaaggaaaaacacaagcaaaaaaaaaaaaaagcatctatctcatctatctcaatcctaatttctcctcccttccttttccctgcttccaggaaactccacatctgccttaaaaccaaagagggcttcctctagaagccaagggaaaggggtgcttttatagaggctagcttctgcttttctgccctggctgctgcccccaccccggggaccctgtgacatggtgcctgagaggcaggcatagaggcttctccgccagcctcctctggacggcaggctcactgccagggccagcctccgagagggagagagagagagagaggacagcttgagccgggcccctgggcttggccttgctgtgattccactacacctggctgaggttcctctgcctgccccgcccccagtccccacccctgcccccagccccggggtgagtccattctcccaggtaccagctgcgcttgcttttctgtattttatttagacaagagatgggaatgaggtgggaggtggaagaagggagaagaaaggtgagtttgagctgccttccctagctttagaccctgggtgggctctgtgcagtcactggaggttgaagccaagtggggtgctgggaggagggagagggaggtcactggaaaggggagagcctgctggcacccaccgtggaggaggaaggcaagagggggtggaggggtgtggcagtggttttggcaaacgctaaagagcccttgcctccccatttcccatctgcaccccttctctcctccccaaatcaatacactagttgtttcta

SEQ ID NO: 338235 - DNA, 3100 bp, Homo sapiens
  misc_feature (6)..(6): n is a, c, g, or t
agactnacggctagtacgaggccgggtgttaatcggccgagggagcgccgcacctacaccagccaacccagatcccgaggtccgacagcgcccggcccagatccccacgcctgccaggagcaagccgagagccagccggccggcgcactccgactccgagcagtctctgtccttcgacccgagccccgcgccctttccgggacccctgccccgcgggcagcgctgccaacctgccggccatggagaccccgtcccagcggcgcgccacccgcagcggggcgcaggccagctccactccgctgtcgcccacccgcatcacccggctgcaggagaaggaggacctgcaggagctcaatgatcgcttggcggtctacatcgaccgtgtgcgctcgctggaaacggagaacgcagggctgcgccttcgcatcaccgagtctgaagaggtggtcagccgcgaggtgtccggcatcaaggccgcctacgaggccgagctcggggatgcccgcaagacccttgactcagtagccaaggagcgcgcccgcctgcagctggagctgagcaaagtgcgtgaggagtttaaggagctgaaagcgcgcaataccaagaaggagggtgacctgatagctgctcaggctcggctgaaggacctggaggctctgctgaactccaaggaggccgcactgagcactgctctcagtgagaagcgcacgctggagggcgagctgcatgatctgcggggccaggtggccaagcttgaggcagccctaggtgaggccaagaagcaacttcaggatgagatgctgcggcgggtggatgctgagaacaggctgcagaccatgaaggaggaactggacttccagaagaacatctacagtgaggagctgcgtgagaccaagcgccgtcatgagacccgactggtggagattgacaatgggaagcagcgtgagtttgagagccggctggcggatgcgctgcaggaactgcggggcccagcatgaggaccaggtggagcagtataagaaggagctggagaagacttattctgccaagctggacaatgccaggcagtctgctgagaggaacagcaacctggtgggggctgcccacgaggagctgcagcagtcgcgcatccgcatcgacagcctctctgcccagctcagccagctccagaagcagctggcagccaaggaggcgaagcttcgagacctggaggactcactggcccgtgagcgggacaccagccggcggctgctggcggaaaaggagcgggagatggccgagatgcgggcaaggatgcagcagcagctggacgagtaccaggagcttctggacatcaagctggccctggacatggagatccacgcctaccgcaagctcttggagggcgaggaggagaggctacgcctgtcccccagccctacctcgccgcacgcactagcgggcgcgtggccgtggaggaggtggatgaggagggcaagtttgtccggctgcgcaacaagtccaatgaggaccagtccatgggcaattggcagatcaagcgccagaatggagatgatcccttgctgacttaccggttcccaccaaagttcaccctgaaggctgggcaggtggtgacgatctgggctgcaggagctggggccacccacagcccccctaccgacctggtgtggaaggcacagaacacctggggctgcgggaacagcctgcgtacggctctcatcaactccactggggaagaagtggccatgcgcaagctggtgcgctcagtgactgtggttgaggacgacgaggatgaggatggagatgacctgctccatcaccaccacggctcccactgcagcagctcgggggaccccgctgagtacaacctgcgctcgcgcaccgtgctgtgcgggacctgcgggcagcctgccgacaaggcatctgccagcggctcaggagcccaggtgggcggacccatctcctctggctcttctgcctccagtgtcacggtcactcgcagctaccgcagtgtggggggcagtgggggtggcagcttcggggacaatctggtcacccgctcctacctcctgggcaactccagcccccgaacccagagcccccagaactgcagcatcatgtaatctgggacctgccaggcaggggtgggggtggaggcttcctgcgtcctcctcacctcatgcccaccccctgccctgcacgtcatgggagggggcttgaagccaaagaaaaataaccctttggtttttttcttctgtatttttttttctaagagaagttattttctacagtggttttatactgaaggaaaaacacaagcaaaaaaaaaaaaaagcatctatctcatctatctcaatcctaatttctcctcccttccttttccctgcttccaggaaactccacatctgccttaaaaccaaagagggcttcctctagaagccaagggaaaggggtgcttttatagaggctagcttctgcttttctgccctggctgctgcccccaccccggggaccctgtgacatggtgcctgagaggcaggcatagaggcttctccgccagcctcctctggacggcaggctcactgccagggccagcctccgagagggagagagagagagagaggacagcttgagccgggcccctgggcttggccttgctgtgattccactacacctggctgaggttcctctgcctgccccgcccccagtccccacccctgcccccagccccggggtgagtccattctcccaggtaccagctgcgcttgcttttctgtattttatttagacaagagatgggaatgaggtgggaggtggaagaagggagaagaaaggtgagtttgagctgccttccctagctttagaccctgggtgggctctgtgcagtcactggaggttgaagccaagtggggtgctgggaggagggagagggaggtcactggaaaggggagagcctgctggcacccaccgtggaggaggaaggcaagagggggtggaggggtgtggcagtggttttggcaaacgctaaagagcccttgcctccccatttcccatctgcaccccttctctcctccccaaatcaatacactagttgtttcta

SEQ ID NO: 338236 - DNA, 3226 bp, Homo sapiens
  misc_feature (6)..(6): n is a, c, g, or t
agactnacggctagtacgaggccgggtgttaatcggccgagggagcgccgcacctacaccagccaacccagatcccgaggtccgacagcgcccggcccagatccccacgcctgccaggagcaagccgagagccagccggccggcgcactccgactccgagcagtctctgtccttcgacccgagccccgcgccctttccgggacccctgccccgcgggcagcgctgccaacctgccggccatggagaccccgtcccagcggcgcgccacccgcagcggggcgcaggccagctccactccgctgtcgcccacccgcatcacccggctgcaggagaaggaggacctgcaggagctcaatgatcgcttggcggtctacatcgaccgtgtgcgctcgctggaaacggagaacgcagggctgcgccttcgcatcaccgagtctgaagaggtggtcagccgcgaggtgtccggcatcaaggccgcctacgaggccgagctcggggatgcccgcaagacccttgactcagtagccaaggagcgcgcccgcctgcagctggagctgagcaaagtgcgtgaggagtttaaggagctgaaagcgcgcaataccaagaaggagggtgacctgatagctgctcaggctcggctgaaggacctggaggctctgctgaactccaaggaggccgcactgagcactgctctcagtgagaagcgcacgctggagggcgagctgcatgatctgcggggccaggtggccaagcttgaggcagccctaggtgaggccaagaagcaacttcaggatgagatgctgcggcgggtggatgctgagaacaggctgcagaccatgaaggaggaactggacttccagaagaacatctacagtgaggagctgcgtgagaccaagcgccgtcatgagacccgactggtggagattgacaatgggaagcagcgtgagtttgagagccggctggcggatgcgctgcaggaactgcggggcccagcatgaggaccaggtggagcagtataagaaggagctggagaagacttattctgccaagctggacaatgccaggcagtctgctgagaggaacagcaacctggtgggggctgcccacgaggagctgcagcagtcgcgcatccgcatcgacagcctctctgcccagctcagccagctccagaagcagctggcagccaaggaggcgaagcttcgagacctggaggactcactggcccgtgagcgggacaccagccggcggctgctggcggaaaaggagcgggagatggccgagatgcgggcaaggatgcagcagcagctggacgagtaccaggagcttctggacatcaagctggccctggacatggagatccacgcctaccgcaagctcttggagggcgaggaggagaggctacgcctgtcccccagccctacctcgcagcgcagccgtggccgtgcttcctctcactcatcccagacacagggtgggggcagcgtcaccaaaaagcgcaaactggagtccactgagagccgcagcagcttctcacagcacgcacgcactagcgggcgcgtggccgtggaggaggtggatgaggagggcaagtttgtccggctgcgcaacaagtccaatgaggaccagtccatgggcaattggcagatcaagcgccagaatggagatgatcccttgctgacttaccggttcccaccaaagttcaccctgaaggctgggcaggtggtgacgatctgggctgcaggagctggggccacccacagcccccctaccgacctggtgtggaaggcacagaacacctggggctgcgggaacagcctgcgtacggctctcatcaactccactggggaagaagtggccatgcgcaagctggtgcgctcagtgactgtggttgaggacgacgaggatgaggatggagatgacctgctccatcaccaccacgtgagtggtagccgccgctgaggccgagcctgcactggggccacccagccaggcctgggggcagcctctccccagcctccccgtgccaaaaatcttttcattaaagaatgttttggaactttactcgctggcctggcctttcttctctctcctccctataccttgaacagggaacccaggtgtctgggtgccctactctggtaaggaagggagtgggaactttctgatgccatggaatattcctgtgggagcagtggacaagggtctggatttgtcttctgggaaagggaggggaggacagacgtggggcatgcccgccctgcctctctcccccattcttgttgcatgcatatcctctcatttccctcatttttcctgcaagaatgttctctctcattcctgaccgcccctccactccaattaatagtgcatgcctgctgccctacaagcttgctcccgttctctcttcttttcctcttaagctcagagtagctagaacagagtcagagtcactgctctggttctctgtccccaagtcttcctgagccttctccccttttatgtcttccctctcctcctccgggcccctagcctcccaaacccccattgcccgctggctccttgggcacagaaccacaccttcctgcctggcggctgggagcctgcaggagcctggagcctggttgggcctgagtggtcagtcccagactcgccgtcccgcctgagccttgtctcccttcccagggctcccactgcagcagctcgggggaccccgctgagtacaacctgcgctcgcgcaccgtgctgtgcgggacctgcgggcagcctgccgacaaggcatctgccagcggctcaggagcccaggtgggcggacccatctcctctggctcttctgcctccagtgtcacggtcactcgcagctaccgcagtgtggggggcagtgggggtggcagcttcggggacaatctggtcacccgctcctacctcctgggcaactccagcccccgaacccagagcccccagaactgcagcatcatgtaatctgggacctgccaggcaggggtgggggtggaggcttcctgcgtcctcctcacctcatgcccaccccctgccctgcacgtcatgggagggggcttgaagccaaagaaaaataaccctttggtttttttcttctgtatttttttttctaagagaagttattttctacagtggttttatactgaaggaaaaacacaagcaaaaaacaataaaggattttatcaaatcaattaaatcgaaatttctactc

SEQ ID NO: 338237 - DNA, 2733 bp, Homo sapiens
  misc_feature (6)..(6): n is a, c, g, or t
agactnacggctagtacgaggccgggtgttaatcggccgagggagcgccgcacctacaccagccaacccagatcccgaggtccgacagcgcccggcccagatccccacgcctgccaggagcaagccgagagccagccggccggcgcactccgactccgagcagtctctgtccttcgacccgagccccgcgccctttccgggacccctgccccgcgggcagcgctgccaacctgccggccatggagaccccgtcccagcggcgcgccacccgcagcggggcgcaggccagctccactccgctgtcgcccacccgcatcacccggctgcaggagaaggaggacctgcaggagctcaatgatcgcttggcggtctacatcgaccgtgtgcgctcgctggaaacggagaacgcagggctgcgccttcgcatcaccgagtctgaagaggtggtcagccgcgaggtgtccggcatcaaggccgcctacgaggccgagctcggggatgcccgcaagacccttgactcagtagccaaggagcgcgcccgcctgcagctggagctgagcaaagtgcgtgaggagtttaaggagctgaaagcgcgcaataccaagaaggagggtgacctgatagctgctcaggctcggctgaaggacctggaggctctgctgaactccaaggaggccgcactgagcactgctctcagtgagaagcgcacgctggagggcgagctgcatgatctgcggggccaggtggccaagcttgaggcagccctaggtgaggccaagaagcaacttcaggatgagatgctgcggcgggtggatgctgagaacaggctgcagaccatgaaggaggaactggacttccagaagaacatctacagtgaggagctgcgtgagaccaagcgccgtcatgagacccgactggtggagattgacaatgggaagcagcgtgagtttgagagccggctggcggatgcgctgcaggaactgcggggcccagcatgaggaccaggtggagcagtataagaaggagctggagaagacttattctgccaagctggacaatgccaggcagtctgctgagaggaacagcaacctggtgggggctgcccacgaggagctgcagcagtcgcgcatccgcatcgacagcctctctgcccagctcagccagctccagaagcagctggcagccaaggaggcgaagcttcgagacctggaggactcactggcccgtgagcgggacaccagccggcggctgctggcggaaaaggagcgggagatggccgagatgcgggcaaggatgcagcagcagctggacgagtaccaggagcttctggacatcaagctggccctggacatggagatccacgcctaccgcaagctcttggagggcgaggaggagaggctacgcctgtcccccagccctacctcgcagcgcagccgtggccgtgcttcctctcactcatcccagacacagggtgggggcagcgtcaccaaaaagcgcaaactggagtccactgagagccgcagcagcttctcacagcacgcacgcactagcgggcgcgtggccgtggaggaggtggatgaggagggcaagtttgtccggctgcgcaacaagtccaatgaggaccagtccatgggcaattggcagatcaagcgccagaatggagatgatcccttgctgacttaccggttcccaccaaagttcaccctgaaggctgggcaggtggtgacgatctgggctgcaggagctggggccacccacagcccccctaccgacctggtgtggaaggcacagaacacctggggctgcgggaacagcctgcgtacggctctcatcaactccactggggaagaagtggccatgcgcaagctggtgcgctcagtgactgtggttgaggacgacgaggatgaggatggagatgacctgctccatcaccaccacgtgagtggtagccgccgctgaggccgagcctgcactggggccacccagccaggcctgggggcagcctctccccagcctccccgtgccaaaaatcttttcattaaagaatgttttggaactttaacaaaaaaaaaaaaaagggggggccgcccttttttttttttgtgtagttacgtatgtgtttctgttttcgtgttgtcttgtgtagtcttattatagaaatgaggaggagatacaatacgcccaggggggttagtatagatgcacagaacaaatatactagcggtagaacagacaatgttttagcttactaaaaaaaggagagaggagccagccatatataaggcactgcgagccgcacttcctacacacacagccaaacaaatagcagagacacaaactataatacacaaagatagcgagagaggtgcgagacaacagaacacaacgatgcgccgcaggcggcagcacaaacagggcgaatcgcctgagggggagaaaatccaccgagcgcgagagacccaccaacaacacgagtatatatcgcacacttagttgtgttgttttaaaccataaagaaggtgtgtgtgcactccaacatcatccgagcaggaggcgccacaccacaacaccaccaagcaaaaaaaaaacaaaagaaaagacgaagaacaccagaacaaggagggggcggagcgcggcaaacaagaaaaatccccggcggggggggagcacctctgtgagtaggcgaaccgccgaggcatgcgatagagagacaagaaggagggggcgacaaaa

SEQ ID NO: 338238 - DNA, 2399 bp, Homo sapiens
  misc_feature (6)..(6): n is a, c, g, or t
agactnacggctagtacgaggccgggtgttaatcggccgagggagcgccgcacctacaccagccaacccagatcccgaggtccgacagcgcccggcccagatccccacgcctgccaggagcaagccgagagccagccggccggcgcactccgactccgagcagtctctgtccttcgacccgagccccgcgccctttccgggacccctgccccgcgggcagcgctgccaacctgccggccatggagaccccgtcccagcggcgcgccacccgcagcggggcgcaggccagctccactccgctgtcgcccacccgcatcacccggctgcaggagaaggaggacctgcaggagctcaatgatcgcttggcggtctacatcgaccgtgtgcgctcgctggaaacggagaacgcagggctgcgccttcgcatcaccgagtctgaagaggtggtcagccgcgaggtgtccggcatcaaggccgcctacgaggccgagctcggggatgcccgcaagacccttgactcagtagccaaggagcgcgcccgcctgcagctggagctgagcaaagtgcgtgaggagtttaaggagctgaaagcgcgcaataccaagaaggagggtgacctgatagctgctcaggctcggctgaaggacctggaggctctgctgaactccaaggaggccgcactgagcactgctctcagtgagaagcgcacgctggagggcgagctgcatgatctgcggggccaggtggccaagcttgaggcagccctaggtgaggccaagaagcaacttcaggatgagatgctgcggcgggtggatgctgagaacaggctgcagaccatgaaggaggaactggacttccagaagaacatctacagtgaggagctgcgtgagaccaagcgccgtcatgagacccgactggtggagattgacaatgggaagcagcgtgagtttgagagccggctggcggatgcgctgcaggaactgcggggcccagcatgaggaccaggtggagcagtataagaaggagctggagaagacttattctgccaagctggacaatgccaggcagtctgctgagaggaacagcaacctggtgggggctgcccacgaggagctgcagcagtcgcgcatccgcatcgacagcctctctgcccagctcagccagctccagaagcagctggcagccaaggaggcgaagcttcgagacctggaggactcactggcccgtgagcgggacaccagccggcggctgctggcggaaaaggagcgggagatggccgagatgcgggcaaggatgcagcagcagctggacgagtaccaggagcttctggacatcaagctggccctggacatggagatccacgcctaccgcaagctcttggagggcgaggaggagaggctacgcctgtcccccagccctacctcgcagcgcagccgtggccgtgcttcctctcactcatcccagacacagggtgggggcagcgtcaccaaaaagcgcaaactggagtccactgagagccgcagcagcttctcacagcacgcacgcactagcgggcgcgtggccgtggaggaggtggatgaggagggcaagtttgtccggctgcgcaacaagtccaatgaggaccagtccatgggcaattggcagatcaagcgccagaatggagatgatcccttgctgacttaccggttcccaccaaagttcaccctgaaggctgggcaggtggtgacgatctgggctgcaggagctggggccacccacagcccccctaccgacctggtgtggaaggcacagaacacctggggctgcgggaacagcctgcgtacggctctcatcaactccactggggaagaagtggccatgcgcaagctggtgcgctcagtgactgtggttgaggacgacgaggatgaggatggagatgacctgctccatcaccaccacggctcccactgcagcagctcgggggaccccgctgagtacaacctgcgctcgcgcaccgtgctgtgcgggacctgcgggcagcctgccgacaaggcatctgccagcggctcaggagcccaggtgggcggacccatctcctctggctcttctgcctccagtgtcacggtcactcgcagctaccgcagtgtggggggcagtgggggtggcagcttcggggacaatctggtcacccgctcctacctcctgggcaactccagcccccgaacccagagcccccagaactgcagcatcatgtaatctgggacctgccaggcaggggtggtggtctttctgcttatttaataattgtccgttttttcatctaatgtctagttgtcaatttgggccttttttttatccactttggcttcggctttttgggtttaaatccctgtttttttgtgcgattaattctctttttt

SEQ ID NO: 338239 - DNA, 2596 bp, Homo sapiens
  misc_feature (6)..(6): n is a, c, g, or t
agactnacggctagtacgaggccgggtgttaatcggccgagggagcgccgcacctacaccagccaacccagatcccgaggtccgacagcgcccggcccagatccccacgcctgccaggagcaagccgagagccagccggccggcgcactccgactccgagcagtctctgtccttcgacccgagccccgcgccctttccgggacccctgccccgcgggcagcgctgccaacctgccggccatggagaccccgtcccagcggcgcgccacccgcagcggggcgcaggccagctccactccgctgtcgcccacccgcatcacccggctgcaggagaaggaggacctgcaggagctcaatgatcgcttggcggtctacatcgaccgtgtgcgctcgctggaaacggagaacgcagggctgcgccttcgcatcaccgagtctgaagaggtggtcagccgcgaggtgtccggcatcaaggccgcctacgaggccgagctcggggatgcccgcaagacccttgactcagtagccaaggagcgcgcccgcctgcagctggagctgagcaaagtgcgtgaggagtttaaggagctgaaagcgcgcaataccaagaaggagggtgacctgatagctgctcaggctcggctgaaggacctggaggctctgctgaactccaaggaggccgcactgagcactgctctcagtgagaagcgcacgctggagggcgagctgcatgatctgcggggccaggtggccaagcttgaggcagccctaggtgaggccaagaagcaacttcaggatgagatgctgcggcgggtggatgctgagaacaggctgcagaccatgaaggaggaactggacttccagaagaacatctacagtgaggagctgcgtgagaccaagcgccgtcatgagacccgactggtggagattgacaatgggaagcagcgtgagtttgagagccggctggcggatgcgctgcaggaactgcggggcccagcatgaggaccaggtggagcagtataagaaggagctggagaagacttattctgccaagctggacaatgccaggcagtctgctgagaggaacagcaacctggtgggggctgcccacgaggagctgcagcagtcgcgcatccgcatcgacagcctctctgcccagctcagccagctccagaagcagctggcagccaaggaggcgaagcttcgagacctggaggactcactggcccgtgagcgggacaccagccggcggctgctggcggaaaaggagcgggagatggccgagatgcgggcaaggatgcagcagcagctggacgagtaccaggagcttctggacatcaagctggccctggacatggagatccacgcctaccgcaagctcttggagggcgaggaggagaggctacgcctgtcccccagccctacctcgcagcgcagccgtggccgtgcttcctctcactcatcccagacacagggtgggggcagcgtcaccaaaaagcgcaaactggagtccactgagagccgcagcagcttctcacagcagacaatctggtcacccgctcctacctcctgggcaactccagcccccgaacccagagcccccagaactgcagcatcatgtaatctgggacctgccaggcaggggtgggggtggaggcttcctgcgtcctcctcacctcatgcccaccccctgccctgcacgtcatgggagggggcttgaagccaaagaaaaataaccctttggtttttttcttctgtatttttttttctaagagaagttattttctacagtggttttatactgaaggaaaaacacaagcaaaaaaaaaaaaaagcatctatctcatctatctcaatcctaatttctcctcccttccttttccctgcttccaggaaactccacatctgccttaaaaccaaagagggcttcctctagaagccaagggaaaggggtgcttttatagaggctagcttctgcttttctgccctggctgctgcccccaccccggggaccctgtgacatggtgcctgagaggcaggcatagaggcttctccgccagcctcctctggacggcaggctcactgccagggccagcctccgagagggagagagagagagagaggacagcttgagccgggcccctgggcttggccttgctgtgattccactacacctggctgaggttcctctgcctgccccgcccccagtccccacccctgcccccagccccggggtgagtccattctcccaggtaccagctgcgcttgcttttctgtattttatttagacaagagatgggaatgaggtgggaggtggaagaagggagaagaaaggtgagtttgagctgccttccctagctttagaccctgggtgggctctgtgcagtcactggaggttgaagccaagtggggtgctgggaggagggagagggaggtcactggaaaggggagagcctgctggcacccaccgtggaggaggaaggcaagagggggtggaggggtgtggcagtggttttggcaaacgctaaagagcccttgcctccccatttcccatctgcaccccttctctcctccccaaatcaatacactagttgtttcta

SEQ ID NO: 338240 - DNA, 1858 bp, Homo sapiens
  misc_feature (6)..(6): n is a, c, g, or t
  misc_feature (1794)..(1794): n is a, c, g, or t
  misc_feature (1805)..(1805): n is a, c, g, or t
  misc_feature (1813)..(1813): n is a, c, g, or t
  misc_feature (1815)..(1816): n is a, c, g, or t
  misc_feature (1821)..(1821): n is a, c, g, or t
agactnacggctagtacgaggccgggtgttaatcggccgagggagcgccgcacctacaccagccaacccagatcccgaggtccgacagcgcccggcccagatccccacgcctgccaggagcaagccgagagccagccggccggcgcactccgactccgagcagtctctgtccttcgacccgagccccgcgccctttccgggacccctgccccgcgggcagcgctgccaacctgccggccatggagaccccgtcccagcggcgcgccacccgcagcggggcgcaggccagctccactccgctgtcgcccacccgcatcacccggctgcaggagaaggaggacctgcaggagctcaatgatcgcttggcggtctacatcgaccgtgtgcgctcgctggaaacggagaacgcagggctgcgccttcgcatcaccgagtctgaagaggtggtcagccgcgaggtgtccggcatcaaggccgcctacgaggccgagctcggggatgcccgcaagacccttgactcagtagccaaggagcgcgcccgcctgcagctggagctgagcaaagtgcgtgaggagtttaaggagctgaaagcgcgcaataccaagaaggagggtgacctgatagctgctcaggctcggctgaaggacctggaggctctgctgaactccaaggaggccgcactgagcactgctctcagtgagaagcgcacgctggagggcgagctgcatgatctgcggggccaggtggccaagcttgaggcagccctaggtgaggccaagaagcaacttcaggatgagatgctgcggcgggtggatgctgagaacaggctgcagaccatgaaggaggaactggacttccagaagaacatctacagtgaggagctgcgtgagaccaagcgccgtcatgagacccgactggtggagattgacaatgggaagcagcgtgagtttgagagccggctggcggatgcgctgcaggaactgcggggcccagcatgaggaccaggtggagcagtataagaaggagctggagaagacttattctgccaagctggacaatgccaggcagtctgctgagaggaacagcaacctggtgggggctgcccacgaggagctgcagcagtcgcgcatccgcatcgacagcctctctgcccagctcagccagctccagaagcagctggcagccaaggaggcgaagcttcgagacctggaggactcactggcccgtgagcgggacaccagccggcggctgctggcggaaaaggagcgggagatggccgagatgcgggcaaggatgcagcagcagctggacgagtaccaggagcttctggacatcaagctggccctggacatggagatccacgcctaccgcaagctcttggagggcgaggaggagaggctacgcctgtcccccagccctacctcgcagcgcagccgtggccgtgcttcctctcactcatcccagacacagggtgggggcagcgtcaccaaaaagcgcaaactggagtccactgagagccgcagcagcttctcacagcacgcacgcactagcgggcgcgtggccgtggaggaggtggatgaggagggcaagtttgtccggctgcgcaacaagtccaatgaggaccagtccatgggcaattggcagatcaagcgccagaatggagatgatcccttgctgacttaccggttcccaccaaagttcaccctgaaggctgggcaggtggtgacgatctgggctgcaggagctggggccacccaaagcccctacgacctgtgtggagggcagaaactgggntggggacagcnggtaggtncnnatccnggggaaaaggctccggggggccactggttttgcccgc

SEQ ID NO: 338241 - DNA, 1842 bp, Homo sapiens
  misc_feature (6)..(6): n is a, c, g, or t
agactnacggctagtacgaggccgggtgttaatcggccgagggagcgccgcacctacaccagccaacccagatcccgaggtccgacagcgcccggcccagatccccacgcctgccaggagcaagccgagagccagccggccggcgcactccgactccgagcagtctctgtccttcgacccgagccccgcgccctttccgggacccctgccccgcgggcagcgctgccaacctgccggccatggagaccccgtcccagcggcgcgccacccgcagcggggcgcaggccagctccactccgctgtcgcccacccgcatcacccggctgcaggagaaggaggacctgcaggagctcaatgatcgcttggcggtctacatcgaccgtgtgcgctcgctggaaacggagaacgcagggctgcgccttcgcatcaccgagtctgaagaggtggtcagccgcgaggtgtccggcatcaaggccgcctacgaggccgagctcggggatgcccgcaagacccttgactcagtagccaaggagcgcgcccgcctgcagctggagctgagcaaagtgcgtgaggagtttaaggagctgaaagcgcgcaataccaagaaggagggtgacctgatagctgctcaggctcggctgaaggacctggaggctctgctgaactccaaggaggccgcactgagcactgctctcagtgagaagcgcacgctggagggcgagctgcatgatctgcggggccaggtggccaagcttgaggcagccctaggtgaggccaagaagcaacttcaggatgagatgctgcggcgggtggatgctgagaacaggctgcagaccatgaaggaggaactggacttccagaagaacatctacagtgaggagctgcgtgagaccaagcgccgtcatgagacccgactggtggagattgacaatgggaagcagcgtgagtttgagagccggctggcggatgcgctgcaggaactgcggggcccagcatgaggaccaggtggagcagtataagaaggagctggagaagacttattctgccaagctggacaatgccaggcagtctgctgagaggaacagcaacctggtgggggctgcccacgaggagctgcagcagtcgcgcatccgcatcgacagcctctctgcccagctcagccagctccagaagcagctggcagccaaggaggcgaagcttcgagacctggaggactcactggcccgtgagcgggacaccagccggcggctgctggcggaaaaggagcgggagatggccgagatgcgggcaaggatgcagcagcagctggacgagtaccaggagcttctggacatcaagctggccctggacatggagatccacgcctaccgcaagctcttggagggcgaggaggagaggctacgcctgtcccccagccctacctcgcagcgcagccgtggccgtgcttcctctcactcatcccagacacagggtgggggcagcgtcaccaaaaagcgcaaactggagtccactgagagccgcagcagcttctcacagcacagcccccctaccgacctggtgtggaaggcacagaacacctggggctgcgggaacagcctgcgtacggctctcatcaactccactggggaagaagtggccatgcgcaagctggtgcgctcagtgactgtggttgaggacgacgaggatgaggatggagatgacctgctccatcaccaccacgtgagtggtagccgccgctgaggccgagcctgcactggggccacccagccaggcctgggggcagcctctccccagcctccccgtgccaaaaatcttttcattaaagaatgttttggaacttta

SEQ ID NO: 338242 - DNA, 3120 bp, Homo sapiens
  misc_feature (6)..(6): n is a, c, g, or t
agactnacggctagtacgaggccgggtgttaatcggccgagggagcgccgcacctacaccagccaacccagatcccgaggtccgacagcgcccggcccagatccccacgcctgccaggagcaagccgagagccagccggccggcgcactccgactccgagcagtctctgtccttcgacccgagccccgcgccctttccgggacccctgccccgcgggcagcgctgccaacctgccggccatggagaccccgtcccagcggcgcgccacccgcagcggggcgcaggccagctccactccgctgtcgcccacccgcatcacccggctgcaggagaaggaggacctgcaggagctcaatgatcgcttggcggtctacatcgaccgtgtgcgctcgctggaaacggagaacgcagggctgcgccttcgcatcaccgagtctgaagaggtggtcagccgcgaggtgtccggcatcaaggccgcctacgaggccgagctcggggatgcccgcaagacccttgactcagtagccaaggagcgcgcccgcctgcagctggagctgagcaaagtgcgtgaggagtttaaggagctgaaagcgcgcaataccaagaaggagggtgacctgatagctgctcaggctcggctgaaggacctggaggctctgctgaactccaaggaggccgcactgagcactgctctcagtgagaagcgcacgctggagggcgagctgcatgatctgcggggccaggtggccaagcttgaggcagccctaggtgaggccaagaagcaacttcaggatgagatgctgcggcgggtggatgctgagaacaggctgcagaccatgaaggaggaactggacttccagaagaacatctacagtgaggagctgcgtgagaccaagcgccgtcatgagacccgactggtggagattgacaatgggaagcagcgtgagtttgagagccggctggcggatgcgctgcaggaactgcggggcccagcatgaggaccaggtggagcagtataagaaggcgcaagctggtgcgctcagtgactgtggttgaggacgacgaggatgaggatggagatgacctgctccatcaccaccacgtgagtggtagccgccgctgaggccgagcctgcactggggccacccagccaggcctgggggcagcctctccccagcctccccgtgccaaaaatcttttcattaaagaatgttttggaactttactcgctggcctggcctttcttctctctcctccctataccttgaacagggaacccaggtgtctgggtgccctactctggtaaggaagggagtgggaactttctgatgccatggaatattcctgtgggagcagtggacaagggtctggatttgtcttctgggaaagggaggggaggacagacgtggggcatgcccgccctgcctctctcccccattcttgttgcatgcatatcctctcatttccctcatttttcctgcaagaatgttctctctcattcctgaccgcccctccactccaattaatagtgcatgcctgctgccctacaagcttgctcccgttctctcttcttttcctcttaagctcagagtagctagaacagagtcagagtcactgctctggttctctgtccccaagtcttcctgagccttctccccttttatgtcttccctctcctcctccgggcccctagcctcccaaacccccattgcccgctggctccttgggcacagaaccacaccttcctgcctggcggctgggagcctgcaggagcctggagcctggttgggcctgagtggtcagtcccagactcgccgtcccgcctgagccttgtctcccttcccagggctcccactgcagcagctcgggggaccccgctgagtacaacctgcgctcgcgcaccgtgctgtgcgggacctgcgggcagcctgccgacaaggcatctgccagcggctcaggagcccaggtgggcggacccatctcctctggctcttctgcctccagtgtcacggtcactcgcagctaccgcagtgtggggggcagtgggggtggcagcttcggggacaatctggtcacccgctcctacctcctgggcaactccagcccccgaacccagagcccccagaactgcagcatcatgtaatctgggacctgccaggcaggggtgggggtggaggcttcctgcgtcctcctcacctcatgcccaccccctgccctgcacgtcatgggagggggcttgaagccaaagaaaaataaccctttggtttttttcttctgtatttttttttctaagagaagttattttctacagtggttttatactgaaggaaaaacacaagcaaaaaaaaaaaaaagcatctatctcatctatctcaatcctaatttctcctcccttccttttccctgcttccaggaaactccacatctgccttaaaaccaaagagggcttcctctagaagccaagggaaaggggtgcttttatagaggctagcttctgcttttctgccctggctgctgcccccaccccggggaccctgtgacatggtgcctgagaggcaggcatagaggcttctccgccagcctcctctggacggcaggctcactgccagggccagcctccgagagggagagagagagagagaggacagcttgagccgggcccctgggcttggccttgctgtgattccactacacctggctgaggttcctctgcctgccccgcccccagtccccacccctgcccccagccccggggtgagtccattctcccaggtaccagctgcgcttgcttttctgtattttatttagacaagagatgggaatgaggtgggaggtggaagaagggagaagaaaggtgagtttgagctgccttccctagctttagaccctgggtgggctctgtgcagtcactggaggttgaagccaagtggggtgctgggaggagggagagggaggtcactggaaaggggagagcctgctggcacccaccgtggaggaggaaggcaagagggggtggaggggtgtggcagtggttttggcaaacgctaaagagcccttgcctccccatttcccatctgcaccccttctctcctccccaaatcaatacactagttgtttcta

SEQ ID NO: 338243 - DNA, 3104 bp, Homo sapiens
  misc_feature (6)..(6): n is a, c, g, or t
agactnacggctagtacgaggccgggtgttaatcggccgagggagcgccgcacctacaccagccaacccagatcccgaggtccgacagcgcccggcccagatccccacgcctgccaggagcaagccgagagccagccggccggcgcactccgactccgagcagtctctgtccttcgacccgagccccgcgccctttccgggacccctgccccgcgggcagcgctgccaacctgccggccatggagaccccgtcccagcggcgcgccacccgcagcggggcgcaggccagctccactccgctgtcgcccacccgcatcacccggctgcaggagaaggaggacctgcaggagctcaatgatcgcttggcggtctacatcgaccgtgtgcgctcgctggaaacggagaacgcagggctgcgccttcgcatcaccgagtctgaagaggtggtcagccgcgaggtgtccggcatcaaggccgcctacgaggccgagctcggggatgcccgcaagacccttgactcagtagccaaggagcgcgcccgcctgcagctggagctgagcaaagtgcgtgaggagtttaaggagctgaaagcgcgcaataccaagaaggagggtgacctgatagctgctcaggctcggctgaaggacctggaggctctgctgaactccaagaagcaacttcaggatgagatgctgcggcgggtggatgctgagaacaggctgcagaccatgaaggaggaactggacttccagaagaacatctacagtgaggagctgcgtgagaccaagcgccgtcatgagacccgactggtggagattgacaatgggaagcagcgtgagtttgagagccggctggcggatgcgctgcaggaactgcggggcccagcatgaggaccaggtggagcagtataagaaggagctggagaagacttattctgccaagctggacaatgccaggcagtctgctgagaggaacagcaacctggtgggggctgcccacgaggagctgcagcagtcgcgcatccgcatcgacagcctctctgcccagctcagccagctccagaagcagctggcagccaaggaggcgaagcttcgagacctggaggactcactggcccgtgagcgggacaccagccggcggctgctggcggaaaaggagcgggagatggccgagatgcgggcaaggatgcagcagcagctggacgagtaccaggagcttctggacatcaagctggccctggacatggagatccacgcctaccgcaagctcttggagggcgaggaggagaggctacgcctgtcccccagccctacctcgcagcgcagccgtggccgtgcttcctctcactcatcccagacacagggtgggggcagcgtcaccaaaaagcgcaaactggagtccactgagagccgcagcagcttctcacagcacgcacgcactagcgggcgcgtggccgtggaggaggtggatgaggagggcaagtttgtccggctgcgcaacaagtccaatgaggaccagtccatgggcaattggcagatcaagcgccagaatggagatgatcccttgctgacttaccggttcccaccaaagttcaccctgaaggctgggcaggtggtgacgatctgggctgcaggagctggggccacccacagcccccctaccgacctggtgtggaaggcacagaacacctggggctgcgggaacagcctgcgtacggctctcatcaactccactggggaagaagtggccatgcgcaagctggtgcgctcagtgactgtggttgaggacgacgaggatgaggatggagatgacctgctccatcaccaccacggctcccactgcagcagctcgggggaccccgctgagtacaacctgcgctcgcgcaccgtgctgtgcgggacctgcgggcagcctgccgacaaggcatctgccagcggctcaggagcccaggtgggcggacccatctcctctggctcttctgcctccagtgtcacggtcactcgcagctaccgcagtgtggggggcagtgggggtggcagcttcggggacaatctggtcacccgctcctacctcctgggcaactccagcccccgaacccagagcccccagaactgcagcatcatgtaatctgggacctgccaggcaggggtgggggtggaggcttcctgcgtcctcctcacctcatgcccaccccctgccctgcacgtcatgggagggggcttgaagccaaagaaaaataaccctttggtttttttcttctgtatttttttttctaagagaagttattttctacagtggttttatactgaaggaaaaacacaagcaaaaaaaaaaaaaagcatctatctcatctatctcaatcctaatttctcctcccttccttttccctgcttccaggaaactccacatctgccttaaaaccaaagagggcttcctctagaagccaagggaaaggggtgcttttatagaggctagcttctgcttttctgccctggctgctgcccccaccccggggaccctgtgacatggtgcctgagaggcaggcatagaggcttctccgccagcctcctctggacggcaggctcactgccagggccagcctccgagagggagagagagagagagaggacagcttgagccgggcccctgggcttggccttgctgtgattccactacacctggctgaggttcctctgcctgccccgcccccagtccccacccctgcccccagccccggggtgagtccattctcccaggtaccagctgcgcttgcttttctgtattttatttagacaagagatgggaatgaggtgggaggtggaagaagggagaagaaaggtgagtttgagctgccttccctagctttagaccctgggtgggctctgtgcagtcactggaggttgaagccaagtggggtgctgggaggagggagagggaggtcactggaaaggggagagcctgctggcacccaccgtggaggaggaaggcaagagggggtggaggggtgtggcagtggttttggcaaacgctaaagagcccttgcctccccatttcccatctgcaccccttctctcctccccaaatcaatacactagttgtttcta

SEQ ID NO: 338244 - DNA, 2833 bp, Homo sapiens
  misc_feature (6)..(6): n is a, c, g, or t
agactnacggctagtacgaggccgggtgttaatcggccgagggagcgccgcacctacaccagccaacccagatcccgaggtccgacagcgcccggcccagatccccacgcctgccaggagcaagccgagagccagccggccggcgcactccgactccgagcagtctctgtccttcgacccgagccccgcgccctttccgggacccctgccccgcgggcagcgctgccaacctgccggccatggagaccccgtcccagcggcgcgccacccgcagcggggcgcaggccagctccactccgctgtcgcccacccgcatcacccggctgcaggagaaggaggacctgcaggagctcaatgatcgcttggcggtctacatcgaccgtgtgcgctcgctggaaacggagaacgcagggctgcgccttcgcatcaccgagtctgaagaggtggtcagccgcgaggtgtccggcatcaaggccgcctacgaggccgagctcggggatgcccgcaagacccttgactcagtagccaaggagcgcgcccgcctgcagctggagctgagcaaagtgcgtgaggagtttaaggagctgaaagcgcgcaataccaagaaggagggtgacctgatagctgctcaggctcggctgaaggacctggaggctctgctgaactccaaggaggccgcactgagcactgctctcagtgagaagcgcacgctggagggcgagctgcatgatctgcggggccaggtggccaagcttgaggcagccctaggtgaggccaaggatgaggatggagatgacctgctccatcaccaccacgtgagtggtagccgccgctgaggccgagcctgcactggggccacccagccaggcctgggggcagcctctccccagcctccccgtgccaaaaatcttttcattaaagaatgttttggaactttactcgctggcctggcctttcttctctctcctccctataccttgaacagggaacccaggtgtctgggtgccctactctggtaaggaagggagtgggaactttctgatgccatggaatattcctgtgggagcagtggacaagggtctggatttgtcttctgggaaagggaggggaggacagacgtggggcatgcccgccctgcctctctcccccattcttgttgcatgcatatcctctcatttccctcatttttcctgcaagaatgttctctctcattcctgaccgcccctccactccaattaatagtgcatgcctgctgccctacaagcttgctcccgttctctcttcttttcctcttaagctcagagtagctagaacagagtcagagtcactgctctggttctctgtccccaagtcttcctgagccttctccccttttatgtcttccctctcctcctccgggcccctagcctcccaaacccccattgcccgctggctccttgggcacagaaccacaccttcctgcctggcggctgggagcctgcaggagcctggagcctggttgggcctgagtggtcagtcccagactcgccgtcccgcctgagccttgtctcccttcccagggctcccactgcagcagctcgggggaccccgctgagtacaacctgcgctcgcgcaccgtgctgtgcgggacctgcgggcagcctgccgacaaggcatctgccagcggctcaggagcccaggtgggcggacccatctcctctggctcttctgcctccagtgtcacggtcactcgcagctaccgcagtgtggggggcagtgggggtggcagcttcggggacaatctggtcacccgctcctacctcctgggcaactccagcccccgaacccagagcccccagaactgcagcatcatgtaatctgggacctgccaggcaggggtgggggtggaggcttcctgcgtcctcctcacctcatgcccaccccctgccctgcacgtcatgggagggggcttgaagccaaagaaaaataaccctttggtttttttcttctgtatttttttttctaagagaagttattttctacagtggttttatactgaaggaaaaacacaagcaaaaaaaaaaaaaagcatctatctcatctatctcaatcctaatttctcctcccttccttttccctgcttccaggaaactccacatctgccttaaaaccaaagagggcttcctctagaagccaagggaaaggggtgcttttatagaggctagcttctgcttttctgccctggctgctgcccccaccccggggaccctgtgacatggtgcctgagaggcaggcatagaggcttctccgccagcctcctctggacggcaggctcactgccagggccagcctccgagagggagagagagagagagaggacagcttgagccgggcccctgggcttggccttgctgtgattccactacacctggctgaggttcctctgcctgccccgcccccagtccccacccctgcccccagccccggggtgagtccattctcccaggtaccagctgcgcttgcttttctgtattttatttagacaagagatgggaatgaggtgggaggtggaagaagggagaagaaaggtgagtttgagctgccttccctagctttagaccctgggtgggctctgtgcagtcactggaggttgaagccaagtggggtgctgggaggagggagagggaggtcactggaaaggggagagcctgctggcacccaccgtggaggaggaaggcaagagggggtggaggggtgtggcagtggttttggcaaacgctaaagagcccttgcctccccatttcccatctgcaccccttctctcctccccaaatcaatacactagttgtttcta

SEQ ID NO: 338245 - DNA, 2702 bp, Homo sapiens
ctagaagccaagggaaaggggtgcttttatagaggctagcttctgcttttctgccctggctgctgcccccagccccggggtgagtccattctcccaggtaccagctgcgcttgcttttctgtattttatttagacaagagatgggaatgaggtgggaggtggaagaagggagaagaaaggtgagtttgagctgccttccctagctttagaccctgggtgggctctgtgcagtcactggaggttgaagccaagtggggtgctgggaggagggagagggaggtcactggaaaggggagagcctgctggcacccaccgtggaggaggaaggcaagagggggtggaggggtgtggcagtggttttggcaaacgctaaagagcccttgcctccccatttcccatctgcaccccttctctcctccccaaatcaatacactagttgtttctaaaaaaaagaaaagcaaaaaaaaaaaagaaaaaaaaaaaaaaagccaatcaacacagaatagaaagagagagatggcatgcaacagacaggagaaacaaatagagacaagagaaggacaacagagggagagcacgagaagaacaaataagcaccgacaatgtccacccagagcgagagaccaacgtgtcatgagtgacaatcgagaagcaaaaagtcaagcgaagcgcggaggcaggatggaggtaggagaggcggcacagccgtcccagagcggggcgagcagtggggcgagcaggcaagcgcgaggcaaacagcgcagtcaaggacagcggaaggaacggagcaaggagcacgaagaagtcagagccgaggggaaggaacggtgacgggagaacgaaggagaagcgagcgaaggaagaacgaaaggggaggcgaggagagagctacgcctgtccccaagcctactctgcaagcgcagccgtggccgtgcttcctctcactcatcccagacacagggtgggggcagcgtcaccaaaaagcgcaaactggagtccactgagagccgcagcagcttctcacagcacgcacgcactagcgggcgcgtggccgtggaggaggtggatgaggagggcaagtttgtccggctgcgcaacaagtccaatgaggaccagtccatgggcaattggcagatcaagcgccagaatggagatgatcccttgctgacttaccggttcccaccaaagttcaccctgaaggctgggcaggtggtgacgatctgggctgcaggagctggggccacccacagcccccctaccgacctggtgtggaaggcacagaacacctggggctgcgggaacagcctgcgtacggctctcatcaactccactggggaagaagtggccatgcgcaagctggtgcgctcagtgactgtggttgaggacgacgaggatgaggatggagatgacctgctccatcaccaccacggctcccactgcagcagctcgggggaccccgctgagtacaacctgcgctcgcgcaccgtgctgtgcgggacctgcgggcagcctgccgacaaggcatctgccagcggctcaggagcccaggtgggcggacccatctcctctggctcttctgcctccagtgtcacggtcactcgcagctaccgcagtgtggggggcagtgggggtggcagcttcggggacaatctggtcacccgctcctacctcctgggcaactccagcccccgaacccagagcccccagaactgcagcatcatgtaatctgggacctgccaggcaggggtgggggtggaggcttcctgcgtcctcctcacctcatgcccaccccctgccctgcacgtcatgggagggggcttgaagccaaagaaaaataaccctttggtttttttcttctgtatttttttttctaagagaagttattttctacagtggttttatactgaaggaaaaacacaagcaaaaaaaaaaaaaagcatctatctcatctatctcaatcctaatttctcctcccttccttttccctgcttccaggaaactccacatctgccttaaaaccaaagagggcttcctctagaagccaagggaaaggggtgcttttatagaggctagcttctgcttttctgccctggctgctgcccccaccccggggaccctgtgacatggtgcctgagaggcaggcatagaggcttctccgccagcctcctctggacggcaggctcactgccagggccagcctccgagagggagagagagagagagaggacagcttgagccgggcccctgggcttggccttgctgtgattccactacacctggctgaggttcctctgcctgccccgcccccagtccccacccctgcccccagccccggggtgagtccattctcccaggtaccagctgcgcttgcttttctgtattttatttagacaagagatgggaatgaggtgggaggtggaagaagggagaagaaaggtgagtttgagctgccttccctagctttagaccctgggtgggctctgtgcagtcactggaggttgaagccaagtggggtgctgggaggagggagagggaggtcactggaaaggggagagcctgctggcacccaccgtggaggaggaaggcaagagggggtggaggggtgtggcagtggttttggcaaacgctaaagagcccttgcctccccatttcccatctgcaccccttctctcctccccaaatcaatacactagttgtttcta

SEQ ID NO: 338246 - DNA, 1586 bp, Homo sapiens
  misc_feature (6)..(6): n is a, c, g, or t
agactnacggctagtacgaggccgggtgttaatcggccgaatcccttgctgacttaccggttcccaccaaagttcaccctgaaggctgggcaggtggtgacgatctgggctgcaggagctggggccacccacagcccccctaccgacctggtgtggaaggcacagaacacctggggctgcgggaacagcctgcgtacggctctcatcaactccactggggaagaagtggccatgcgcaagctggtgcgctcagtgactgtggttgaggacgacgaggatgaggatggagatgacctgctccatcaccaccacggctcccactgcagcagctcgggggaccccgctgagtacaacctgcgctcgcgcaccgtgctgtgcgggacctgcgggcagcctgccgacaaggcatctgccagcggctcaggagcccaggtgggcggacccatctcctctggctcttctgcctccagtgtcacggtcactcgcagctaccgcagtgtggggggcagtgggggtggcagcttcggggacaatctggtcacccgctcctacctcctgggcaactccagcccccgaacccagagcccccagaactgcagcatcatgtaatctgggacctgccaggcaggggtgggggtggaggcttcctgcgtcctcctcacctcatgcccaccccctgccctgcacgtcatgggagggggcttgaagccaaagaaaaataaccctttggtttttttcttctgtatttttttttctaagagaagttattttctacagtggttttatactgaaggaaaaacacaagcaaaaaaaaaaaaaagcatctatctcatctatctcaatcctaatttctcctcccttccttttccctgcttccaggaaactccacatctgccttaaaaccaaagagggcttcctctagaagccaagggaaaggggtgcttttatagaggctagcttctgcttttctgccctggctgctgcccccaccccggggaccctgtgacatggtgcctgagaggcaggcatagaggcttctccgccagcctcctctggacggcaggctcactgccagggccagcctccgagagggagagagagagagagaggacagcttgagccgggcccctgggcttggccttgctgtgattccactacacctggctgaggttcctctgcctgccccgcccccagtccccacccctgcccccagccccggggtgagtccattctcccaggtaccagctgcgcttgcttttctgtattttatttagacaagagatgggaatgaggtgggaggtggaagaagggagaagaaaggtgagtttgagctgccttccctagctttagaccctgggtgggctctgtgcagtcactggaggttgaagccaagtggggtgctgggaggagggagagggaggtcactggaaaggggagagcctgctggcacccaccgtggaggaggaaggcaagagggggtggaggggtgtggcagtggttttggcaaacgctaaagagcccttgcctccccatttcccatctgcaccccttctctcctccccaaatcaatacactagttgtttcta

SEQ ID NO: 338247 - DNA, 1189 bp, Homo sapiens
ctagaagccaagggaaaggggtgcttttatagaggctagcttctgcttttctgccctggctgctgcccccagccccggggtgagtccattctcccaggtaccagctgcgcttgcttttctgtattttatttagacaagagatgggaatgaggtgggaggtggaagaagggagaagaaaggtgagtttgagctgccttccctagctttagaccctgggtgggctctgtgcagtcactggaggttgaagccaagtggggtgctgggaggagggagagggaggtcactggaaaggggagagcctgctggcacccaccgtggaggaggaaggcaagagggggtggaggggtgtggcagtggttttggcaaacgctaaagagcccttgcctccccatttcccatctgcaccccttctctcctccccaaatcaatacactagttgtttctaaaaaaaaaaaaaaaaaaaaaaaaaaaaaaaaaaaaaaaaaaaaaaaaaaaaaaaaaaaaaaaaaaaaaaaaaaaaaaaaaagaagagagagagagcgcgggagagagaaagaaaaataacgcagagaagggagagacaacaagatcctcccgaccacagcacgggtcgtcacggcaagaggggcggcacccacaacgggcggcgtactctatataacacgaccagagacgcgaggcgggaggcagagaaacaaacaaccaagcgagagaggggggacacagagaagacaaggagggaacaaaaaagaagagagaagcgaacacacaaaccagggcgagagagaaaacacaaaaaggaggaaagaaaaacaaaataaagcggagaaaagagaaagagagcgccagacgaggcaagcacaaaaaaaaaaaagagaagagagaggagatcaacggagggagaaaaaaccccacgacaggacaacacaaggcaaggaagggcggcgagaagaagaacacgagaaaacgacgaacggacagaaacaaagcgacagaaacaacaaaaatatgacaacgagcgcgaggaagacacgcgcacgaagcaaacaaaaggaaaccgaagaagaaaacaacaacccaccagagacgaacaacgccagagaaaaacagacacaacaaaggaagagagcaaaaagaaacagcagaagcacaaacaacgagcaaagagcaaaaacaaagaagcaaacga

SEQ ID NO: 338248 - DNA, 741 bp, Homo sapiens
tgctgacgggtggagcgacacggaggagcctcagaaacacccaccatgctgctgcccggaagaggcaggcacggaaggccacgcgctctatgacctcatccatgggaaacgcacagaggcgaggcctgccagggctgggaggagggggcacaggagcgccggctgtggggatggtgtttctcccgccgggggtggctggctcaccctggcactgcaccgcagtgggggtggaccggatgccgctgaactgcctggactttcaagaggtaaattccgagctctgctctgaggcctgaccgtccctggccgccaagtgtctgctgactgagagctccagctccggagaggtgcccagtacctggtgagcagagggacctgaaggagcaggtgcctcttcctcagacatctgcagtcacttcacagtgaatgaggctccagccgggtgccctgagaagtggccaacaccctacccaagaggagaccgcacagccacggccaacgtggagctctaactcagggctccagcctccagcccagtccttttccttgagtagggacgacccccacagcggcctctctgcattgcttaggtggggagcacatgtggtgaagatgggcagcctgcaggtgcctgctacacgtgggggccacggccgacggaaagctcagtcatgagtgaaaacagaggaaatgtttctgaaaatataacaagtcagtgggaaatcaatttatcaaaagcaa

SEQ ID NO: 338249 - DNA, 284 bp, Homo sapiens
catgttggccaggctgatctccaactcatgacctcaagcaatccagccaccttggcttcccaaagtattgagattataggcgtgagccactgcgcccgacccaggtcaatgtttctttgtagatcctaaagtttcaatactaatcctcaaactaatattcatctgaggaaattttatcctctcacatagaaaatacttgtcaaaagggaaaagcccatttgcactttgccctataagtgctatgctacattttgactgagaatgtcacagtgatggcccaaaga

SEQ ID NO: 338250 - DNA, 388 bp, Homo sapiens
cagaaacagaaaaaacccggagggcagcagaggtgcttggttaaggtggagaagagagttctgccttggtcaacctagagagaggaaattgaggacttaaatcacgttttgggggtcatctccctccagggaagaagctttgtcttattcatttttcactcacagtgccctatcacaggagccaatgcctagcagagcttagtaagtatttgttgaactgaatttggattggcacccacatatcagaagaggaaagagagtcctggaaaccacattcagagtccgagtcccaaattggagagtagaaattctctgtgtcacccatagtgccacttggaggaaagggataaaaagactgggcttttaactgaggagaatgaggttgtgg

SEQ ID NO: 338251 - DNA, 134 bp, Homo sapiens
gagctcaggggcaggattctattttacagtaagcaagaatgaggttcactaaaaatatataactttctcgaaattaccgaaaagattactccataaaacaaagtaaatactatctttttttttttttttttttt

SEQ ID NO: 338252 - DNA, 708 bp, Homo sapiens
accatcccttatttgatttattgtagcaaaaggaaagcctgtgagaatgcaagggagcccctggctgctttgctggagtccctgggaggtgccccacacctctgccaccaaagtctgtgtgctcctgagcagctcgcggctttcacagtagggaaaccgcagtcctcgtcacctgcgcctttgtcctcccattcgtttaccctcccgttcacatccacacaggcttgtaccccacagaacttgacaggaggtcacatgtgtgaatggcctgtgtctgctttacagggttgagcaggctgagggtgtgtgcctctggggatgctgggctgacagcaaatcccaacagtatttcggctctggactgatttggcctttagtgcttccccaggcctctttcatcggcatgggaaaagcccttaggggtgggcggtgagggcacatttataactaacaaagaagaatgcagttgccccagcatcctactggtcaccttaagtggcagcagagccctccccagcggtgccccagtccctcagaagtgctcagtccggcccgagtgcccatctggtggctctgccgtgttcttctgggcggatctgtgtgcactacacagcgagtgagggcgtggctcacacaggtgtttgagggaaatgggtaatgcccatcccttgctgttttaagtgccaaatagcgtgttagcgcccctcc

SEQ ID NO: 338253 - DNA, 269 bp, Homo sapiens
atcacaaaaacacttgcacattaatgttcatagcatctttagtcatgatagcctcaaactgaagcatcaagagataaatggataaacaaactgtggtatatctatacagtggaatactgtgcagccattaaaaaataatttctgaacttctgaaacacaaaacatggattcatttcagaaacatactaagtgaaaagtcagacaatgaagagtgtatattggctggttccatttgtatgaagttctacaaccagcagaactgatctaca

SEQ ID NO: 338254 - DNA, 419 bp, Homo sapiens
tagctgctatcagaaaccaaaaaatgtgcttgtcgtcacagttgaggcagcttctctgtcagattggaactcaggttatgttggtgtctgactggttttgaggaataatgtgaggaaaccatgtattttcagttcagctcttttcctagcactgttatttcatggtgggtatttcctggctaggttgtagggatgggaagccgagacaaaggtgtagtctttgacaaagcaagtctttggagcaggggctgttaccgatgatttttttggtctctcatagctccccaccctcttttagctccccactcctctttttttctccttacctctcttatggcaaaagtttattcatttaaagtacaaaatgacttgagaccattaaaaattgaataagaagaaaggcatactgtaagcctcac

SEQ ID NO: 338255 - DNA, 110 bp, Homo sapiens
tacacagagtgacaaaaaaaaaggcctgaaattaaagagaaatatcttgagattctctttccccgcaatggagagagaatgtaggtagagctgaagaactaaagccacag

SEQ ID NO: 338256 - DNA, 337 bp, Homo sapiens
cgcctgtagtcccagctacttgggaggctgaggcaggagaatggcatgaactcgggaggcgcagcctgcagtgagccaagatcacaccacagggcacttccagcctgggcaacaaagcgagactccgtctcaacaacaacaacaacaaaaaaagacaagaaaggaaaagaaaaaagaccttattctaggaaacaagaaagactctatggtgctttaagttttattaagcaaacagatgaacatgcatttatgggaataagcacaattcaataggtaacttaaggaaaggtggtttttatttgttttatgtgtgcttttcatcaaaatgtcaaaactt

SEQ ID NO: 338257 - DNA, 279 bp, Homo sapiens
tgcactccagcctgggcgacagagtgagactctgtctcaaaaaaagcaaaaacaaaaaaacattgctattggttgggggtggcagagattatagagattcccccagggttttccctcttgttggtaacacctcaccatctctccagaagacaaatacacgcatctgtgatgtatatattcatatatgagaaacaggaatgctgcaatggagtttcgtattcagactagccctaactccatcttgattgagagccaagaaaacacctgctttactgaggc

SEQ ID NO: 338258 - DNA, 672 bp, Homo sapiens
ttcagatcattatacagagagggaaaatcactcaaaccttctacctctcaaattctacaactccctttcttccagctcccacacgatatacacagccttctctttaagaggttcatctggtaaccccaaatgactttttaacatttaaacatgaaaaacctcttacatgtatatatggctttaaaaggcagtgcagttttggtctccaatctgatttaatcttttatcagtgacccagtcaccaacaggaacaacaattctcacacgggtaaaatggacaatgcaagaggcctgtctccactgtgaataaatgtgcttccttcgccccctgcctctgctgacatatggaccagtgttttcagcccctgcttggcaccatacatgtcagtggtcagggaccaagaacaaatgggcctttatcccccaagagaagcagcacatgtgattggcaacaactattttttttcttactcagacatctcagacatctttttaacttagatgttacagtcatagaaatttagagctgcagggaactgaagagaagatttatgaaataaatgaagtatttaccaagattctagttcaactaagtattgaactatggattactacactgaagagtctttcagaagaagaaagcagatcaatatgagactatcataacaattt

SEQ ID NO: 338259 - DNA, 458 bp, Homo sapiens
ttagccattccctgtttaactgggtaatatgaactgtggctttcttgcaaataataatgttatgtatctacctaccctatttttgctatgtcattttagacctgagatcatggggaacatcaaataataataaaccaaattagtatttattgagcacttactacatgccaggccctatgtcccgtgctttatcatggattatgtcatcaaagcaaccctatgatagttacttactgttatctacacctcatagatgaggacactgaagctctaagtggtcatatactctaaagctggtattttaaccagaatctgtggtcctaaccaacctttaacccaatttataaatatgcttttggcatgctgcgtgcaaacccacacacatgcttatacacctgtaagtcgtgctgaggttttcctgcatagggtgtaccagagacacacttctcaaaagctcc

SEQ ID NO: 338260 - DNA, 274 bp, Homo sapiens
aaggagaaaaagaccgtttagatacggagtagcaccagagactggcctccacccgtccccaagctgaagcttgctgtgcggggttctggtttctcctgggggagggagagggcctgccggctgtgcctcctctctgcaccctccttcccctcccagatttctggtggtcaagggcacagttcatcctccggacaggaggggaaggagtttgggggtagggccccacctcgcaggcaccttaccaagataagcagaatccactcactggcactgc

SEQ ID NO: 338261 - DNA, 2892 bp, Homo sapiens
gcaggtcagtcctgacggccagcatttggcttcaggcgaccgaagtggaaatctgaggatccacgagctgcacttcatggacgagctggtcaaggtggaggcccatgatgctgaggtgctgtgcctggagtactccaagccagagacggggctgaccttgctggcctcagccagtcgggaccggctgatccatgtgctgaacgtggagaagaactacaacctggagcagacgctggatgaccactcctcctccatcaccgccatcaagttcgctggcaacagagacatccagatgatcagctgtggggctgacaagagcatctcagtgattgacttttactcgggcgagtgcattgccaagatgtttggccattcagaaattattaccagcatgaagttcacctatgactgtcatcacttgatcacagtatctggagacagctgcgtgttcatctggcacctgggcccggagatcaccaactgcatgaagcagcacttgctggagattgaccaccggcagcagcagcagcacacaaatgacaagaagcggagtggccaccccaggcaggatacgtatgtgtccacacctagtgagattcactccctgagccctggagagcaaacagaggatgatctggaggaagagtgtgagccagaagagatgctgaagacaccatccaaagatagcttggatccagatcctcgttgcctgctaaccaacggcaagctgccactgtgggcaaagcggctgctaggggacgatgatgtggcagatggcttggccttccacgccaagcgcagctaccagccccacggccgctgggcagagcgggccggccaagagcccctcaagaccatcctggatgcccaggacctggattgctactttacccccatgaagcccgagagtctggagaactccattctggattcactggagccacagagcctggccagcctgctgagtgagtcagagagtccccaggaagctggccgcgggcacccctccttcctgccccagcagaaggaatcatctgaggccagtgagctcatcctctactctctggaggcagaagtgacagtcacagggacagacagccagtattgcaggaaggaggtggaggccgggcctggagaccagcagggcgactcctacctcagggtgtcctccgacagcccaaaggaccagagcccgcctgaggactcgggggagtcagaggccgacctggagtgcagcttcgcagccatccactccccagctccgcctcctgaccctgcccctcggtttgccacgtcgctgccccatttcccaggatgcgcaggtcccacagaagatgagctgtccctgcccgagggacccagcgtccccagcagctccctaccccagactccggagcaggagaagttcctccgccaccactttgagacactgactgagtccccctgcagagagctcttccccgcagctctgggagacgtggaggcctctgaagctgaagaccacttcttcaacccacgcctgagtatctccacgcagttcctctcaagcctccagaaggcatccaggttcacccataccttccctccccgggcaacccagtgccttgtgaagtctccagaggtcaagctcatggaccgaggcggaagccagcccagagcaggtactggctacgcctccccagacaggacccacgtcctcgctgcagggaaggctgaagagaccctggaggcctggcgcccaccacctccctgccttacgagcctggcgtcctgtgtccctgcttcctccgtgctgcccacagacaggaatctcccaacgcccacatctgcacccaccccaggcctggctcagggtgtccatgccccctccacctgttcctacatggaggccactgccagctcccgtgccaggatatcacgcagcatctccctcggtgacagtgagggccctatcgtggccacactggcccagcccctccgtaggccatcgtccgttggggagctggcctccttgggccaggagcttcaggccatcaccaccgcgacaacacccagtttggacagtgagggccaagagcctgccctgcgttcctggggcaaccacgaggcccgggccaacctgagactgaccctgtcaagtgcctgtgatgggctcctgcagccccccgtggatacccagcctggcgtcaccgtccctgcagtgagcttcccagcccctagccctgtggaagagagcgccctgaggctccacggctctgcctttcgcccaagtctcccagctcctgagtcccctggccttcctgcccaccccagtaacccccagcttccagaggcccggcctggcatccctggcggcactgcctccctcctggagcccacctccggtgcacttggtctgttccagggcagccctgcccgctggagtgagccctgggtgccggttgaagccctgcccccatctccccttgagctgagcagggtggggaacatcttgcacaggctgcagaccaccttccaagaagccctcgacctttaccgtgtgttggtctccagtggccaggtggacaccgggcagcagcaggcacggactgagctggtctccaccttcctgtggatccacagccagctggaggctgaatgcctggtggggactagtgtggccccagcccaggctctgcccagcccaggacccccgtccccaccgacgctgtaccccctggccagcccagacctgcaggccctgctggaacactactcggagctgctggtgcaggccgtgcggaggaaggcacgggggcactgagggcgcagcccctccaccgcagccctgctgcttctgaggacttaggtattttaagcgaataaactgacagcttgaggaaaagatcctgg

SEQ ID NO: 338262 - DNA, 2427 bp, Homo sapiens
gcaggtcagtcctgacggccagcatttggcttcaggcgaccgaagtggaaatctgaggatccacgagctgcacttcatggacgagctggtcaaggtggaggcccatgatgctgaggtgctgtgcctggagtactccaagccagagacggggctgaccttgctggcctcagccagtcgggaccggctgatccatgtgctgaacgtggagaagaactacaacctggagcagacgctggatgaccactcctcctccatcaccgccatcaagttcgctggcaacagagacatccagatgatcagctgtggggctgacaagagcatctcagtgattgacttttactcgggcgagtgcattgccaagatgtttggccattcagaaattattaccagcatgaagttcacctatgactgtcatcacttgatcacagtatctggagacagctgcgtgttcatctggcacctgggcccggagatcaccaactgcatgaagcagcacttgctggagattgaccaccggcagcagcagcagcacacaaatgacaagaagcggagtggccaccccaggcaggatacgtatgtgtccacacctagtgagattcactccctgagccctggagagcaaacagaggatgatctggaggaagagtgtgagccagaagagatgctgaagacaccatccaaagatagcttggatccagatcctcgttgcctgctaaccaacggcaagctgccactgtgggcaaagcggctgctaggggacgatgatgtggcagatggcttggccttccacgccaagcgcagctaccagccccacggccgctgggcagagcgggccggccaagagcccctcaagaccatcctggatgcccaggacctggattgctactttacccccatgaagcccgagagtctggagaactccattctggattcactggagccacagagcctggccagcctgctgagtgagtcagagagtccccaggaagctggccgcgggcacccctccttcctgccccagcagaaggaatcatctgaggccagtgagctcatcctctactctctggaggcagaagtgacagtcacagggacagacagccagtattgcaggaaggaggtggaggccgggcctggagaccagcagggcgactcctacctcagggtgtcctccgacagcccaaaggaccagagcccgcctgaggactcgggggagtcagaggccgacctggagtgcagcttcgcagccatccactccccagctccgcctcctgaccctgcccctcggtttgccacgtcgctgccccatttcccaggatgcgcaggtcccacagaagatgagctgtccctgcccgagggacccagcgtccccagcagctccctaccccagactccggagcaggagaagttcctccgccaccactttgagacactgactgagtccccctgcagagagctcttccccgcagctctgggagacgtggaggcctctgaagctgaagaccacttcttcaacccacgcctgagtatctccacgcagttcctctcaagcctccagaaggcatccaggttcacccataccttccctccccgggcaacccagtgccttgtgaagtctccagaggtcaagctcatggaccgaggcggaagccagcccagagcaggtactggctacgcctccccagacaggacccacgtcctcgctgcagggaaggctgaagagaccctggaggcctggcgcccaccacctccctgccttacgagcctggcgtcctgtgtccctgcttcctccgtgctgcccacagacaggaatctcccaacgcccacatctgcacccaccccaggcctggctcagggtgtccatgccccctccacctgttcctacatggaggccactgccagctcccgtgccaggatatcacgtgcacttggtctgttccagggcagccctgcccgctggagtgagccctgggtgccggttgaagccctgcccccatctccccttgagctgagcagggtggggaacatcttgcacaggctgcagaccaccttccaagaagccctcgacctttaccgtgtgttggtctccagtggccaggtggacaccgggcagcagcaggcacggactgagctggtctccaccttcctgtggatccacagccagctggaggctgaatgcctggtggggactagtgtggccccagcccaggctctgcccagcccaggacccccgtccccaccgacgctgtaccccctggccagcccagacctgcaggccctgctggaacactactcggagctgctggtgcaggccgtgcggaggaaggcacgggggcactgagggcgcagcccctccaccgcagccctgctgcttctgaggacttaggtattttaagcgaataaactgacagcttgaggaaaagatcctgg

SEQ ID NO: 338263 - DNA, 3169 bp, Homo sapiens
gcaggtcagtcctgacggccagcatttggcttcaggcgaccgaagtggaaatctgaggatccacgagctgcacttcatggacgagctggtcaaggtggaggcccatgatgctgaggtgctgtgcctggagtactccaagccagagacggggctgaccttgctggcctcagccagtcgggaccggctgatccatgtgctgaacgtggagaagaactacaacctggagcagacgctggatgaccactcctcctccatcaccgccatcaagttcgctggcaacagagacatccagatgatcagctgtggggctgacaagagcatctactttcgcagtgcccagcagggttcggatggactacactttgtccgtacccaccacgtagcagagaaaaccaccttgtatgacatggacattgacatcacccagaagtacgtggccgtggcctgccaggaccgcaatgtgagagtctacaacactgtgaacgggaagcagaagaagtgctacaagggctcccagggtgacgaagggtccttgctgaaggtccatgtggacccctcaggcaccttcctggccaccagctgctctgacaaaaggcatctcagtgattgacttttactcgggcgagtgcattgccaagatgtttggccattcagaaattattaccagcatgaagttcacctatgactgtcatcacttgatcacagtatctggagacagctgcgtgttcatctggcacctgggcccggagatcaccaactgcatgaagcagcacttgctggagattgaccaccggcagcagcagcagcacacaaatgacaagaagcggagtggccaccccaggcaggatacgtatgtgtccacacctagtgagattcactccctgagccctggagagcaaacagaggatgatctggaggaagagtgtgagccagaagagatgctgaagacaccatccaaagatagcttggatccagatcctcgttgcctgctaaccaacggcaagctgccactgtgggcaaagcggctgctaggggacgatgatgtggcagatggcttggccttccacgccaagcgcagctaccagccccacggccgctgggcagagcgggccggccaagagcccctcaagaccatcctggatgcccaggacctggattgctactttacccccatgaagcccgagagtctggagaactccattctggattcactggagccacagagcctggccagcctgctgagtgagtcagagagtccccaggaagctggccgcgggcacccctccttcctgccccagcagaaggaatcatctgaggccagtgagctcatcctctactctctggaggcagaagtgacagtcacagggacagacagccagtattgcaggaaggaggtggaggccgggcctggagaccagcagggcgactcctacctcagggtgtcctccgacagcccaaaggaccagagcccgcctgaggactcgggggagtcagaggccgacctggagtgcagcttcgcagccatccactccccagctccgcctcctgaccctgcccctcggtttgccacgtcgctgccccatttcccaggatgcgcaggtcccacagaagatgagctgtccctgcccgagggacccagcgtccccagcagctccctaccccagactccggagcaggagaagttcctccgccaccactttgagacactgactgagtccccctgcagagagctcttccccgcagctctgggagacgtggaggcctctgaagctgaagaccacttcttcaacccacgcctgagtatctccacgcagttcctctcaagcctccagaaggcatccaggttcacccataccttccctccccgggcaacccagtgccttgtgaagtctccagaggtcaagctcatggaccgaggcggaagccagcccagagcaggtactggctacgcctccccagacaggacccacgtcctcgctgcagggaaggctgaagagaccctggaggcctggcgcccaccacctccctgccttacgagcctggcgtcctgtgtccctgcttcctccgtgctgcccacagacaggaatctcccaacgcccacatctgcacccaccccaggcctggctcagggtgtccatgccccctccacctgttcctacatggaggccactgccagctcccgtgccaggatatcacgcagcatctccctcggtgacagtgagggccctatcgtggccacactggcccagcccctccgtaggccatcgtccgttggggagctggcctccttgggccaggagcttcaggccatcaccaccgcgacaacacccagtttggacagtgagggccaagagcctgccctgcgttcctggggcaaccacgaggcccgggccaacctgagactgaccctgtcaagtgcctgtgatgggctcctgcagccccccgtggatacccagcctggcgtcaccgtccctgcagtgagcttcccagcccctagccctgtggaagagagcgccctgaggctccacggctctgcctttcgcccaagtctcccagctcctgagtcccctggccttcctgcccaccccagtaacccccagcttccagaggcccggcctggcatccctggcggcactgcctccctcctggagcccacctccggtgcacttggtctgttccagggcagccctgcccgctggagtgagccctgggtgccggttgaagccctgcccccatctccccttgagctgagcagggtggggaacatcttgcacaggctgcagaccaccttccaagaagccctcgacctttaccgtgtgttggtctccagtggccaggtggacaccgggcagcagcaggcacggactgagctggtctccaccttcctgtggatccacagccagctggaggctgaatgcctggtggggactagtgtggccccagcccaggctctgcccagcccaggacccccgtccccaccgacgctgtaccccctggccagcccagacctgcaggccctgctggaacactactcggagctgctggtgcaggccgtgcggaggaaggcacgggggcactgagggcgcagcccctccaccgcagccctgctgcttctgaggacttaggtattttaagcgaataaactgacagcttgaggaaaagatcctgg

SEQ ID NO: 338264 - DNA, 2065 bp, Homo sapiens
gcaggtcagtcctgacggccagcatttggcttcaggcgaccgaagtggaaatctgaggatccacgagctgcacttcatggacgagctggtcaaggtggaggcccatgatgctgaggtgctgtgcctggagtactccaagccagagacggggctgaccttgctggcctcagccagtcgggaccggctgatccatgtgctgaacgtggagaagaactacaacctggagcagacgctggatgaccactcctcctccatcaccgccatcaagttcgctggcaacagagacatccagatgatcagctgtggggctgacaagagcatctactttcgcagtgcccagcagggttcggatggactacactttgtccgtacccaccacgtagcagagaaaaccaccttgtatgacatggacattgacatcacccagaagtacgtggccgtggcctgccaggaccgcaatgtgagagtctacaacactgtgaacgggaagcagaagaagtgctacaagggctcccagggtgacgaagggtccttgctgaaggtccatgtggacccctcaggcaccttcctggccaccagctgctctgacaaaaggcatctcagtgattgacttttactcgggcgagtgcattgccaagatgtttggccattcagaaattattaccagcatgaagttcacctatgactgtcatcacttgatcacagtatctggagacagctgcgtgttcatctggcacctgggcccggagatcaccaactgcatgaagcagcacttgctggagattgaccaccggcagcagcagcagcacacaaatgacaagaagcggagtggccaccccaggcaggatacgtatgtgtccacacctagtgagattcactccctgagccctggagagcaaacagaggatgatctggaggaagagtgtgagccagaagagatgctgaagacaccatccaaagatagcttggatccagatcctcgttgcctgctaaccaacggcaagctgccactgtgggcaaagcggctgctaggggacgatgatgtggcagatggcttggccttccacgccaagcgcagctaccagccccacggccgctgggcagagcgggccggccaagagcccctcaagaccatcctggatgcccaggacctggattgctactttacccccatgaagcccgagagtctggagaactccattctggattcactggagccacagagcctggccagcctgctgagtgagtcagagagtccccaggaagctggccgcgggcacccctccttcctgccccagcagaaggaatcatctgaggccagtgagctcatcctctactctctggaggcagaagtgacagtcacagggacagacagccagtattgcaggaaggaggtggaggccgggcctggagaccagcagggcgactcctacctcagggtgtcctccgacagcccaaaggaccagagcccgcctgagggtgagtgcagggcaggcagggaccctgtgacagtctgtgcgttcagccaagcccctttctgggcaccgatggtgactttgacccagtactgaagctcagagtctgtcgaggaagacacatgtggtccctgctgctgcctgaggattctgggcccagctgcctacagctgagagcccagctctgccacctccttgatgtggaacttcccttattcataaaatggggggcagctgctcttaccatccctcctccagatggggaaactgagcccagggaagggtagccctggccctggctcaccagaatggtcaggctgtgggctcctgaccccgactctgtccttcagactcgggggagtcagaggccgacctggagtgcagcttcgcagccatccactccccagctccgcctcctgaccctgcccctcggtttgccacgtcgctgccccatttcccaggtaagcaggggccagacacgcaggggactcgctgctcgggcctggcttagggccagtcacaatgtctaagcacaggccctgcacttggagcccactgagcctggaagacggggatccctgcttctcagc

SEQ ID NO: 338265 - DNA, 433 bp, Homo sapiens
tctaaaaatgtctaacatctactgtggacaagactctgtgtcagtggctgtgaccagttccatttcctctgtcactgatgaaggtggagatcactggtcctgctttgaaagacttgagtgtggagccttgacttccatttctctctgaactcttattagcgatattaaacttgcctttcttctactggtctcttgttgttgttacttctggtctttcatggttttccctgctgggatggcccacagccagagatcatagctagagctccttcctatctggatttgtcactagtgtttctgacatgggatttccccaggcaggctttatttaattcacaaagggccagagcaggctgggtggcaagggataaagcactgggactactagagaaaagaaggatttagaggaataaagaactgagactctgcggga

SEQ ID NO: 338266 - DNA, 192 bp, Homo sapiens
cctctttccagcctctcttttaagtactcagtactttgtgaactgaactaattactgttctacagatacgtgcttccatttcctgttgttttaccttagtctgtggtgttctcccatctgaaatgacattacccccatctctgtatagtcaaacctccctatcctaaaagactaagactcaattcaaatgct

SEQ ID NO: 338267 - DNA, 236 bp, Homo sapiens
atgcctcagagcagcatttctcctactttaacatgcacacagatcacttggggagcatgttaaaaagtaaatcctgattccttggatttgagggtgggctggagactcttcatttctaataagctctcaaagtgaggccaataccgctggttccagaggcaaagccctagaatccagggtctagaactgtgtaggacctaaatctaaaatgtactggggaggggaataatggaaca

SEQ ID NO: 338268 - DNA, 153 bp, Homo sapiens
tcagggcagagcaggtagcaggtaatctgaatgagtcagggcggagcaggtgatcggaatgagtcagggtggagtaggaaatcgaaaagggttgctttacgaggaagttacttttaaaagtaaaaggcaaagaattgaacacactgacatatt

SEQ ID NO: 338269 - DNA, 387 bp, Homo sapiens
gatggaggccgtagtgctgggataagagctcatagtgtagatatttttggactgagtcttatcagaagacactttaggaatttcaggaatcagaagggtgtgattgggaaaacaggggcagagcttcccaatgccccagaaatcccaccaaatagaccacactgagtctccagtcagatggtgccaatctctctgctctaccccggcagtagtaggcctacgatattgctagatagcattcatgaagttccagctaggccaagtacttttgcaagttcatgagcaggcccctagggtagtctagcttgtagtctagatgagaaggctgttgctaatgcttgaatggacttttatttgattatttgatttaaatgtctcaaaaatgga

SEQ ID NO: 338270 - DNA, 239 bp, Homo sapiens
tagaaggattccggattctcttaccaggtgtcagaagaaaccccttgacattctctacaatggacaggttccaagatcaacaaatgaatcaaatcagtcctgaatggaatttcttgtcctaaagagaaatcagacaaggtctaaaagaaatcaggcaagcctaaatgcaaagcaggagacagagctggcagaaatgcaatacaatcacttcttcctttttttttttttttttttttttt

SEQ ID NO: 338271 - DNA, 527 bp, Homo sapiens
atcttctatatcgctcacgttgggagctgttgaccagagctgttcctattcggccatcttggctcctcccccctcatgtaaatattatcaaaacaagaggagaaggggtcaaaataatgttacacaagctacaagttaagttaaaaactgtcatactttataaagtgtatttaagtcaaaacttcaaaaagacaaagaaggacattagattcattcactggggatccttattaaaaatttgtatatacatgtgtgtatttatgtgtgtgtgtctcatattggggtttcagctatataaagcaaatactaacaaaactgaataaacacaaagagagcaatacaattatagtaggatatttcaatactccactttctgtaataaaacaagagagaatattagtaaggaaacagaagactagaaggcagtaaaaaaacaattatttttaataaggtatagagaacactcctcgacaacatcaggatacacagccttctcattacctcatacaactttcttctttatagac

SEQ ID NO: 338272 - DNA, 431 bp, Homo sapiens
ttattaaaaataatagttttttgactgccttctagtcttctgttaccttactaattttctctctgtgttattacagaaagtggagtattgaaatatcctaggggatccttattaaaaacctatggggatccttattaaaaatttgtatatacatgtgtgtatttatgtgtgtgtgtctcatattggggtttcagctatataaagcaaatactaacaaaactgaataaacacaaagagagcaatacaattatagtaggatatttcaatactccactttctgtaataaaacaagagagaatattagtaaggaaacagaagactagaaggcagtaaaaaaacaattatttttaataaggtatagagaacactcctcgacaacatcaggatacacagccttctcattacctcatacaactttcttctttatagac

SEQ ID NO: 338273 - DNA, 261 bp, Homo sapiens
tgatgaggcatgtttattctcacttcttgactggtgctcaatgatgtacaaacctgattccacaggctccattatcaaccaaaattaaggctgtttaggaataaataaattttttgagacaggatcttgctgtgtcacccaggctagaatgcagtgacacaatcacagctcactgcagcctcaaccttctgggcttaagtgatcctcccacctcagcctcccaaatagccaggactacgggtgcatgccaccacatcagct

SEQ ID NO: 338274 - DNA, 153 bp, Homo sapiens
acggcctaaagaagtgactccgccttggcagcctcacgggcaaggaggcacctttctcctaggtcagatccaggagctcagggagcttgcatttccaggaaacgtggacggaagcagaaaagtccccaatccaggtgcaagtcaccttgatga

SEQ ID NO: 338275 - DNA, 547 bp, Homo sapiens
gaaagatgtttgtgtgtgagggtaggtgggctctgtctactctgcttcattctttgaaactagatgttcctctgaaacctctagtgctctgtggagtgtgagaacaactgcctggctagccagggctatgtttggagtttaagtttgttattcaaattactgaatctgctgctcacagaggttggtacctccccagagaatattacctgttccaggcctttgtttgaatgagataatattgtaactatcacaaaagtttagctgcttttgggaagaagtccaaaatccacttactagcaaatgaaacattattctactgcttaggatcaaacagcagattttatgttcaattaaaactgactgtagtctcaatttagatagcaattgcacaagcagaggattagaatttggctcagatcctcttattaaaattcatattactcagtagcttaaatagtgaaagtcagtctatccttcactaattactcccttcttttttcctttgagcaggagaagtgtgtttggatacataagaagaaagttccca

SEQ ID NO: 338276 - DNA, 689 bp, Homo sapiens
gaccaaaatcacacaggtgaagtaagaggctgtgaggctgggatccagggtcctctcatcctccaccctgtggattttttcaatcaaactgctatacagttctggactcagtgggcacatgggtgaaggaagcgaagaagaactctgccctcctggagttgatagtctagctggagagactatttgaagagcaaactaataattctgcaagatgagaaggaacctacaactaaagatttgtggggggagttttccaggcaaagaaaaggttttgcaaaagctctgaggaggaaaacttcagtttgagaaactaagcagtggtcagcgtctgtgtgagccagtgggtgatagggtggcatgaccctggagagtagctgagggccagatcatgtttggactgctcttgaaaagtttcctttaaccttggactggcagtctttaaaggttggtaccctaacttgatgaaagaagattgtcttagtccattttgtgtttctataacagaataccacagactgggtaatttataaagaaaagaaatttgtctggctcgtggttctgaaggctggaaagtcccagggcatggtgccagcatctggggagggtcttcttgctgtgtcaccccacggcagaaggcagaaaagcaagagagcatggtagccagcaagcaagagggggctgcactcaat

SEQ ID NO: 338277 - DNA, 505 bp, Homo sapiens
tctctctctctctctctccaaagtgttcttcccataatgtgaagaggagaaagatcttttaaatctttttatataaaagaataatttacaagttacagatgctcctcaacttatgatagggctaagtcccaataaacccatcataagttgaaagtgtccctaagtagaaagtgtacttaatacaactaacctaccaaacatcatagcttagcctagactaccttaaacatgctcggaacacttacattgcctacatttgggcaaaatcatctaacacaaagcctattttataataaagttttgaatatctcatgtaatttatttaattttgtactaaaagtgaaaaacaaaacaattgtgtgattactagaagtacggcttctactgattgcattttgcttttgcaacattgtaaattcaaaaactcctcaatcaaaccatcttaaatcggggactgtctgtagaatctaagctgaaaactccttctccccattggacagaaaac

SEQ ID NO: 338278 - DNA, 470 bp, Homo sapiens
ttcctgaaaggggaatttattcagatgtgaagggaaatcaaccagtattatcctttgttcctattttcccttcttctccaccttgatagttgtgatcaaaattctcaggttaaatttgacattcagctatccatggctttagtatgagccattctgtttttctcaatatctatctatctatctatctatctatctatctatctatctatctaactatctatctattatctatagtctgcctattacttgtctacctacctatcatctatctctatcatcaatcaacaaatctatctctctacctgtctatatctatctacctacctatctatgtatctatctatcatctatctgtcatgcatctgcctatcacctatctacctacctatcatcatcaatcagccaatctatctctctacctacctatcatctatctatcaatctatctatgtatcatctgtctgcctatc

SEQ ID NO: 338279 - DNA, 421 bp, Homo sapiens
tattgctctatgacacctcaagtccatctaaattagcctgggaattgaccttctgttcaaagaaatcacagctatttaaggaatgacaacttctaagaaagattattttctagtatattaaggcatttgtacttccaaactgatttacagtgaacatcagattataaacctatttattatcactgaatattagcctactcttagacactaatgataattctttctgaatacatcagtttaaccttgtcattcccctacataggaaccatcaatagcttcctcctacttataagggggggagggggagagtcaaatctgtccatcaggcattccaatcttcctaatctcatcactaccaactcttgccaaagccttagctcaaaccggctgtcaacttcctgttctttgaactcaccgtaat

SEQ ID NO: 338280 - DNA, 254 bp, Homo sapiens
atgggaaaactaaggcgagcagcaggagaaaaggcggggggtctgctcctagctctgcctgatcccaaaactttattttgttccttctcccgtgcattttgtgttgaaaatataacaaattatcaccggagacattaagtgacctaaagttactagaaatcagggctggctgaggacagtgggcagcagtgtggctttctgaatggcccaccctgctgcctggcaccaccccatgtgaaatattgatttttcga

SEQ ID NO: 338281 - DNA, 373 bp, Homo sapiens
ccacagggctcaaatgttacgcaaccaaaggagctgtttttaaagactctccctacccagttcaagaggtgggaaagggaaggtctacgtggctggccagccttgcttctccctgagggactgggagataactgttttctccctcgtttgtaaaaataacttttttggtgggtgggaaggaagtgaccaaacttacattttgagcctgacaacatgtcagcgtcatcctaaaaataggaggtttcctttgttcctcacaaatgaaaagtttcctacctccaagccaggcagagtacagccgcagagtctgaattcacgcagacgcgggcaactgcacttggcaggcaccaggctccccctcctctgaagggag

SEQ ID NO: 338282 - DNA, 477 bp, Homo sapiens
ctaaatccagctttctctatatctctttccaggaatatctattcagtcagctcttttagaaaatgtatgaaagagtgaggactaaagttaagaaccagagaatatgggtaagaagaatgagtcacaggacaattagcaacactttaaacaattttttagaatgagtggagtgttggcatgtacccagagttactatctgcaggaataaatgaataacattacccaaattctgccatctgtatttggacggtagcccagattaggctaggagcctttgagggtggcctcattaagtagcacctgacatccatttctttcattatcttcttttctcccttttggtcttcgtttcttgttccctgtctcctccttttccctcttttaaagctgtccttcctttagacttgccaatcatcatcatagatgcaggcccagtccctggaactcgaggctaaaagaggtttctggttgctaaca

SEQ ID NO: 338283 - DNA, 749 bp, Homo sapiens
agcggcttcatgccctggtgctgtcagagcagcacgtggggcctggggaattctctctcctgcctttatggtttgaaacggtgtccctcttgccacctctgagatgactaggtgcgcatttgccggctgagtctgcccttctaaaaaatcccagctcccgcggcccaggtccaggtgtgcctggaggaacacctacctcctcacctgacggcccgcgtgtttctggtaggtgccccttacagcagagtgcaggcttccctgctccagggagctgtgttttcttttttgtggccccctcgattattccctgtggagatggctgcagccgagccgcagtgggctggatgggcggtgtccatgcagggaacacagtgcttggatgctgtcctgggaaaggtggcggcgtccgtttccccagcaggtgtcttgctgagcacctgtgacgagcctgtcctgtcctatagtgtgtaatgtgtggggccttctccacacaggctggggctgtggagaagactctttttgacatttcccctgctccaggtgctccggtgggaatgcttggtgaggaccccccagtccatgttcgctgcagcgacccgaacgtcatctgtgagacccagaatgtgggccccggggaaccacgggacatatttctgaaggtggccagtggtccaagcccggagatcaaagacttctttgtcatcatttactcgtaagtgcacaggctttggggacctggaggcggtggc

SEQ ID NO: 338284 - DNA, 4913 bp, Homo sapiens
ggcgacagtgacgcgaggcgggttcttggactgagtgtgcggcgcggtgcgccgccttccgaggctcctcccgcgggtggcagcggacggggcgcgcccctcggccagtcctcggtcctcaggcttgtggctccgttgagcaccggccgccgggcctctgggtccgtcgagtggagactctctgaaaagcgtgggctccgtggcctccggcgcggccgcggcgggtcggtctcctagagagcgcgccagccttggaaggaatccacggcattccagtgtgtcctcaagtggctggacggaccggtaattaggcagggcgtgctggaggtactgtcagaggttgaatgccatctgcgagtgtctttctttgatgtcacctaccggcacttctttgggaggacgtggaaaaccacagtgaagccgacgaagagaccgccgtccaggatcgtctttaatgagcccttgtattttcacacatccctaaaccaccctcatatcgtggctgtggtggaagtggtcgctgagggcaagaaacgggatgggagcctccagacattgtcctgtgggtttggaattcttcggatcttcagcaaccagccggactctcctatctctgcttcccaggacaaaaggttgcggctgtaccatggcacccccagagccctcctgcacccgcttctccaggaccccgcagagcaaaacagacacatgaccctcattgagaactgcagcctgcagtacacgctgaagccacacccggccctggagcctgcgttccaccttcttcctgagaaccttctggtgtctggtctgcagcagatacctggcctgcttccagctcatggagaatccggcgacgctctccgaaagcctcgcctccagaagcccatcacggggcacttggatgacttattcttcaccctgtacccctccctggagaagtttgaggaagagctgctggagctccacgtccaggaccacttccaggagggatgtggcccactggacggtggtgccctggagatcctggagcggcgcctgcgtgtgggcgtgcacaatggtctgggcttcgtgcagaggccgcaggtcgttgtactggtgcctgagatggatgtggccttgacgcgctcagctagcttcagcaggaaagtggtctcctcttccaagaccagctccgggagccaagctctggttttgagaagccgcctccgcctcccagagatggtcggccaccctgcatttgcggtcatcttccagctggagtacgtgttcagcagccctgcaggagtggacggcaatgcagcttcggtcacctctctgtccaacctggcatgcatgcacatggtccgctgggctgtttggaaccccttgctggaagctgattctggaagggtgaccctgcctctgcagggtgggatccagcccaacccctcgcactgtctggtctacaaggtaccctcagccagcatgagctctgaagaggtgaagcaggtggagtcgggtacactccggttccagttctcgctgggctcagaagaacacctggatgcacccacggagcctgtcagtggccccaaagtggagcggcggccttccaggaaaccacccacgtccccttcgagcccgccagcgccagtacctcgagttctcgctgccccgcagaactcacctgtgggaccagggttgtcaatttcccagctggcggcctccccgcggtccccgactcagcactgcttggccaggcctacttcacagctaccccatggctctcaggcctccccggcccaggcagagttcccgttggaggccggtatctcccacctggaagccgacctgagccagacctccctggtcctggaaacatccattgccgaacagttacaggagctgccgttcacgcctttgcatgcccctattgttgtgggaacccagaccaggagctctgcagggcagccctcgagagcctccatggtgctcctgcagtcctccggctttcccgagattctggatgccaataaacagccagccgaggctgtcagcgctacagaacctgtgacgtttaaccctcagaaggaagaatcagattgtctacaaagcaacgagatggtgctacagtttcttgcctttagcagagtggcccaggactgccgaggaacatcatggccaaagactgtgtatttcaccttccagttctaccgcttcccacccgcaacgacgccacgactgcagctggtccagctggatgaggccggccagcccagctctggcgccctgacccacatcctcgtgcctgtgagcagagatggcacctttgatgctgggtctcctggcttccagctgaggtacatggtgggccctgggttcctgaagccaggtgagcggcgctgctttgcccgctacctggccgtgcagaccctgcagattgacgtctgggacggagactccctgctgctcatcggatctgctgccgtccagatgaagcatctcctccgccaaggccggccggctgtgcaggcctcccacgagcttgaggtcgtggcaactgaatacgagcaggacaacatggtggtgagtggagacatgctggggtttggccgcgtcaagcccatcggcgtccactcggtggtgaagggccggctgcacctgactttggccaacgtgggtcacccgtgtgaacagaaagtgagaggttgtagcacattgccaccgtccagatctcgggtcatctcaaacgatggagccagccgcttctctggaggcagcctcctcacgactggaagctcaaggcgaaaacacgtggtgcaagcacagaagctggcggacgtggacagtgagctggctgccatgctactgacccatgcccggcagggcaaggggccccaggacgtcagccgcgagtcggatgccacccgcaggcgtaagctggagcggatgaggtctgtgcgcctgcaggaggccgggggagacttgggccggcgcgggacgagcgtgttggcgcagcagagcgtccgcacacagcacttgcgggacctacaggtcatcgccgcctaccgggaacgcacgaaggccgagagcatcgccagcctgctgagcctggccatcaccacggagcacacgctccacgccacgctgggggtcgccgagttctttgagtttgtgcttaagaacccccacaacacacagcacacggtgactgtggagatcgacaaccccgagctcagcgtcatcgtggacagtcaggagtggagggacttcaagggtgctgctggcctgcacacaccggtggaggaggacatgttccacctgcgtggcagcctggccccccagctctacctgcgcccccacgagaccgcccacgtccccttcaagttccagagcttctctgcagggcagctggccatggtgcaggcctctcctgggttgagcaacgagaagggcatggacgccgtgtcaccttggaagtccagcgcagtgcccactaaacacgccaaggtcttgttccgagcgagtggtggcaagcccatcgccgtgctctgcctgactgtggagctgcagccccacgtggtggaccaggtcttccgcttctatcacccggagctctccttcctgaagaaggccatccgcctgccgccctggcacacatttccaggtgctccggtgggaatgcttggtgaggaccccccagtccatgttcgctgcagcgacccgaacgtcatctgtgagacccagaatgtgggccccggggaaccacgggacatatttctgaaggtggccagtggtccaagcccggagatcaaagacttctttgtcatcatttactcggatcgctggctggcgacacccacacagacgtggcaggtctacctccactccctgcagcgcgtggatgtctcctgcgtcgcaggccagctgacccgcctgtcccttgtccttcgggggacacagacagtgaggaaagtgagagctttcacctctcatccccaggagctgaagacagaccccaaaggtgtcttcgtgctgccgcctcgtggggtgcaggacctgcatgttggcgtgaggccccttagggccggcagccgctttgtccatctcaacctggtggacgtggattgccaccagctggtggcctcctggctcgtgtgcctctgctgccgccagccgctcatctccaaggcctttgagatcatgttggctgcgggcgaagggaagggtgtcaacaagaggatcacctacaccaacccctacccctcccggaggacattccacctgcacagcgaccacccggagctgctgcggttcagagaggactccttccaggtcgggggtggagagacctacaccatcggcttgcagtttgcgcctagtcagagagtgggtgaggaggagatcctgatctacatcaatgaccatgaggacaaaaacgaagaggcattttgcgtgaaggtcatctaccagtgagggcttgagggtgacgtccttcctgcggcacccagctggggcctgtctgtgcccctcctgccctgcaggctgtcctccccgcctctctgcagcctttcacttcagtgcccacctggctgacctgtgcacttggctgaggaagcagagaccgagcgctggtcattttgtagtacctgcatccagcttagctgctgctgacacccagcaggcctgggttccgtgagcgcgaactccgtggtggtgggtctggctctggtgctgccatctacgcatgtgggaccctcgttatcgctgttgctcaaaatgtattttatgaatcatcctaaatgagaaaattatgtttttcttactggattttgtacaaacataatctattatttgctatgcaatattttatgctggtattatatctgttttttaaattgttgaacaaaatactaaacttttacacgtct

SEQ ID NO: 338285 - DNA, 5548 bp, Homo sapiens
ggcgacagtgacgcgaggcgggttcttggactgagtgtgcggcgcggtgcgccgccttccgaggctcctcccgcgggtggcagcggacggggcgcgcccctcggccagtcctcggtcctcaggcttgtggctccgttgagcaccggccgccgggcctctgggtccgtcgagtggagactctctgaaaagcgtgggctccgtggcctccggcgcggccgcggcgggtcggtctcctagagagcgcgccagccttggaaggaatccacggcattccagtgtgtcctcaagtggctggacggaccggtaattaggcagggcgtgctggaggtactgtcagaggttgaatgccatctgcgagtgtctttctttgatgtcacctaccggcacttctttgggaggacgtggaaaaccacagtgaagccgacgaagagaccgccgtccaggatcgtctttaatgagcccttgtattttcacacatccctaaaccaccctcatatcgtggctgtggtggaagtggtcgctgagggcaagaaacgggatgggagcctccagacattgtcctgtgggtttggaattcttcggatcttcagcaaccagccggactctcctatctctgcttcccaggacaaaaggttgcggctgtaccatggcacccccagagccctcctgcacccgcttctccaggaccccgcagagcaaaacagacacatgaccctcattgagaactgcagcctgcagtacacgctgaagccacacccggccctggagcctgcgttccaccttcttcctgagaaccttctggtgtctggtctgcagcagatacctggcctgcttccagctcatggagaatccggcgacgctctccgaaagcctcgcctccagaagcccatcacggggcacttggatgacttattcttcaccctgtacccctccctggagaagtttgaggaagagctgctggagctccacgtccaggaccacttccaggagggatgtggcccactggacggtggtgccctggagatcctggagcggcgcctgcgtgtgggcgtgcacaatggtctgggcttcgtgcagaggccgcaggtcgttgtactggtgcctgagatggatgtggccttgacgcgctcagctagcttcagcaggaaagtggtctcctcttccaagaccagctccgggagccaagctctggttttgagaagccgcctccgcctcccagagatggtcggccaccctgcatttgcggtcatcttccagctggagtacgtgttcagcagccctgcaggagtggacggcaatgcagcttcggtcacctctctgtccaacctggcatgcatgcacatggtccgctgggctgtttggaaccccttgctggaagctgattctggaagggtgaccctgcctctgcagggtgggatccagcccaacccctcgcactgtctggtctacaaggtaccctcagccagcatgagctctgaagaggtgaagcaggtggagtcgggtacactccggttccagttctcgctgggctcagaagaacacctggatgcacccacggagcctgtcagtggccccaaagtggagcggcggccttccaggaaaccacccacgtccccttcgagcccgccagcgccagtacctcgagttctcgctgccccgcagaactcacctgtgggaccagggttgtcaatttcccagctggcggcctccccgcggtccccgactcagcactgcttggccaggcctacttcacagctaccccatggctctcaggcctccccggcccaggcagagttcccgttggaggccggtatctcccacctggaagccgacctgagccagacctccctggtcctggaaacatccattgccgaacagttacaggagctgccgttcacgcctttgcatgcccctattgttgtgggaacccagaccaggagctctgcagggcagccctcgagagcctccatggtgctcctgcagtcctccggctttcccgagattctggatgccaataaacagccagccgaggctgtcagcgctacagaacctgtgacgtttaaccctcagaaggaagaatcagattgtctacaaagcaacgagatggtgctacagtttcttgcctttagcagagtggcccaggactgccgaggaacatcatggccaaagactgtgtatttcaccttccagttctaccgcttcccacccgcaacgacgccacgactgcagctggtccagctggatgaggccggccagcccagctctggcgccctgacccacatcctcgtgcctgtgagcagagatggcacctttgatgctgggtctcctggcttccagctgaggtacatggtgggccctgggttcctgaagccaggtgagcggcgctgctttgcccgctacctggccgtgcagaccctgcagattgacgtctgggacggagactccctgctgctcatcggatctgctgccgtccagatgaaggagacttctcatatcttctcagtctcccagtgactgaggttccggaatcatcgatgtctatgcagtgatcgtatgcagtgtagacgagtgtggcaaagcgaccagggtctgcggcgaccggaagcccccagacccacaagggaagggtcagcatctcctccgccaaggccggccggctgtgcaggcctcccacgagcttgaggtcgtggcaactgaatacgagcaggacaacatggtggtgagtggagacatgctggggtttggccgcgtcaagcccatcggcgtccactcggtggtgaagggccggctgcacctgactttggccaacgtgggtcacccgtgtgaacagaaagtgagaggttgtagcacattgccaccgtccagatctcgggtcatctcaaacgatggagccagccgcttctctggaggcagcctcctcacgactggaagctcaaggcgaaaacacgtggtgcaagcacagaagctggcggacgtggacagtgagctggctgccatgctactgacccatgcccggcagggcaaggggccccaggacgtcagccgcgagtcggatgccacccgcaggcgtaagctggagcggatgaggtctgtgcgcctgcaggaggccgggggagacttgggccggcgcgggacgagcgtgttggcgcagcagagcgtccgcacacagcacttgcgggacctacaggtcatcgccgcctaccgggaacgcacgaaggccgagagcatcgccagcctgctgagcctggccatcaccacggagcacacgctccacgccacgctgggggtcgccgagttctttgagtttgtgcttaagaacccccacaacacacagcacacggtgactgtggagatcgacaaccccgagctcagcgtcatcgtggacagtcaggagtggagggacttcaagggtgctgctggcctgcacacaccggtggaggaggacatgttccacctgcgtggcagcctggccccccagctctacctgcgcccccacgagaccgcccacgtccccttcaagttccagagcttctctgcagggcagctggccatggtgcaggcctctcctgggttgagcaacgagaagggcatggacgccgtgtcaccttggaagtccagcgcagtgcccactaaacacgccaaggtcttgttccgagcgagtggtggcaagcccatcgccgtgctctgcctgactgtggagctgcagccccacgtggtggaccaggtcttccgcttctatcacccggagctctccttcctgaagaaggccatccgcctgccgccctggcacacatttccaggtgctccggtgggaatgcttggtgaggaccccccagtccatgttcgctgcagcgacccgaacgtcatctgtgagacccagaatgtgggccccggggaaccacgggacatatttctgaaggtggccagtggtccaagcccggagatcaaagacttctttgtcatcatttactcggatcgctggctggcgacacccacacagacgtggcaggtctacctccactccctgcagcgcgtggatgtctcctgcgtcgcaggccagctgacccgcctgtcccttgtccttcgggggacacagacagtgaggaaagtgagagctttcacctctcatccccaggagctgaagacagaccccaaaggtgtcttcgtgctgccgcctcgtggggtgcaggacctgcatgttggcgtgaggccccttagggccggcagccgctttgtccatctcaacctggtggacgtggattgccaccagctggtggcctcctggctcgtgtgcctctgctgccgccagccgctcatctccaaggcctttgagatcatgttggctgcgggcgaagggaagggtgtcaacaagaggatcacctacaccaacccctacccctcccggaggacattccacctgcacagcgaccacccggagctgctgcggttcagagaggactccttccaggtgtggtggggctgtgcctgggactcctaggggaagacccggggacctgaatggagggcagttagcctgcatttaggagcgagttcctcaaatcaccagcagtcttccaaaagccccagggcggtgacaggtaccatcccatagttgggtgggcccgttgtatctttagtagctggagatttagcaaagtttctcctgagtgtgggaaagggtgttgtgcccagggcttttcatggtaatgttagacagctcagtctcggaaataagtgtgccttcgagtccaagtaacgcgtcacactggctgagcactggttcccatccttgtaccgggcgctgaagtcaaaggcaggccttggatgcacccgcagggctcccctgccttgtcagctccccttggaaataaacacgaccatgcagagaggttgctggtgagagcgtgggacagcccgggggtggatgctgggatttggatgcttatttccaggtcgggggtggagagacctacaccatcggcttgcagtttgcgcctagtcagagagtgggtgaggaggagatcctgatctacatcaatgaccatgaggacaaaaacgaagaggcattttgcgtgaaggtcatctaccagtgagggcttgagggtgacgtccttcctgcggcacccagctggggcctgtctgtgcccctcctgccctgcaggctgtcctccccgcctctctgcagcctttcacttcagtgcccacctggctgacctgtgcacttggctgaggaagcagagaccgagcgctggtcattttgtagtacctgcatccagcttagctgctgctgacacccagcaggcctgggttccgtgagcgcgaactccgtggtggtgggtctggctctggtgctgccatctacgcatgtgggaccctcgttatcgctgttgctcaaaatgtattttatgaatcatcctaaatgagaaaattatgtttttcttactggattttgtacaaacataatctattatttgctatgcaatattttatgctggtattatatctgttttttaaattgttgaacaaaatactaaacttttacacgtct

SEQ ID NO: 338286 - DNA, 3274 bp, Homo sapiens
  misc_feature (49)..(49): n is a, c, g, or t
ccggaggccttaaccctggaggctgggagaccagcagaaggtgtgagtncaggctagacacattggcggcttggaccaaggtgggacagtgaaggtggaggcaagtggactggacatgttcccgtgggtttaggggcagaatcaacaagacttggtacgtgcagtgcctgtgagcagagatggcacctttgatgctgggtctcctggcttccagctgaggtacatggtgggccctgggttcctgaagccaggtgagcggcgctgctttgcccgctacctggccgtgcagaccctgcagattgacgtctgggacggagactccctgctgctcatcggatctgctgccgtccagatgaagcatctcctccgccaaggccggccggctgtgcaggcctcccacgagcttgaggtcgtggcaactgaatacgagcaggacaacatggtggtgagtggagacatgctggggtttggccgcgtcaagcccatcggcgtccactcggtggtgaagggccggctgcacctgactttggccaacgtgggtcacccgtgtgaacagaaagtgagaggttgtagcacattgccaccgtccagatctcgggtcatctcaaacgatggagccagccgcttctctggaggcagcctcctcacgactggaagctcaaggcgaaaacacgtggtgcaagcacagaagctggcggacgtggacagtgagctggctgccatgctactgacccatgcccggcagggcaaggggccccaggacgtcagccgcgagtcggatgccacccgcaggcgtaagctggagcggatgaggtctgtgcgcctgcaggaggccgggggagacttgggccggcgcgggacgagcgtgttggcgcagcagagcgtccgcacacagcacttgcgggacctacaggtcatcgccgcctaccgggaacgcacgaaggccgagagcatcgccagcctgctgagcctggccatcaccacggagcacacgctccacgccacgctgggggtcgccgagttctttgagtttgtgcttaagaacccccacaacacacagcacacggtgactgtggagatcgacaaccccgagctcagcgtcatcgtggacagtcaggagtggagggacttcaagggtgctgctggcctgcacacaccggtggaggaggacatgttccacctgcgtggcagcctggccccccagctctacctgcgcccccacgagaccgcccacgtccccttcaagttccagagcttctctgcagggcagctggccatggtgcaggcctctcctgggttgagcaacgagaagggcatggacgccgtgtcaccttggaagtccagcgcagtgcccactaaacacgccaaggtcttgttccgagcgagtggtggcaagcccatcgccgtgctctgcctgactgtggagctgcagccccacgtggtggaccaggtcttccgcttctatcacccggagctctccttcctgaagaaggccatccgcctgccgccctggcacacatttccaggtgctccggtgggaatgcttggtgaggaccccccagtccatgttcgctgcagcgacccgaacgtcatctgtgagacccagaatgtgggccccggggaaccacgggacatatttctgaaggtggccagtggtccaagcccggagatcaaagacttctttgtcatcatttactcggatcgctggctggcgacacccacacagacgtggcaggtctacctccactccctgcagcgcgtggatgtctcctgcgtcgcaggccagctgacccgcctgtcccttgtccttcgggggacacagacagtgaggaaagtgagagctttcacctctcatccccaggagctgaagacagaccccaaaggtgtcttcgtgctgccgcctcgtggggtgcaggacctgcatgttggcgtgaggccccttagggccggcagccgctttgtccatctcaacctggtggacgtggattgccaccagctggtggcctcctggctcgtgtgcctctgctgccgccagccgctcatctccaaggcctttgagatcatgttggctgcgggcgaagggaagggtgtcaacaagaggatcacctacaccaacccctacccctcccggaggacattccacctgcacagcgaccacccggagctgctgcggttcagagaggactccttccaggtgtggtggggctgtgcctgggactcctaggggaagacccggggacctgaatggagggcagttagcctgcatttaggagcgagttcctcaaatcaccagcagtcttccaaaagccccagggcggtgacaggtaccatcccatagttgggtgggcccgttgtatctttagtagctggagatttagcaaagtttctcctgagtgtgggaaagggtgttgtgcccagggcttttcatggtaatgttagacagctcagtctcggaaataagtgtgccttcgagtccaagtaacgcgtcacactggctgagcactggttcccatccttgtaccgggcgctgaagtcaaaggcaggccttggatgcacccgcagggctcccctgccttgtcagctccccttggaaataaacacgaccatgcagagaggttgctggtgagagcgtgggacagcccgggggtggatgctgggatttggatgcttatttccaggtcgggggtggagagacctacaccatcggcttgcagtttgcgcctagtcagagagtgggtgaggaggagatcctgatctacatcaatgaccatgaggacaaaaacgaagaggcattttgcgtgaaggtcatctaccagtgagggcttgagggtgacgtccttcctgcggcacccagctggggcctgtctgtgcccctcctgccctgcaggctgtcctccccgcctctctgcagcctttcacttcagtgcccacctggctgacctgtgcacttggctgaggaagcagagaccgagcgctggtcattttgtagtacctgcatccagcttagctgctgctgacacccagcaggcctgggttccgtgagcgcgaactccgtggtggtgggtctggctctggtgctgccatctacgcatgtgggaccctcgttatcgctgttgctcaaaatgtattttatgaatcatcctaaatgagaaaattatgtttttcttactggattttgtacaaacataatctattatttgctatgcaatattttatgctggtattatatctgttttttaaattgttgaacaaaatactaaacttttacacgtct

SEQ ID NO: 338287 - DNA, 3299 bp, Homo sapiens
  misc_feature (3292)..(3299): n is a, c, g, or t
ggcgacagtgacgcgaggcgggttcttggactgagtgtgcggcgcggtgcgccgccttccgaggctcctcccgcgggtggcagcggacggggcgcgcccctcggccagtcctcggtcctcaggcttgtggctccgttgagcaccggccgccgggcctctgggtccgtcgagtggagactctctgaaaagcgtgggctccgtggcctccggcgcggccgcggcgggtcggtctcctagagagcgcgccagccttggaaggaatccacggcattccagtgtgtcctcaagtggctggacggaccggtaattaggcagggcgtgctggaggtactgtcagaggttgaatgccatctgcgagtgtctttctttgatgtcacctaccggcacttctttgggaggacgtggaaaaccacagtgaagccgacgaagagaccgccgtccaggatcgtctttaatgagcccttgtattttcacacatccctaaaccaccctcatatcgtggctgtggtggaagtggtcgctgagggcaagaaacgggatgggagcctccagacattgtcctgtgggtttggaattcttcggatcttcagcaaccagccggactctcctatctctgcttcccaggacaaaaggttgcggctgtaccatggcacccccagagccctcctgcacccgcttctccaggaccccgcagagcaaaacagacacatgaccctcattgagaactgcagcctgcagtacacgctgaagccacacccggccctggagcctgcgttccaccttcttcctgagaaccttctggtgtctggtctgcagcagatacctggcctgcttccagctcatggagaatccggcgacgctctccgaaagcctcgcctccagaagcccatcacggggcacttggatgacttattcttcaccctgtacccctccctggagaagtttgaggaagagctgctggagctccacgtccaggaccacttccaggagggatgtggcccactggacggtggtgccctggagatcctggagcggcgcctgcgtgtgggcgtgcacaatggtctgggcttcgtgcagaggccgcaggtcgttgtactggtgcctgagatggatgtggccttgacgcgctcagctagcttcagcaggaaagtggtctcctcttccaagaccagctccgggagccaagctctggttttgagaagccgcctccgcctcccagagatggtcggccaccctgcatttgcggtcatcttccagctggagtacgtgttcagcagccctgcaggagtggacggcaatgcagcttcggtcacctctctgtccaacctggcatgcatgcacatggtccgctgggctgtttggaaccccttgctggaagctgattctggaagggtgaccctgcctctgcagggtgggatccagcccaacccctcgcactgtctggtctacaaggtaccctcagccagcatgagctctgaagaggtgaagcaggtggagtcgggtacactccggttccagttctcgctgggctcagaagaacacctggatgcacccacggagcctgtcagtggccccaaagtggagcggcggccttccaggaaaccacccacgtccccttcgagcccgccagcgccagtacctcgagttctcgctgccccgcagaactcacctgtgggaccagggttgtcaatttcccagctggcggcctccccgcggtccccgactcagcactgcttggccaggcctacttcacagctaccccatggctctcaggcctccccggcccaggcagagttcccgttggaggccggtatctcccacctggaagccgacctgagccagacctccctggtcctggaaacatccattgccgaacagttacaggagctgccgttcacgcctttgcatgcccctattgttgtgggaacccagaccaggagctctgcagggcagccctcgagagcctccatggtgctcctgcagtcctccggctttcccgagattctggatgccaataaacagccagccgaggctgtcagcgctacagaacctgtgacgtttaaccctcagaaggaagaatcagattgtctacaaagcaacgagatggtgctacagtttcttgcctttagcagagtggcccaggactgccgaggaacatcatggccaaagactgtgtatttcaccttccagttctaccgcttcccacccgcaacgacgccacgactgcagctggtccagctggatgaggccggccagcccagctctggcgccctgacccacatcctcgtgcctgtgagcagagatggcacctttgatgctgggtctcctggcttccagctgaggtacatggtgggccctgggttcctgaagccaggtgagcggcgctgctttgcccgctacctggccgtgcagaccctgcagattgacgtctgggacggagactccctgctgctcatcggatctgctgccgtccagatgaaggagacttctcatatcttctcagtctcccagtgactgaggttccggaatcatcgatgtctatgcagtgatcgtatgcagtgtagacgagtgtggcaaagcgaccagggtctgcggcgaccggaagcccccagacccacaagggaagggtcagcatctcctccgccaaggccggccggctgtgcaggcctcccacgagcttgaggtcgtggcaactgaatacgagcaggacaacatggtggtgagtggagacatgctggggtttggccgcgtcaagcccatcggcgtccactcggtggtgaagggccggctgcacctgactttggccaacgtgggagagacttccctgtgcctcatgatggaggacagacaagggaagtgttcctaacttccctgcagcccgggaggaggagagtgaagaggcgcatttcttctcggcccagcaccatgactttgtagaaaatggtgccccgggattgctcgttagagggcctgagcaaagccctggacttcactccacgtccaggactgtggtgggtgggacaggtgggttgggtggctcaggagggtcccacctgggacgttccaggggcttcgactgaggcctatgctgggataggggctgctgatggggtgtcaagggacacaaggctgggtgcctgcctgtgcgcacctcagggcagaggaccgacatgggaccctgtagggccagtgacaagctcactgaacctcccgagggtcctctggaacgtttgggatttttcagggcagaattgaaaacacaataaaactaagccgtgtgatgtttctgaannnnnnnn

SEQ ID NO: 338288 - DNA, 272 bp, Homo sapiens
agatcaatgcctttcacttgaggcggaacagagcaccacttcactctccctagaaaagtccttttcctgtttgtggtgtttctaacattctctgttaattggctggtttgactggaagcacctttgctttcagctatcagttgatcacattgtgttttcttcaccagaaaacagacacatgaccctcattgagaactgcagcctgcagtacacgctgaagccacacccggccctggagcctgcgttccaccttcttcctgagaaccttctgg

SEQ ID NO: 338289 - DNA, 474 bp, Homo sapiens
gccacatcatgggcttcacgggcccaggaggaaaccgggagaattctcaccagcttggccatggagcctgtgtccttggccgctgagtctgtcctggacccagttgtttgcattctgaatttctgattggggttagaggtcatcagtcatctcgggctctcctgcatgttgttgtttgttgctatccctggaggatctccgggacagtcctcaaatacagtgactgggttccaggagagacttccctgtgcctcatgatggaggacagacaagggaagtgttcctaacttccctgcagcccgggaggaggagagtgaagaggcgcatttcttctcggcccagcaccatgactttgtagaaaatggtgccccgggattgctcgttagagggcctgagcaaagccctggacttcactccacgtccaggactgtggtgggtgggacaggtgggttgggtggctcaggagggtcccac

SEQ ID NO: 338290 - DNA, 193 bp, Homo sapiens
cgccccggaaccacccatgaccttgggctcccctggctgattgggctgcaggcgcccaggagccccttgcttgcacatcctgagaggctgtgctctgacccgcctctctcgctcttgaagacagaccccaaaggtgtcttcgtgctgccgcctcgtggggtgcaggacctgcatgttggcgtgaggcccctta

SEQ ID NO: 338291 - DNA, 218 bp, Homo sapiens
gtggtgggtctggctctggtgctgccatctacgcatgtgggaccctcgttatcgctgttgctcaaaatgtattttatgaatcatcctaaatgagaaaattatgtttttcttactggattttgtacaaacataatctattatttgctatgcaatattttatgctggtattatatctgttttttaaattgttgaacaaaatactaaacttttacacgtct

SEQ ID NO: 338292 - DNA, 753 bp, Homo sapiens
ggcgacagtgacgcgaggcgggttcttggactgagtgtgcggcgcggtgcgccgccttccgaggctcctcccgcgggtggcagcggacggggcgcgcccctcggccagtcctcggtcctcaggcttgtggctccgttgagcaccggccgccgggcctctgggtccgtcgagtggagactctctgaaaagcgtgggctccgtggcctccggcgcggccgcggcgggtcggtctcctagatcatccgggaagcccacgggaccctcaggcgggcaggatgaacgactggcacaggatcttcacccaaaacgtgcttgtccctccccacccacagagagcgcgccagccttggaaggaatccacggcattccagtgtgtcctcaagtggctggacggaccggtaattaggcagggcgtgctggaggtactgtcagaggttgaatgccatctgcgagtgtctttctttgatgtcacctaccggcacttctttgggaggacgtggaaaaccacagtgaagccgacgaagagaccgccgtccaggatcgtctttaatgagcccttgtattttcacacatccctaaaccaccctcatatcgtggctgtggtggaagtggtcgctgagggcaagaaacgggatgggagcctccagacattgtcctgtgggtttggaattcttcggatcttcagcaaccagccggactctcctatctctgcttcccaggacaaaaggtacctgccttgtttctacaaccctg

SEQ ID NO: 338293 - DNA, 3039 bp, Homo sapiens
ctctgaggagcctggtctgcctgaatggggatgacatttcagagatcaggatatggggtgctttgattctgggtcttcttgcttcaaaacctttcaccaggaagagctgggaaaatgtaaaatcatctcctccgccaaggccggccggctgtgcaggcctcccacgagcttgaggtcgtggcaactgaatacgagcaggacaacatggtggtgagtggagacatgctggggtttggccgcgtcaagcccatcggcgtccactcggtggtgaagggccggctgcacctgactttggccaacgtgggtcacccgtgtgaacagaaagtgagaggttgtagcacattgccaccgtccagatctcgggtcatctcaaacgatggagccagccgcttctctggaggcagcctcctcacgactggaagctcaaggcgaaaacacgtggtgcaagcacagaagctggcggacgtggacagtgagctggctgccatgctactgacccatgcccggcagggcaaggggccccaggacgtcagccgcgagtcggatgccacccgcaggcgtaagctggagcggatgaggtctgtgcgcctgcaggaggccgggggagacttgggccggcgcgggacgagcgtgttggcgcagcagagcgtccgcacacagcacttgcgggacctacaggtcatcgccgcctaccgggaacgcacgaaggccgagagcatcgccagcctgctgagcctggccatcaccacggagcacacgctccacgccacgctgggggtcgccgagttctttgagtttgtgcttaagaacccccacaacacacagcacacggtgactgtggagatcgacaaccccgagctcagcgtcatcgtggacagtcaggagtggagggacttcaagggtgctgctggcctgcacacaccggtggaggaggacatgttccacctgcgtggcagcctggccccccagctctacctgcgcccccacgagaccgcccacgtccccttcaagttccagagcttctctgcagggcagctggccatggtgcaggcctctcctgggttgagcaacgagaagggcatggacgccgtgtcaccttggaagtccagcgcagtgcccactaaacacgccaaggtcttgttccgagcgagtggtggcaagcccatcgccgtgctctgcctgactgtggagctgcagccccacgtggtggaccaggtcttccgcttctatcacccggagctctccttcctgaagaaggccatccgcctgccgccctggcacacatttccaggtgctccggtgggaatgcttggtgaggaccccccagtccatgttcgctgcagcgacccgaacgtcatctgtgagacccagaatgtgggccccggggaaccacgggacatatttctgaaggtggccagtggtccaagcccggagatcaaagacttctttgtcatcatttactcggatcgctggctggcgacacccacacagacgtggcaggtctacctccactccctgcagcgcgtggatgtctcctgcgtcgcaggccagctgacccgcctgtcccttgtccttcgggggacacagacagtgaggaaagtgagagctttcacctctcatccccaggagctgaagacagaccccaaaggtgtcttcgtgctgccgcctcgtggggtgcaggacctgcatgttggcgtgaggccccttagggccggcagccgctttgtccatctcaacctggtggacgtggattgccaccagctggtggcctcctggctcgtgtgcctctgctgccgccagccgctcatctccaaggcctttgagatcatgttggctgcgggcgaagggaagggtgtcaacaagaggatcacctacaccaacccctacccctcccggaggacattccacctgcacagcgaccacccggagctgctgcggttcagagaggactccttccaggtgtggtggggctgtgcctgggactcctaggggaagacccggggacctgaatggagggcagttagcctgcatttaggagcgagttcctcaaatcaccagcagtcttccaaaagccccagggcggtgacaggtaccatcccatagttgggtgggcccgttgtatctttagtagctggagatttagcaaagtttctcctgagtgtgggaaagggtgttgtgcccagggcttttcatggtaatgttagacagctcagtctcggaaataagtgtgccttcgagtccaagtaacgcgtcacactggctgagcactggttcccatccttgtaccgggcgctgaagtcaaaggcaggccttggatgcacccgcagggctcccctgccttgtcagctccccttggaaataaacacgaccatgcagagaggttgctggtgagagcgtgggacagcccgggggtggatgctgggatttggatgcttatttccaggtcgggggtggagagacctacaccatcggcttgcagtttgcgcctagtcagagagtgggtgaggaggagatcctgatctacatcaatgaccatgaggacaaaaacgaagaggcattttgcgtgaaggtcatctaccagtgagggcttgagggtgacgtccttcctgcggcacccagctggggcctgtctgtgcccctcctgccctgcaggctgtcctccccgcctctctgcagcctttcacttcagtgcccacctggctgacctgtgcacttggctgaggaagcagagaccgagcgctggtcattttgtagtacctgcatccagcttagctgctgctgacacccagcaggcctgggttccgtgagcgcgaactccgtggtggtgggtctggctctggtgctgccatctacgcatgtgggaccctcgttatcgctgttgctcaaaatgtattttatgaatcatcctaaatgagaaaattatgtttttcttactggattttgtacaaacataatctattatttgctatgcaatattttatgctggtattatatctgttttttaaattgttgaacaaaatactaaacttttacacgtct

SEQ ID NO: 338294 - DNA, 2288 bp, Homo sapiens
agcggcttcatgccctggtgctgtcagagcagcacgtggggcctggggaattctctctcctgcctttatggtttgaaacggtgtccctcttgccacctctgagatgactaggtgcgcatttgccggctgagtctgcccttctaaaaaatcccagctcccgcggcccaggtccaggtgtgcctggaggaacacctacctcctcacctgacggcccgcgtgtttctggtaggtgccccttacagcagagtgcaggcttccctgctccagggagctgtgttttcttttttgtggccccctcgattattccctgtggagatggctgcagccgagccgcagtgggctggatgggcggtgtccatgcagggaacacagtgcttggatgctgtcctgggaaaggtggcggcgtccgtttccccagcaggtgtcttgctgagcacctgtgacgagcctgtcctgtcctatagtgtgtaatgtgtggggccttctccacacaggctggggctgtggagaagactctttttgacatttcccctgctccaggtgctccggtgggaatgcttggtgaggaccccccagtccatgttcgctgcagcgacccgaacgtcatctgtgagacccagaatgtgggccccggggaaccacgggacatatttctgaaggtggccagtggtccaagcccggagatcaaagacttctttgtcatcatttactcggatcgctggctggcgacacccacacagacgtggcaggtctacctccactccctgcagcgcgtggatgtctcctgcgtcgcaggccagctgacccgcctgtcccttgtccttcgggggacacagacagtgaggaaagtgagagctttcacctctcatccccaggagctgaagacagaccccaaaggtgtcttcgtgctgccgcctcgtggggtgcaggacctgcatgttggcgtgaggccccttagggccggcagccgctttgtccatctcaacctggtggacgtggattgccaccagctggtggcctcctggctcgtgtgcctctgctgccgccagccgctcatctccaaggcctttgagatcatgttggctgcgggcgaagggaagggtgtcaacaagaggatcacctacaccaacccctacccctcccggaggacattccacctgcacagcgaccacccggagctgctgcggttcagagaggactccttccaggtgtggtggggctgtgcctgggactcctaggggaagacccggggacctgaatggagggcagttagcctgcatttaggagcgagttcctcaaatcaccagcagtcttccaaaagccccagggcggtgacaggtaccatcccatagttgggtgggcccgttgtatctttagtagctggagatttagcaaagtttctcctgagtgtgggaaagggtgttgtgcccagggcttttcatggtaatgttagacagctcagtctcggaaataagtgtgccttcgagtccaagtaacgcgtcacactggctgagcactggttcccatccttgtaccgggcgctgaagtcaaaggcaggccttggatgcacccgcagggctcccctgccttgtcagctccccttggaaataaacacgaccatgcagagaggttgctggtgagagcgtgggacagcccgggggtggatgctgggatttggatgcttatttccaggtcgggggtggagagacctacaccatcggcttgcagtttgcgcctagtcagagagtgggtgaggaggagatcctgatctacatcaatgaccatgaggacaaaaacgaagaggcattttgcgtgaaggtcatctaccagtgagggcttgagggtgacgtccttcctgcggcacccagctggggcctgtctgtgcccctcctgccctgcaggctgtcctccccgcctctctgcagcctttcacttcagtgcccacctggctgacctgtgcacttggctgaggaagcagagaccgagcgctggtcattttgtagtacctgcatccagcttagctgctgctgacacccagcaggcctgggttccgtgagcgcgaactccgtggtggtgggtctggctctggtgctgccatctacgcatgtgggaccctcgttatcgctgttgctcaaaatgtattttatgaatcatcctaaatgagaaaattatgtttttcttactggattttgtacaaacataatctattatttgctatgcaatattttatgctggtattatatctgttttttaaattgttgaacaaaatactaaacttttacacgtct

SEQ ID NO: 338295 - DNA, 2024 bp, Homo sapiens
ggcgacagtgacgcgaggcgggttcttggactgagtgtgcggcgcggtgcgccgccttccgaggctcctcccgcgggtggcagcggacggggcgcgcccctcggccagtcctcggtcctcaggcttgtggctccgttgagcaccggccgccgggcctctgggtccgtcgagtggagactctctgaaaagcgtgggctccgtggcctccggcgcggccgcggcgggtcggtctcctagagagcgcgccagccttggaaggaatccacggcattccagtgtgtcctcaagtggctggacggaccggtaattaggcagggcgtgctggaggtactgtcagaggttgaatgccatctgcgagtgtctttctttgatgtcacctaccggcacttctttgggaggacgtggaaaaccacagtgaagccgacgaagagaccgccgtccaggatcgtctttaatgagcccttgtattttcacacatccctaaaccaccctcatatcgtggctgtggtggaagtggtcgctgagggcaagaaacgggatgggagcctccagacattgtcctgtgggtttggaattcttcggatcttcagcaaccagccggactctcctatctctgcttcccaggacaaaaggttgcggctgtaccatggcacccccagagccctcctgcacccgcttctccaggaccccgcagagcaaaacagacacatgaccctcattgagaactgcagcctgcagtacacgctgaagccacacccggccctggagcctgcgttccaccttcttcctgagaaccttctggtgtctggtctgcagcagatacctggcctgcttccagctcatggagaatccggcgacgctctccgaaagcctcgcctccagaagcccatcacggggcacttggatgacttattcttcaccctgtacccctccctggagaagtttgaggaagagctgctggagctccacgtccaggaccacttccaggagggatgtggcccactggacggtggtgccctggagatcctggagcggcgcctgcgtgtgggcgtgcacaatggtctgggcttcgtgcagaggccgcaggtcgttgtactggtgcctgagatggatgtggccttgacgcgctcagctagcttcagcaggaaagtggtctcctcttccaagaccagctccgggagccaagctctggttttgagaagccgcctccgcctcccagagatggtcggccaccctgcatttgcggtcatcttccagctggagtacgtgttcagcagccctgcaggagtggacggcaatgcagcttcggtcacctctctgtccaacctggcatgcatgcacatggtccgctgggctgtttggaaccccttgctggaagctgattctggaagggtgaccctgcctctgcagggtgggatccagcccaacccctcgcactgtctggtctacaaggtaccctcagccagcatgagctctgaagaggtgaagcaggtggagtcgggtacactccggttccagttctcgctgggctcagaagaacacctggatgcacccacggagcctgtcagtggccccaaagtggagcggcggccttccaggaaaccacccacgtccccttcgagcccgccagcgccagtacctcgagttctcgctgccccgcagaactcacctgtgggaccagggttgtcaatttcccagctggcggcctccccgcggtccccgactcagcactgcttggccaggcctacttcacagctaccccatggctctcaggcctccccggcccaggcagagttcccgttggaggccggtatctcccacctggtgctgccatctacgcatgtgggaccctcgttatcgctgttgctcaaaatgtattttatgaatcatcctaaatgagaaaattatgtttttcttactggattttgtacaaacataatctattatttgctatgcaatattttatgctggtattatatctgttttttaaattgttgaacaaaatactaaacttttacacgtct

SEQ ID NO: 338296 - DNA, 412 bp, Homo sapiens
caagataacggagcacattgaaataagagacagacgtatggaaacagttttgaaaatatgggaaaacatgtacacatacacagaatgtgatctacaatgtaatacatccattgtatatttaacagttaaaacatggaggaagagagtctatctctaggtagctgattgcattttctcctttatattattttgtattttttccttcatgagcgtgtggtccccttatgataagagagctagtattttgcagtgtaagcaagtcctctttgaccctgtctcttttgtggacttgcaagggactttagttggtggccataaggctgcttggaagtctttttgagcacacagatggtcttttattcctcctgacttcttcaaatcagcttctgccttgatcttatggtaaaggacc

SEQ ID NO: 338297 - DNA, 283 bp, Homo sapiens
gtggggctcttgaatccctagctcaggagaatcaaggagcaggtggtgcctgggaggctaaacactgctaagtctgcatttattcctttagctgtatctgtgcattaattcaataagatggtctaataaaataatgcattttcaaaatgcttagctggcatttggggagggggtgggcattttcattatttactaaggaatgcattttgaaggaatttgtgactgaagacagcttgcgctgtaggctgctctcgcctccaggggtcacccttccctttaatga

SEQ ID NO: 338298 - DNA, 101 bp, Homo sapiens
gtcccagaaagaccgcaagaacccgctgccccccagcgttggcgtggttgacaagaaagaggagacgcagccgcccatggcgcttaagaaagaaggaataa

SEQ ID NO: 338299 - DNA, 309 bp, Homo sapiens
aagatgttttaaaaacaaatgtcaacggatggctcaaagcccacttgtgagaatctaaggagacagcagcgttagtgccacctttttcttaacttttcatagcccatgtatctttccactggatggcatccaatgacattttgggggccagagaagggaaggaggtcatgttggagaaggcagcatttctggattacagaagcattataggaaatgatatattgagatgtaaacagggaaagaggttttttccaatttgttctttttcatgaaatttaccaggtcattttatcttcaagtccaaatcta

SEQ ID NO: 338300 - DNA, 384 bp, Homo sapiens
taagttagccctgacaggaagattgcagtctagttggaaaggaaatactaaaatatgcaaaacaataattttatgttgtggatctattctatacaaggaattaatgtatcaagggataaaagtataaggcacaatgactatcctcagactgctaatagtctagtagaggctgagacagagaatttcaaagtctacaagttttgagatgagttgagtattaattcacctgccacaagagccgtgaggtgtagagcaagcttgtccaacctgcggttcatgcggcccaggatggctttgaatacagcccaacacaaatttgtaaactttcttaaaccattatgagggtttgtgtgtgtgtgtgtgtgtgtgtgtgtgtgtgtgtgt

SEQ ID NO: 338301 - DNA, 441 bp, Homo sapiens
ctcagatctccttcagataaaaataattaaacagaccaggcacggtggcttacgcctgtaatcccagcaccttgagaggccaaggcaggcggaccacccgaggtcaggagttcgagaccaacctgaccaacacggagaaaccctgtctctaccaaaatagccaggcatggtggcgcatgcctgcaatcccagccactcgggaggctgaggcaggataatcgcctgaacccgggaggcagaggttgtgatgagccgagatcgtgccattgcactccagcctgggtgggcaacaagagtgaaactctgtctcaaaacataataataataaaaattaaaacagtatttctcattcttacagccgctcaccatcttctctcaatcctgatagccactgctgcctaaataactaccccatttttgaatagttattacaattctttt

SEQ ID NO: 338302 - DNA, 369 bp, Homo sapiens
atcatctttcatattggttaacctacactaaaaagcttttatgccagtagctttaaatatattgcctatttactgcttacagcaatcctcaaagagttgtttatggatgacaaactaaatgtcaaagaagtaacctgttcaggtttacaagttcagggtccagttttgaacctaggccttcatcctctagagcccaccacctgtcacagtggatgttatcaacttttcacaagaatacagtctctttactattcagatgttatcctgtactggcacctctggagggctattgataatggaagtgcagagatctttgcagataatagcaggagaataagaagagatttggggtagggggcagaatctata

SEQ ID NO: 338303 - DNA, 177 bp, Homo sapiens
cctacgccaaggagtaccgaaagtacctggagctgaacaacaatgacattgcctcctttctcaaaacctaccagacgcagggcctgttggcccaggaggtgcgggaggtagtgctcacccacctgcgggagaaggagatcctggacagctcgctgcccagcagcatcatcattgggc

SEQ ID NO: 338304 - DNA, 719 bp, Homo sapiens
aagagacttaggtcattatatcatctgtaacttctagcaatgcagcagaatgttatgtatttaatgtgcataaaataaatgcattataattcaaaatgtaaccaaccagaaaacgaagagaaagttttcaagatggcataaaaatgtggcaagtgtttctgtttccatgccatacatttcttgcctccaagcaaatattcacattattctcctctctggaatacagtctcttcatcaaacacaactcttacccatcctttatataatccagcttctccattaagccttcctgtcatagaaagtataacaatgccacattttcatattgttccttctcttaatatctacagcacttattactacataatccaatccttaagtattgagtttttttcctcctaacaccaaatacatgatgtcttttccaataccacttctccgactctctgacatcaactaggtgccctacaattcaattctgacactacccagagttagcatcagactccacagatttaagtctcacaagactgccattacttcatacaccagtcacaagcatggggttccccaatcctctgattgatcaactgaccagcaataattgggggctcccaggccccctcctccagttaggtaatttggtgcaataactcacagaactcaggaaagcattttcttactagattattattataaaggatacaacccaagaacca

SEQ ID NO: 338305 - DNA, 827 bp, Homo sapiens
aagagacttaggtcattatatcatctgtaacttctagcaatgcagcagaatgttatgtatttaatgtgcataaaataaatgcattataattcaaaatgtaaccaaccagaaaacgaagagaaagttttcaagatggcataaaaatgtggcaagtgtttctgtttccatgccatacatttcttgcctccaagcaaatattcacattattctcctctctggaatacagtctcttcatcaaacacaactcttacccatcctttatataatccagcttctccattaagccttcctgtcatagaaagtataacaatgccacattttcatattgttccttctcttaatatctacagcacttattactacataatccaatccttaagtattgagtttttttcctcctaacaccaaatacatgatgtcttttccaataccacttctccgactctctgacatcaactaggtgccctacaattcaattctgacactacccagagttagcatcagactccacagatttaagtctcacaagactgccattacttcatacaccagtcacaagcatggggttccccaatcctctgattgatcaactgaccagcaataattgggggctcccaggccccctcctccagttaggtaatttgaagcatgggagacccaagtgaataaaatgtagtagacatttaaatattgcaagaatattaatatagcacctgtaatattgtaaagcaactgttctgatggactacaaaatctaaggctattaaatgtaatactgatgactggttgaggtaatcgtgagggggggatctctagaatcacttgca

SEQ ID NO: 338306 - DNA, 107 bp, Homo sapiens
caagagagtcttcacggtagagtagtattttaacttgacttgaagggtaggctgatttttaccaggcagagatgagggagtacattctaggcaacaagaagaggaaa

SEQ ID NO: 338307 - DNA, 522 bp, Homo sapiens
catgtagtctttaaacaacgttagaaaggaagaataaaaggactaatggactgttaatgtagaagctcaaatgtgaaactgaaatacattatatctttgattacgtaaaagtaaatttagctctcttatcaaacataagttatttagaaataagagtgacaaagtataataatgggatgcatagattgaaatttcatacaaataacctagaatcattcacttgtaattaataaaaggcatgatgagaaataatatgaaaatgtcccaggtactgtcaacaccattataatttcttactatcttgtttgagaaaaatgaggtaatggcagaaaggattcaagagctctgttgaatgttccatttttgtacaaaaacaaacagaaaaagagttaccaaaaaaaagttttaaaaattcattgaaaccaatatttcgaaaatgtgaatcaagtaaaatatgtgagatatttattatttaaaagaccatttgtgctagtcaatggttggtttaaaaccacagaacaa

SEQ ID NO: 338308 - DNA, 892 bp, Homo sapiens
  misc_feature (774)..(774): n is a, c, g, or t
  misc_feature (781)..(781): n is a, c, g, or t
tagtagagatggggtttcaccatgttggccaggctggtcttgaactcctgacctcaagtgatctgccagccttggcctcccaaagtgctgggattacaggcgtgagccaccacaccgggcctagaaaagattttctactaaatttctttataaactccagttcatttaatatgcaatttgatttataattcttctgccaacaaagattaaaattatagtcataaaagtttttaaactagaatcttttatctgaagagtccaagaacccagagaggctatgatttgccgaagatccataggaaattaactgcagagctggaaagagaacttgaggtatgattaccagatttatattttttcagtagcaactaaataaaaggttcaatttcatttttctctagggtactacctttagatttactaatgaggaaggacatggaagataaagcagggcaaagcatgggtaattcacaatctgaaaaatcaatttgtgaatgagaaacctgacctccactccattccactccctcactctgtcacccaggctagagtgcagtggcacaatctcggctcactgcaacctctacctcccgggttcaagtgattctcctgcctcagcctcccgagtagctgagactacaggcgtgcaccaccacacccagctaatttttgcactttttagtagagatgggctttcaccatattggccaggctggtcttgaactcttgaccttgtgatccacccacctcaacctccagccatttccccatttngaagagncttgaaatacacaaagatatttacttatttgtaatgaatctgagcatatgttgctgttttttcgaaactcttatccttgcaggtaaaattaccgtggacgggatcgtctag

SEQ ID NO: 338309 - DNA, 369 bp, Homo sapiens
ctctgcctgggagaggagggacagagtgcaggagccccagcctcggcctgccgggcctcatcactctacctaatggagcaaaatggctcgcggtgattctcgcaaaggttagcaaggtcagaaacggggactgatgtgacttcatttgctaaatgctgagttgaacaagtacagagatttctcccaccaaagtcctgtgcattcacggtgctggggtgcacagagccctagctgaagaggagtaagggcatgtcccagacaccggaacacatgttctagacttatccaggtgtcaacaaaatcccaaggccagaaaattccatacagagaaccacagacggcaccgaggagtgggaagcaaagactctg

SEQ ID NO: 338310 - DNA, 1466 bp, Homo sapiens
tggttgaatagtgttctattagcaacaatatatgaaatactagacacacccattaaaagtagaaaatacccactactgttttaaaattattctgcaagatctcactaatgcaatgagacataaaacagaaataatgggtgtaattattgaaaattggagataaaatttctattacttgcaaacaaaattctctatgtcaaaaacctgataagttaaacaatacagttaatatgtttaatagaactaattagatatgagaggcatccaaaatccattttttctatacaaacatggtttgatatatacagtcttgttttatctgtgtattaattggcttatgaaataatagaaaaatcaagtatgcattattaggttaaagaagcaggagagacagagctataaaaactaagaagaatgttgtaaggagggcttagcaaccaggataaatgttgtagagagatcaattaaagtgatggcctagagatcatgggcttcctttggcagagccatgttggtgaagtgaaggaagtgtaagccagaccacagtggttgaagaatgaatgtaatgtaagagccaagacatttatttgagtttgatagttatgaaaaagaacgagaattttcttattgctgttgtttttgccatttcatgttcaaaaccctttatctcccatgtgggactgaaaactcctccaagacaggatctctgtttctgtgaggcctgtagtacttagtacatccttgaatgtgtgaggctctcattggttataagtttaattcctgactgtggatgaaagctttaaaactttgtgggcaaaatacagaatgaatttcagtgagttcccatgtattaaataaggtggtgctggctggagatatgctgtccctgtgcccacaatagtagtggtgctgtgcttatcttcctgacgcgctcttcgcagtcttcaccgcctttcttcaggagtctccccttgggctttttcacagctatgaaacccacgtagtcgaacaccgtgatgcttctcctgcagggcgtgtgatgaggaggcgagcttggctttggagtgctgggaacctgaggaattgccaaggacccagagcccagccctgaccaccagagtgcccaaaacacaatgaacaaattgaattttcataacaacagagtcatgcaagaccgccgcagtgtgtgcattttccttcccaacgatgaatctctgaacatcatcataaatgtgagtagatccagttttagaaatgtctaaatattgtgttttcaccagtggccacattcaacttatgacttgattaagggtgaaatctttacagaattagggcagtaatcatgtggcagaattgggttgtcaaatagtccatacatacattaacttagctttgtggcttgtgtgcagctgccttcaacattctctcacctgggttagaattagaggactatggttactatattg

SEQ ID NO: 338311 - DNA, 267 bp, Homo sapiens
taaagctcactgttgcatatacaaatgtagatgtgcagaggcaatatataccaaaacgggtattctgacaagcgatagatatgtaagaaatgcaacagtgagctttatatctacataaactgtaaataatcctttctgtgaaaggatcatcatatcaagatgataccaaaagtatgtaaaaagaaacctgcattattttgtaattatttcttatagatatttcatggtaagattagcagtcaataaagttacttttttgcctttaaa

SEQ ID NO: 338312 - DNA, 3659 bp, Homo sapiens
aactttatttcctcacagttctagaggctgggaagtccgggattgaggggccagcatctaccaagggccttcttgttacttcatcccatgatggaaggtggaagggtaaagagaggagaagaagcagtaccgggaatcttacatcagtgacaacctggacctcgacatggaccagctggaaaaacggtcgcgggccagcgggagcagtgcgggcagcatgaaacacaagcgcctgtcccgtcattccaccgccagccacagcagttcccacacctcgggcattgaggcagacaccaagccccgggacacggggccagaagacagctactccagcagtgccatccaccgcaagctgaaaacctgcagctcaatgaccagtcatggcagctcccacacctcaggggtggagagtggcggcaaagaccggctggaagaggacttacaggacgatgaaatagagatgttggttgatgacccccgggatctggagcagatgaatgaagagtctctggaagtcagcccagacatgtgcatctacatcacagaggacatgctcatgtcgcggaagctgaatggacactctgggttgattgtgaaagaaattgggtcttccacctcgagctcttcagaaacagttgttaagcttcgtggccagagtactgattctcttccacagactatatgtcggaaaccaaagacctccactgatcgacacagcttgagcctcgatgacatcagactttaccagaaagacttcctgcgcattgcaggtctgtgtcaggacactgctcagagttacacctttggatgtggccatgaactggatgaggaaggcctctattgcaacagttgcttggcccagcagtgcatcaacatccaagatgcttttccagtcaaaagaaccagcaaatacttttctctggatctcactcatgatgaagttccagagtttgttgtgtaaagtccgtctgtgtgcagctgtacaggcagcttactgtttgctagaggatgcgaaagtcataagttctttacatattacttgtgccatatcttcttcaccctaaacatagctctttctttataatatttgtgatgatggaaacaaaagccttggaacaattgcactttaagtattacacagaagtaaaagaactacagaaaatgtacagcaagacaagtgcccggaagttcactgatccttcagaaggaaatgcgctttactgattgcaaagccttcagaatattggagtgtggtgtgtttgctcatctgatgctttttagttcagttacatgtaacatcacatttttttatcacgtgaaagatgttagatttgtttgcttataaattttttaccactcccacataaaatgctcatagtttgggagaggaaagagggaagattctctcttcttttaacagagagatgattgctctgtatacccattgcttcctccctgaggctgtcccaaagtgaacactgatggagtggtcaaaatcataaggttgtagcaagccaaagatacgtatgtgacagaagcacataagcaataagcagaaaaccagaagtgcatgctgtgatgcctgtgactccttcatcccgctcagtgccatgtcctcttttgtgatcttccagaaagctccaggattcatttgagttccacatccaagtaacagatgaattatattcatgttgtaatgcattttgtggagtttacaaaaccagtgtctgttaaaactttggaaaatgtcttagaaaacgttggtgcttggtgatgctttatttgtttaattatcaagaacaaattatggcaatgctagtttctgcttaaccaaaatactctgtgtatatattatacatatataaatacatgggattgtgtatgtctatatgtgtttaaagcttactatgtcttcattttggcttccatgactatcttttatacatggaattccttaagattgagaatatgtcactgagtgaatgatacctgcagacagtcagttgatatatgtagagttcagaatgactgttttctcatgtgcctttggccatgattctcaacactgattgtataacagaattttggggggagcttttaaaaaataatgactgagtctcccaccagaccgattacatcattctcttgtggcgggacccaagtagaattgccttttcttttaaagttctccagatggagctaatatgcaacaaagttgaaaaccactgatcctgggggtgtcttgttaattttgaagtaaaagtgtacagaagacgtagtgtatgagaaagggccatttttaagacagttacctgttgtgctgctgttacaatatataatgaaaccaagtcaggggagtgaatttatcaatcttttgatgtaaagtaaaaacgtagttcacacttcaggagagaacttcatagcacaatgtctttctataagatatttttaatgatttagtattttacaacatttgtttaccatattttgatataccatttttttctatctgcccagttttattaaaaaaactatatattattttctaaagaaacaatcatatttttatacaaaattatgttttcaggtaacgaaatagatgtagggtacagtggaacataagcagtgttacccctggctgggagtcagtattatacaacaaatggtgagctggaacatgccctgtctgtgctgtccctcctgtgctgggtcgcggatgtgtaggcaacattgccttatcacgctaggttcacctgacactttaaaaggaaaaaaagttccatagagttctgtggtcacaaaattgttttgcttttatcaaatactttaatagaaccaaagttgcagatattggaatgtatggaagtatctcagtctctgcataagaggattaaagtatgaaaggatcatttaatgactgttttacttataagtcattaagtaatccaccatttcttatggatgatgcttaagcctggtgaggtttgtactctaaggagcccagatcataatgcagtgcatttccttagcccttagagtttcttgcaaacatttaaaaaaagacatatttaagaaagaaagataaagaaaaaacatatttaattactgtaaacaggtactgctttatgtttattttctctctacttcaaccaaaatcagatctttgaggttttgctgacattgttggtggttttgcacatgttctttctaattggatttatgaatagttctatgggttttcaaagatgaatcatgctaagaacacttctgctttttgatccactgtttgcagcagaattatatatatgtataggaaaaatccactttgaataatccatgttttgtatttggaaattgtttttaaaaataaaaaggaaaggaaatatataaagctgttatttattctgcatttcttacatatctatcgcttgtcagtatacccgttttggtatatattgcctctgcacatctacatttgtatatgcaacagtgagctttatatctacataaactgtaaataatcctttctgtgaaaggatcatcatatcaagatgataccaaaagtatgtaaaaagaaacctgcattattttgtaattatttcttatagatatttcatggtaagattagcagtcaataaagttacttttttgcctttaaa

SEQ ID NO: 338313 - DNA, 3855 bp, Homo sapiens
aactttatttcctcacagttctagaggctgggaagtccgggattgaggggccagcatctaccaagggccttcttgttacttcatcccatgatggaaggtggaagggtaaagagaggagaagaagcagtaccgggaatcttacatcagtgacaacctggacctcgacatggaccagctggaaaaacggtcgcgggccagcgggagcagtgcgggcagcatgaaacacaagcgcctgtcccgtcattccaccgccagccacagcagttcccacacctcgggcattgaggcagacaccaagccccgggacacggggccagaagacagctactccagcagtgccatccaccgcaagctgaaaacctgcagctcaatgaccagtcatggcagctcccacacctcaggggtggagagtggcggcaaagaccggctggaagaggacttacaggacgatgaaatagagatgttggttgatgacccccgggatctggagcagatgaatgaagagtctctggaagtcagcccagacatgtgcatctacatcacagaggacatgctcatgtcgcggaagctgaatggacactctgggttgattgtgaaagaaattgggtcttccacctcgagctcttcagaaacagttgttaagcttcgtggccagagtactgattctcttccacagactatatgtcggaaaccaaagacctccactgatcgacacagcttgagcctcgatgacatcagactttaccagaaagacttcctgcgcattgcaggtctgtgtcaggacactgctcagagttacacctttggatgtggccatgaactggatgaggaaggcctctattgcaacagttgcttggcccagcagtgcatcaacatccaagatgcttttccagtcaaaagaaccagcaaatacttttctctggatctcactcatgatgaagttccagagtttgttgtgtaaagtccgtctgtgtgcagctgtacaggcagcttactgtttgctagaggatgcgaaagtcataagttctttacatattacttgtgccatatcttcttcaccctaaacatagctctttctttataatatttgtgatgatggaaacaaaagccttggaacaattgcactttaagtattacacagaagtaaaagaactacagaaaatgtacagcaagacaagtgcccggaagttcactgatccttcagaaggaaatgcgctttactgattgcaaagccttcagaatattggagtgtggtgtgtttgctcatctgatgctttttagttcagttacatgtaacatcacatttttttatcacgtgaaagatgttagatttgtttgcttataaattttttaccactcccacataaaatgctcatagtttgggagaggaaagagggaagattctctcttcttttaacagagagatgattgctctgtatacccattgcttcctccctgaggctgtcccaaagtgaacactgatggagtggtcaaaatcataaggttgtagcaagccaaagatacgtatgtgacagaagcacataagcaataagcagaaaaccagaagtgcatgctgtgatgcctgtgactccttcatcccgctcagtgccatgtcctcttttgtgatcttccagaaagctccaggattcatttgagttccacatccaagtaacagatgaattatattcatgttgtaatgcattttgtggagtttacaaaaccagtgtctgttaaaactttggaaaatgtcttagaaaacgttggtgcttggtgatgctttatttgtttaattatcaagaacaaattatggcaatgctagtttctgcttaaccaaaatactctgtgtatatattatacatatataaatacatgggattgtgtatgtctatatgtgtttaaagcttactatgtcttcattttggcttccatgactatcttttatacatggaattccttaagattgagaatatgtcactgagtgaatgatacctgcagacagtcagttgatatatgtagagttcagaatgactgttttctcatgtgcctttggccatgattctcaacactgattgtataacagaattttggggggagcttttaaaaaataatgactgagtctcccaccagaccgattacatcattctcttgtggcgggacccaagtagaattgccttttcttttaaagttctccagatggagctaatatgcaacaaagttgaaaaccactgatcctgggggtgtcttgttaattttgaagtaaaagtgtacagaagacgtagtgtatgagaaagggccatttttaagacagttacctgttgtgctgctgttacaatatataatgaaaccaagtcaggggagtgaatttatcaatcttttgatgtaaagtaaaaacgtagttcacacttcaggagagaacttcatagcacaatgtctttctataagatatttttaatgatttagtattttacaacatttgtttaccatattttgatataccatttttttctatctgcccagttttattaaaaaaactatatattattttctaaagaaacaatcatatttttatacaaaattatgttttcaggtaacgaaatagatgtagggtacagtggaacataagcagtgttacccctggctgggagtcagtattatacaacaaatggtgagctggaacatgccctgtctgtgctgtccctcctgtgctgggtcgcggatgtgtaggcaacattgccttatcacgctaggttcacctgacactttaaaaggaaaaaaagttccatagagttctgtggtcacaaaattgttttgcttttatcaaatactttaatagaaccaaagttgcagatattggaatgtatggaagtatctcagtctctgcataagaggattaaagtatgaaaggatcatttaatgactgttttacttataagtcattaagtaatccaccatttcttatggatgatgcttaagcctggtgaggtttgtactctaaggagcccagatcataatgcagtgcatttccttagcccttagagtttcttgcaaacatttaaaaaaagacatatttaagaaagaaagataaagaaaaaacatatttaattactgtaaacaggtactgctttatgtttattttctctctacttcaaccaaaatcagatctttgaggttttgctgacattgttggtggttttgcacatgttctttctaattggatttatgaatagttctatgggttttcaaagatgaatcatgctaagaacacttctgctttttgatccactgtttgcagcagaattatatatatgtataggaaaaatccactttgaataatccatgttttgtatttggaaattgtttttaaaaataaaaaggaaaggaaatatataaagctgttatttattctgcatttcttacatatctatcgcttgtcagtatacccgttttggtatatattgcctctgcacatctacatttgtatatgcaacagtgagctttatatctacataaactgtaaataatcctttctgtgaaaggatcatcatatcaagatgataccaaaagtatgtaaaaagaaacctgcattattttgtaattatttcttatagatatttcatggtaagattagcagtcaataaagttacttttttgcctttaaaaaaaaacaaaaacaccacacacaaagaccaaacgaaaaaaagccccaccagcacgccaaccctcagcaccaaccccgcccaaacacccctacagccaccaaaaacgggggggggcgccctaaccccccccggggcccacaacccccccccccgctctcgggcgacggccgccccccagctgcggccatatcaaccc

SEQ ID NO: 338314 - DNA, 5676 bp, Homo sapiens
tggttgaatagtgttctattagcaacaatatatgaaatactagacacacccattaaaagtagaaaatacccactactgttttaaaattattctgcaagatctcactaatgcaatgagacataaaacagaaataatgggtgtaattattgaaaattggagataaaatttctattacttgcaaacaaaattctctatgtcaaaaacctgataagttaaacaatacagttaatatgtttaatagaactaattagatatgagaggcatccaaaatccattttttctatacaaacatggtttgatatatacagtcttgttttatctgtgtattaattggcttatgaaataatagaaaaatcaagtatgcattattaggttaaagaagcaggagagacagagctataaaaactaagaagaatgttgtaaggagggcttagcaaccaggataaatgttgtagagagatcaattaaagtgatggcctagagatcatgggcttcctttggcagagccatgttggtgaagtgaaggaagtgtaagccagaccacagtggttgaagaatgaatgtaatgtaagagccaagacatttatttgagtttgatagttatgaaaaagaacgagaattttcttattgctgttgtttttgccatttcatgttcaaaaccctttatctcccatgtgggactgaaaactcctccaagacaggatctctgtttctgtgaggcctgtagtacttagtacatccttgaatgtgtgaggctctcattggttataagtttaattcctgactgtggatgaaagctttaaaactttgtgggcaaaatacagaatgaatttcagtgagttcccatgtattaaataaggtggtgctggctggagatatgctgtccctgtgcccacaatagtagtggtgctgtgcttatcttcctgacgcgctcttcgcagtcttcaccgcctttcttcaggagtctccccttgggctttttcacagctatgaaacccacgtagtcgaacaccgtgatgcttctcctgcagggcgtgtgatgaggaggcgagcttggctttggagtgctgggaacctgaggaattgccaaggacccagagcccagccctgaccaccagagtgcccaaaacacaatgaacaaattgaattttcataacaacagagtcatgcaagaccgccgcagtgtgtgcattttccttcccaacgatgaatctctgaacatcatcataaatgttaagattctgtgtcaccagttgctggtccaggtttgtgacctgctcaggctaaaggactgccacctctttggactcagtgttatacaaaataatgaacatgtgtatatggagttgtcacaaaagctttacaaatattgtccaaaagaatggaagaaagaggccagcaagggtatcgaccaatttgggcctcctatgatcatccacttccgtgtgcagtactatgtggaaaatggcagattgatcagtgacagagcagcaagatactattattactggcacctgagaaaacaagttcttcattctcagtgtgtgctccgagaggaggcctacttcctgctggcagcctttgccctgcaggctgatcttgggaacttcaaaaggaataagcactatggaaaatacttcgagccaaaggcttacttcccatcttgggttgtttccaagagggggaaggactacatcctgaagcacattccaaacatgcacaaagatcagtttgcactaacagcttccgaagctcatcttaaatatatcaaagaggctgtccgactggatgacgtcgctgttcattactacagattgtataaggataaaagggaaattgaagcatcgctgactcttggattgaccatgaggggaatacagatttttcagaatttagatgaagagaaacaattactttatgatttcccctggacaaatgttggaaaattggtgtttgtgggtaagaaatttgagattttgccagatggcttgccttctgcccggaagctcatatactacacggggtgccccatgcgctccagacacctcctgcaacttctgagcaacagccaccgcctctatatgaatctgcagcctgtcctgcgccatatccggaagctggaggaaaacgaagagaagaagcagtaccgggaatcttacatcagtgacaacctggacctcgacatggaccagctggaaaaacggtcgcgggccagcgggagcagtgcgggcagcatgaaacacaagcgcctgtcccgtcattccaccgccagccacagcagttcccacacctcgggcattgaggcagacaccaagccccgggacacggggccagaagacagctactccagcagtgccatccaccgcaagctgaaaacctgcagctcaatgaccagtcatggcagctcccacacctcaggggtggagagtggcggcaaagaccggctggaagaggacttacaggacgatgaaatagagatgttggttgatgacccccgggatctggagcagatgaatgaagagtctctggaagtcagcccagacatgtgcatctacatcacagaggacatgctcatgtcgcggaagctgaatggacactctgggttgattgtgaaagaaattgggtcttccacctcgagctcttcagaaacagttgttaagcttcgtggccagagtactgattctcttccacagactatatgtcggaaaccaaagacctccactgatcgacacagcttgagcctcgatgacatcagactttaccagaaagacttcctgcgcattgcaggtctgtgtcaggacactgctcagagttacacctttggatgtggccatgaactggatgaggaaggcctctattgcaacagttgcttggcccagcagtgcatcaacatccaagatgcttttccagtcaaaagaaccagcaaatacttttctctggatctcactcatgatgaagttccagagtttgttgtgtaaagtccgtctgtgtgcagctgtacaggcagcttactgtttgctagaggatgcgaaagtcataagttctttacatattacttgtgccatatcttcttcaccctaaacatagctctttctttataatatttgtgatgatggaaacaaaagccttggaacaattgcactttaagtattacacagaagtaaaagaactacagaaaatgtacagcaagacaagtgcccggaagttcactgatccttcagaaggaaatgcgctttactgattgcaaagccttcagaatattggagtgtggtgtgtttgctcatctgatgctttttagttcagttacatgtaacatcacatttttttatcacgtgaaagatgttagatttgtttgcttataaattttttaccactcccacataaaatgctcatagtttgggagaggaaagagggaagattctctcttcttttaacagagagatgattgctctgtatacccattgcttcctccctgaggctgtcccaaagtgaacactgatggagtggtcaaaatcataaggttgtagcaagccaaagatacgtatgtgacagaagcacataagcaataagcagaaaaccagaagtgcatgctgtgatgcctgtgactccttcatcccgctcagtgccatgtcctcttttgtgatcttccagaaagctccaggattcatttgagttccacatccaagtaacagatgaattatattcatgttgtaatgcattttgtggagtttacaaaaccagtgtctgttaaaactttggaaaatgtcttagaaaacgttggtgcttggtgatgctttatttgtttaattatcaagaacaaattatggcaatgctagtttctgcttaaccaaaatactctgtgtatatattatacatatataaatacatgggattgtgtatgtctatatgtgtttaaagcttactatgtcttcattttggcttccatgactatcttttatacatggaattccttaagattgagaatatgtcactgagtgaatgatacctgcagacagtcagttgatatatgtagagttcagaatgactgttttctcatgtgcctttggccatgattctcaacactgattgtataacagaattttggggggagcttttaaaaaataatgactgagtctcccaccagaccgattacatcattctcttgtggcgggacccaagtagaattgccttttcttttaaagttctccagatggagctaatatgcaacaaagttgaaaaccactgatcctgggggtgtcttgttaattttgaagtaaaagtgtacagaagacgtagtgtatgagaaagggccatttttaagacagttacctgttgtgctgctgttacaatatataatgaaaccaagtcaggggagtgaatttatcaatcttttgatgtaaagtaaaaacgtagttcacacttcaggagagaacttcatagcacaatgtctttctataagatatttttaatgatttagtattttacaacatttgtttaccatattttgatataccatttttttctatctgcccagttttattaaaaaaactatatattattttctaaagaaacaatcatatttttatacaaaattatgttttcaggtaacgaaatagatgtagggtacagtggaacataagcagtgttacccctggctgggagtcagtattatacaacaaatggtgagctggaacatgccctgtctgtgctgtccctcctgtgctgggtcgcggatgtgtaggcaacattgccttatcacgctaggttcacctgacactttaaaaggaaaaaaagttccatagagttctgtggtcacaaaattgttttgcttttatcaaatactttaatagaaccaaagttgcagatattggaatgtatggaagtatctcagtctctgcataagaggattaaagtatgaaaggatcatttaatgactgttttacttataagtcattaagtaatccaccatttcttatggatgatgcttaagcctggtgaggtttgtactctaaggagcccagatcataatgcagtgcatttccttagcccttagagtttcttgcaaacatttaaaaaaagacatatttaagaaagaaagataaagaaaaaacatatttaattactgtaaacaggtactgctttatgtttattttctctctacttcaaccaaaatcagatctttgaggttttgctgacattgttggtggttttgcacatgttctttctaattggatttatgaatagttctatgggttttcaaagatgaatcatgctaagaacacttctgctttttgatccactgtttgcagcagaattatatatatgtataggaaaaatccactttgaataatccatgttttgtatttggaaattgtttttaaaaataaaaaggaaaggaaatatataaagctgttatttattctgcatttcttacatatctatcgcttgtcagtatacccgttttggtatatattgcctctgcacatctacatttgtatatgcaacagtgagctttatatctacataaactgtaaataatcctttctgtgaaaggatcatcatatcaagatgataccaaaagtatgtaaaaagaaacctgcattattttgtaattatttcttatagatatttcatggtaagattagcagtcaataaagttacttttttgcctttaaa

SEQ ID NO: 338315 - DNA, 4855 bp, Homo sapiens
tgagaggagtggggcaggctcggcgccggtaggaagagtcagaggggtgaccagagagcccaacgcctggtgctcaagactttctccgagtgccacatgcttgttggagagagagaaggcaagatcagggctaccaactgtagctgtgcaggttttgccatgcaagctatgaaacccacgtagtcgaacaccgtgatgcttctcctgcagggcgtgtgatgaggaggcgagcttggctttggagtgctgggaacctgaggaattgccaaggacccagagcccagccctgaccaccagagtgcccaaaacacaatgaacaaattgaattttcataacaacagagtcatgcaagaccgccgcagtgtgtgcattttccttcccaacgatgaatctctgaacatcatcataaatgttaagattctgtgtcaccagttgctggtccaggtttgtgacctgctcaggctaaaggactgccacctctttggactcagtgttatacaaaataatgaacatgtgtatatggagttgtcacaaaagctttacaaatattgtccaaaagaatggaagaaagaggccagcaagggtatcgaccaatttgggcctcctatgatcatccacttccgtgtgcagtactatgtggaaaatggcagattgatcagtgacagagcagcaagatactattattactggcacctgagaaaacaagttcttcattctcagtgtgtgctccgagaggaggcctacttcctgctggcagcctttgccctgcaggctgatcttgggaacttcaaaaggaataagcactatggaaaatacttcgagccaaaggcttacttcccatcttgggttgtttccaagagggggaaggactacatcctgaagcacattccaaacatgcacaaagatcagtttgcactaacagcttccgaagctcatcttaaatatatcaaagaggctgtccgactggatgacgtcgctgttcattactacagattgtataaggataaaagggaaattgaagcatcgctgactcttggattgaccatgaggggaatacagatttttcagaatttagatgaagagaaacaattactttatgatttcccctggacaaatgttggaaaattggtgtttgtgggtaagaaatttgagattttgccagatggcttgccttctgcccggaagctcatatactacacggggtgccccatgcgctccagacacctcctgcaacttctgagcaacagccaccgcctctatatgaatctgcagcctgtcctgcgccatatccggaagctggaggaaaacgaagagaagaagcagtaccgggaatcttacatcagtgacaacctggacctcgacatggaccagctggaaaaacggtcgcgggccagcgggagcagtgcgggcagcatgaaacacaagcgcctgtcccgtcattccaccgccagccacagcagttcccacacctcgggcattgaggcagacaccaagccccgggacacggggccagaagacagctactccagcagtgccatccaccgcaagctgaaaacctgcagctcaatgaccagtcatggcagctcccacacctcaggggtggagagtggcggcaaagaccggctggaagaggacttacaggacgatgaaatagagatgttggttgatgacccccgggatctggagcagatgaatgaagagtctctggaagtcagcccagacatgtgcatctacatcacagaggacatgctcatgtcgcggaagctgaatggacactctgggttgattgtgaaagaaattgggtcttccacctcgagctcttcagaaacagttgttaagcttcgtggccagagtactgattctcttccacagactatatgtcggaaaccaaagacctccactgatcgacacagcttgagcctcgatgacatcagactttaccagaaagacttcctgcgcattgcaggtctgtgtcaggacactgctcagagttacacctttggatgtggccatgaactggatgaggaaggcctctattgcaacagttgcttggcccagcagtgcatcaacatccaagatgcttttccagtcaaaagaaccagcaaatacttttctctggatctcactcatgatgaagttccagagtttgttgtgtaaagtccgtctgtgtgcagctgtacaggcagcttactgtttgctagaggatgcgaaagtcataagttctttacatattacttgtgccatatcttcttcaccctaaacatagctctttctttataatatttgtgatgatggaaacaaaagccttggaacaattgcactttaagtattacacagaagtaaaagaactacagaaaatgtacagcaagacaagtgcccggaagttcactgatccttcagaaggaaatgcgctttactgattgcaaagccttcagaatattggagtgtggtgtgtttgctcatctgatgctttttagttcagttacatgtaacatcacatttttttatcacgtgaaagatgttagatttgtttgcttataaattttttaccactcccacataaaatgctcatagtttgggagaggaaagagggaagattctctcttcttttaacagagagatgattgctctgtatacccattgcttcctccctgaggctgtcccaaagtgaacactgatggagtggtcaaaatcataaggttgtagcaagccaaagatacgtatgtgacagaagcacataagcaataagcagaaaaccagaagtgcatgctgtgatgcctgtgactccttcatcccgctcagtgccatgtcctcttttgtgatcttccagaaagctccaggattcatttgagttccacatccaagtaacagatgaattatattcatgttgtaatgcattttgtggagtttacaaaaccagtgtctgttaaaactttggaaaatgtcttagaaaacgttggtgcttggtgatgctttatttgtttaattatcaagaacaaattatggcaatgctagtttctgcttaaccaaaatactctgtgtatatattatacatatataaatacatgggattgtgtatgtctatatgtgtttaaagcttactatgtcttcattttggcttccatgactatcttttatacatggaattccttaagattgagaatatgtcactgagtgaatgatacctgcagacagtcagttgatatatgtagagttcagaatgactgttttctcatgtgcctttggccatgattctcaacactgattgtataacagaattttggggggagcttttaaaaaataatgactgagtctcccaccagaccgattacatcattctcttgtggcgggacccaagtagaattgccttttcttttaaagttctccagatggagctaatatgcaacaaagttgaaaaccactgatcctgggggtgtcttgttaattttgaagtaaaagtgtacagaagacgtagtgtatgagaaagggccatttttaagacagttacctgttgtgctgctgttacaatatataatgaaaccaagtcaggggagtgaatttatcaatcttttgatgtaaagtaaaaacgtagttcacacttcaggagagaacttcatagcacaatgtctttctataagatatttttaatgatttagtattttacaacatttgtttaccatattttgatataccatttttttctatctgcccagttttattaaaaaaactatatattattttctaaagaaacaatcatatttttatacaaaattatgttttcaggtaacgaaatagatgtagggtacagtggaacataagcagtgttacccctggctgggagtcagtattatacaacaaatggtgagctggaacatgccctgtctgtgctgtccctcctgtgctgggtcgcggatgtgtaggcaacattgccttatcacgctaggttcacctgacactttaaaaggaaaaaaagttccatagagttctgtggtcacaaaattgttttgcttttatcaaatactttaatagaaccaaagttgcagatattggaatgtatggaagtatctcagtctctgcataagaggattaaagtatgaaaggatcatttaatgactgttttacttataagtcattaagtaatccaccatttcttatggatgatgcttaagcctggtgaggtttgtactctaaggagcccagatcataatgcagtgcatttccttagcccttagagtttcttgcaaacatttaaaaaaagacatatttaagaaagaaagataaagaaaaaacatatttaattactgtaaacaggtactgctttatgtttattttctctctacttcaaccaaaatcagatctttgaggttttgctgacattgttggtggttttgcacatgttctttctaattggatttatgaatagttctatgggttttcaaagatgaatcatgctaagaacacttctgctttttgatccactgtttgcagcagaattatatatatgtataggaaaaatccactttgaataatccatgttttgtatttggaaattgtttttaaaaataaaaaggaaaggaaatatataaagctgttatttattctgcatttcttacatatctatcgcttgtcagtatacccgttttggtatatattgcctctgcacatctacatttgtatatgcaacagtgagctttatatctacataaactgtaaataatcctttctgtgaaaggatcatcatatcaagatgataccaaaagtatgtaaaaagaaacctgcattattttgtaattatttcttatagatatttcatggtaagattagcagtcaataaagttacttttttgcctttaaa

SEQ ID NO: 338316 - DNA, 3510 bp, Homo sapiens
aactttatttcctcacagttctagaggctgggaagtccgggattgaggggccagcatctaccaagggccttcttgttacttcatcccatgatggaaggtggaagggtaaagagaggagaagaagcagtaccgggaatcttacatcagtgacaacctggacctcgacatggaccagctggaaaaacggtcgcgggccagcgggagcagtgcgggcagcatgaaacacaagcgcctgtcccgtcattccaccgccagccacagcagttcccacacctcgggcattgaggcagacaccaagccccgggacacggggccagaagacagctactccagcagtgccatccaccgcaagctgaaaacctgcagctcaatgaccagtcatggcagctcccacacctcaggggtggagagtggcggcaaagaccggctggaagaggacttacaggacgatgaaatagagatgttggttgatgacccccgggatctggagcagatgaatgaagagtctctggaagtcagcccagacatgtgcatctacatcacagaggacatgctcatgtcgcggaagctgaatggacactctgggttgattgtgaaagaaattgggtcttccacctcgagctcttcagaaacagttgttaagcttcgtggccagagtactgattctcttccacagactatatgtcggaaaccaaagacctccactgatcgacacagcttgagcctcgatgacatcagactttaccagaaagacttcctgcgcattgcaggtctgtgtcaggacactgctcagagttacacctttggatgtggccatgaactggatgaggaaggcctctattgcaacagttgcttggcccagcagtgcatcaacatccaagatgcttttccagtcaaaagaaccagcaaatacttttctctggatctcactcatgatgaagttccagagtttgttgtgtaaagtccgtctgtgtgcagctgtacaggcagcttactgtttgctagaggatgcgaaagtcataagttctttacatattacttgtgccatatcttcttcaccctaaacatagctctttctttataatatttgtgatgatggaaacaaaagccttggaacaattgcactttaagtattacacagaagtaaaagaactacagaaaatgtacagcaagacaagtgcccggaagttcactgatccttcagaaggaaatgcgctttactgattgcaaagccttcagaatattggagtgtggtgtgtttgctcatctgatgctttttagttcagttacatgtaacatcacatttttttatcacgtgaaagatgttagatttgtttgcttataaattttttaccactcccacataaaatgctcatagtttgggagaggaaagagggaagattctctcttcttttaacagagagatgattgctctgtatacccattgcttcctccctgaggctgtcccaaagtgaacactgatggagtggtcaaaatcataaggttgtagcaagccaaagatacgtatgtgacagaagcacataagcaataagcagaaaaccagaagtgcatgctgtgatgcctgtgactccttcatcccgctcagtgccatgtcctcttttgtgatcttccagaaagctccaggattcatttgagttccacatccaagtaacagatgaattatattcatgttgtaatgcattttgtggagtttacaaaaccagtgtctgttaaaactttggaaaatgtcttagaaaacgttggtgcttggtgatgctttatttgtttaattatcaagaacaaattatggcaatgctagtttctgcttaaccaaaatactctgtgtatatattatacatatataaatacatgggattgtgtatgtctatatgtgtttaaagcttactatgtcttcattttggcttccatgactatcttttatacatggaattccttaagattgagaatatgtcactgagtgaatgatacctgcagacagtcagttgatatatgtagagttcagaatgactgttttctcatgtgcctttggccatgattctcaacactgattgtataacagaattttggggggagcttttaaaaaataatgactgagtctcccaccagaccgattacatcattctcttgtggcgggacccaagtagaattgccttttcttttaaagttctccagatggagctaatatgcaacaaagttgaaaaccactgatcctgggggtgtcttgttaattttgaagtaaaagtgtacagaagacgtagtgtatgagaaagggccatttttaagacagttacctgttgtgctgctgttacaatatataatgaaaccaagtcaggggagtgaatttatcaatcttttgatgtaaagtaaaaacgtagttcacacttcaggagagaacttcatagcacaatgtctttctataagatatttttaatgatttagtattttacaacatttgtttaccatattttgatataccatttttttctatctgcccagttttattaaaaaaactatatattattttctaaagaaacaatcatatttttatacaaaattatgttttcaggtaacgaaatagatgtagggtacagtggaacataagcagtgttacccctggctgggagtcagtattatacaacaaatggtgagctggaacatgccctgtctgtgctgtccctcctgtgctgggtcgcggatgtgtaggcaacattgccttatcacgctaggttcacctgacactttaaaaggaaaaaaagttccatagagttctgtggtcacaaaattgttttgcttttatcaaatactttaatagaaccaaagttgcagatattggaatgtatggaagtatctcagtctctgcataagaggattaaagtatgaaaggatcatttaatgactgttttacttataagtcattaagtaatccaccatttcttatggatgatgcttaagcctggtgaggtttgtactctaaggagcccagatcataatgcagtgcatttccttagcccttagagtttcttgcaaacatttaaaaaaagacatatttaagaaagaaagataaagaaaaaacatatttaattactgtaaacaggtactgctttatgtttattttctctctacttcaaccaaaatcagatctttgaggttttgctgacattgttggtggttttgcacatgttctttctaattggatttatgaatagttctatgggttttcaaagatgaatcatgctaagaacacttctgctttttgatccactgtttgcagcagaattatatatatgtataggaaaaatccactttgaataatcaggtggcttgggactggtttcaacatcacaggaaggaattttaaggggtaacgcagataaatataggggagaaccgggaaatgggggcgcaactgtttgaagaggttataaagggaaactggggggataagacacacagaagaggtgtttttatggagagttgaaacaagcggtc

SEQ ID NO: 338317 - DNA, 3655 bp, Homo sapiens
aactttatttcctcacagttctagaggctgggaagtccgggattgaggggccagcatctaccaagggccttcttgttacttcatcccatgatggaaggtggaagggtaaagagaggagaagaagcagtaccgggaatcttacatcagtgacaacctggacctcgacatggaccagctggaaaaacggtcgcgggccagcgggagcagtgcgggcagcatgaaacacaagcgcctgtcccgtcattccaccgccagccacagcagttcccacacctcgggcattgaggcagacaccaagccccgggacacggggccagaagacagctactccagcagtgccatccaccgcaagctgaaaacctgcagctcaatgaccagtcatggcagctcccacacctcaggggtggagagtggcggcaaagaccggctggaagaggacttacaggacgatgaaatagagatgttggttgatgacccccgggatctggagcagatgaatgaagagtctctggaagtcagcccagacatgtgcatctacatcacagaggacatgctcatgtcgcggaagctgaatggacactctgggttgattgtgaaagaaattgggtcttccacctcgagctcttcagaaacagttgttaagcttcgtggccagagtactgattctcttccacagactatatgtcggaaaccaaagacctccactgatcgacacagcttgagcctcgatgacatcagactttaccagaaagacttcctgcgcattgcaggtctgtgtcaggacactgctcagagttacacctttggatgtggccatgaactggatgaggaaggcctctattgcaacagttgcttggcccagcagtgcatcaacatccaagatgcttttccagtcaaaagaaccagcaaatacttttctctggatctcactcatgatgaagttccagagtttgttgtgtaaagtccgtctgtgtgcagctgtacaggcagcttactgtttgctagaggatgcgaaagtcataagttctttacatattacttgtgccatatcttcttcaccctaaacatagctctttctttataatatttgtgatgatggaaacaaaagccttggaacaattgcactttaagtattacacagaagtaaaagaactacagaaaatgtacagcaagacaagtgcccggaagttcactgatccttcagaaggaaatgcgttaccgtccctccccctcccgccctcccccccccacccccccccccccctcctcgcctaaagttcagttacatgtaacatcacatttttttatcacgtgaaagatgttagatttgtttgcttataaattttttaccactcccacataaaatgctcatagtttgggagaggaaagagggaagattctctcttcttttaacagagagatgattgctctgtatacccattgcttcctccctgaggctgtcccaaagtgaacactgatggagtggtcaaaatcataaggttgtagcaagccaaagatacgtatgtgacagaagcacataagcaataagcagaaaaccagaagtgcatgctgtgatgcctgtgactccttcatcccgctcagtgccatgtcctcttttgtgatcttccagaaagctccaggattcatttgagttccacatccaagtaacagatgaattatattcatgttgtaatgcattttgtggagtttacaaaaccagtgtctgttaaaactttggaaaatgtcttagaaaacgttggtgcttggtgatgctttatttgtttaattatcaagaacaaattatggcaatgctagtttctgcttaaccaaaatactctgtgtatatattatacatatataaatacatgggattgtgtatgtctatatgtgtttaaagcttactatgtcttcattttggcttccatgactatcttttatacatggaattccttaagattgagaatatgtcactgagtgaatgatacctgcagacagtcagttgatatatgtagagttcagaatgactgttttctcatgtgcctttggccatgattctcaacactgattgtataacagaattttggggggagcttttaaaaaataatgactgagtctcccaccagaccgattacatcattctcttgtggcgggacccaagtagaattgccttttcttttaaagttctccagatggagctaatatgcaacaaagttgaaaaccactgatcctgggggtgtcttgttaattttgaagtaaaagtgtacagaagacgtagtgtatgagaaagggccatttttaagacagttacctgttgtgctgctgttacaatatataatgaaaccaagtcaggggagtgaatttatcaatcttttgatgtaaagtaaaaacgtagttcacacttcaggagagaacttcatagcacaatgtctttctataagatatttttaatgatttagtattttacaacatttgtttaccatattttgatataccatttttttctatctgcccagttttattaaaaaaactatatattattttctaaagaaacaatcatatttttatacaaaattatgttttcaggtaacgaaatagatgtagggtacagtggaacataagcagtgttacccctggctgggagtcagtattatacaacaaatggtgagctggaacatgccctgtctgtgctgtccctcctgtgctgggtcgcggatgtgtaggcaacattgccttatcacgctaggttcacctgacactttaaaaggaaaaaaagttccatagagttctgtggtcacaaaattgttttgcttttatcaaatactttaatagaaccaaagttgcagatattggaatgtatggaagtatctcagtctctgcataagaggattaaagtatgaaaggatcatttaatgactgttttacttataagtcattaagtaatccaccatttcttatggatgatgcttaagcctggtgaggtttgtactctaaggagcccagatcataatgcagtgcatttccttagcccttagagtttcttgcaaacatttaaaaaaagacatatttaagaaagaaagataaagaaaaaacatatttaattactgtaaacaggtactgctttatgtttattttctctctacttcaaccaaaatcagatctttgaggttttgctgacattgttggtggttttgcacatgttctttctaattggatttatgaatagttctatgggttttcaaagatgaatcatgctaagaacacttctgctttttgatccactgtttgcagcagaattatatatatgtataggaaaaatccactttgaataatccatgttttgtatttggaaattgtttttaaaaataaaaaggaaaggaaatatataaagctgttatttattctgcatttcttacatatctatcgcttgtcagtatacccgttttggtatatattgcctctgcacatctacatttgtatatgcaacagtgagctttatatctacataaactgtaaataatcctttctgtgaaaggatcatcatatcaagatgataccaaaagtatgtaaaaagaaacctgcattattttgtaattatttcttatagatatttcatggtaagattagcagtcaataaagttacttttttgcctttaaa

SEQ ID NO: 338318 - DNA, 815 bp, Homo sapiens
cataaactattacagcataaactatggaaaccttctggacagcataaactattatgaaaggatcatttaatgactgttttacttataagtcattaagtaatccaccatttcttatggatgatgcttaagcctggtgaggtttgtactctaaggagcccagatcataatgcagtgcatttccttagcccttagagtttcttgcaaacatttaaaaaaagacatatttaagaaagaaagataaagaaaaaacatatttaattactgtaaacaggtactgctttatgtttattttctctctacttcaaccaaaatcagatctttgaggttttgctgacattgttggtggttttgcacatgttctttctaattggatttatgaatagttctatgggttttcaaagatgaatcatgctaagaacacttctgctttttgatccactgtttgcagcagaattatatatatgtataggaaaaatccactttgaataatccatgttttgtatttggaaattgtttttaaaaataaaaaggaaaggaaatatataaagctgttatttattctgcatttcttacatatctatcgcttgtcagtatacccgttttggtatatattgcctctgcacatctacatttgtatatgcaacagtgagctttatatctacataaactgtaaataatcctttctgtgaaaggatcatcatatcaagatgataccaaaagtatgtaaaaagaaacctgcattattttgtaattatttcttatagatatttcatggtaagattagcagtcaataaagttacttttttgcctttaaa

SEQ ID NO: 338319 - DNA, 1937 bp, Homo sapiens
tggttgaatagtgttctattagcaacaatatatgaaatactagacacacccattaaaagtagaaaatacccactactgttttaaaattattctgcaagatctcactaatgcaatgagacataaaacagaaataatgggtgtaattattgaaaattggagataaaatttctattacttgcaaacaaaattctctatgtcaaaaacctgataagttaaacaatacagttaatatgtttaatagaactaattagatatgagaggcatccaaaatccattttttctatacaaacatggtttgatatatacagtcttgttttatctgtgtattaattggcttatgaaataatagaaaaatcaagtatgcattattaggttaaagaagcaggagagacagagctataaaaactaagaagaatgttgtaaggagggcttagcaaccaggataaatgttgtagagagatcaattaaagtgatggcctagagatcatgggcttcctttggcagagccatgttggtgaagtgaaggaagtgtaagccagaccacagtggttgaagaatgaatgtaatgtaagagccaagacatttatttgagtttgatagttatgaaaaagaacgagaattttcttattgctgttgtttttgccatttcatgttcaaaaccctttatctcccatgtgggactgaaaactcctccaagacaggatctctgtttctgtgaggcctgtagtacttagtacatccttgaatgtgtgaggctctcattggttataagtttaattcctgactgtggatgaaagctttaaaactttgtgggcaaaatacagaatgaatttcagtgagttcccatgtattaaataaggtggtgctggctggagatatgctgtccctgtgcccacaatagtagtggtgctgtgcttatcttcctgacgcgctcttcgcagtcttcaccgcctttcttcaggagtctccccttgggctttttcacagctatgaaacccacgtagtcgaacaccgtgatgcttctcctgcagggcgtgtgatgaggaggcgagcttggctttggagtgctgggaacctgaggaattgccaaggacccagagcccagccctgaccaccagagtgcccaaaacacaatgaacaaattgaattttcataacaacagagtcatgcaagaccgccgcagtgtgtgcattttccttcccaacgatgaatctctgaacatcatcataaatgttaagattctgtgtcaccagttgctggtccaggtttgtgacctgctcaggctaaaggactgccacctctttggactcagtgttatacaaaataatgaacatgtgtatatggagttgtcacaaaagctttacaaatattgtccaaaagaatggaagaaagaggccagcaagggtatcgaccaatttgggcctcctatgatcatccacttccgtgtgcagtactatgtggaaaatggcagattgatcagtgacagagcagcaagatactattattactggcacctgagaaaacaagttcttcattctcagtgtgtgctccgagaggaggcctacttcctgctggcagcctttgccctgcaggctgatcttgggaacttcaaaaggaataagcactatggaaaatacttcgagccaaaggcttacttcccatcttgggttgtttccaagagggggaaggactacatcctgaagcacattccaaacatgcacaaagatcagtttgcactaacagcttccgaagctcatcttaaatatatcaaagaggctgtccgactggatgacgtcgctgttcattactacagattgtataaggtatgaaacggcaactaagtcttcagcttctgagaaaaaaacatcttctcaataggattgagaaggaaaaccgaaggatttcatttccattaaaacttatttcattttttacat

SEQ ID NO: 338320 - DNA, 3605 bp, Homo sapiens
aactttatttcctcacagttctagaggctgggaagtccgggattgaggggccagcatctaccaagggccttcttgttacttcatcccatgatggaaggtggaagggtaaagagaggagaagaagcagtaccgggaatcttacatcagtgacaacctggacctcgacatggaccagctggaaaaacggtcgcgggccagcgggagcagtgcgggcagcatgaaacacaagcgcctgtcccgtcattccaccgccagccacagcagttcccacacctcgggcattgaggcagacaccaagccccgggacacggggccagaagacagctactccagcagtgccatccaccgcaagctgaaaacctgcagctcaatgaccagtcatggcagctcccacacctcaggggtggagagtggcggcaaagaccggctggaagaggacttacaggacgatgaaatagagatgttggttgatgacccccgggatctggagcagatgaatgaagagtctctggaagtcagcccagacatgtgcatctacatcacagaggacatgctcatgtcgcggaagctgaatggacactctgggttgattgtgaaagaaattgggtcttccacctcgagctcttcagaaacagttgttaagcttcgtggccagagtactgattctcttccacagactatatgtcggaaaccaaagacctccactgatcgacacagcttgagcctcgatgacatcagactttaccagaaagacttcctgcgcattgcaggtctgtgtcaggacactgctcagagttacacctttggatgtggccatgaactggatgaggaaggcctctattgcaacagttgcttggcccagcagtgcatcaacatccaagatgcttttccagtctttgttgtgtaaagtccgtctgtgtgcagctgtacaggcagcttactgtttgctagaggatgcgaaagtcataagttctttacatattacttgtgccatatcttcttcaccctaaacatagctctttctttataatatttgtgatgatggaaacaaaagccttggaacaattgcactttaagtattacacagaagtaaaagaactacagaaaatgtacagcaagacaagtgcccggaagttcactgatccttcagaaggaaatgcgctttactgattgcaaagccttcagaatattggagtgtggtgtgtttgctcatctgatgctttttagttcagttacatgtaacatcacatttttttatcacgtgaaagatgttagatttgtttgcttataaattttttaccactcccacataaaatgctcatagtttgggagaggaaagagggaagattctctcttcttttaacagagagatgattgctctgtatacccattgcttcctccctgaggctgtcccaaagtgaacactgatggagtggtcaaaatcataaggttgtagcaagccaaagatacgtatgtgacagaagcacataagcaataagcagaaaaccagaagtgcatgctgtgatgcctgtgactccttcatcccgctcagtgccatgtcctcttttgtgatcttccagaaagctccaggattcatttgagttccacatccaagtaacagatgaattatattcatgttgtaatgcattttgtggagtttacaaaaccagtgtctgttaaaactttggaaaatgtcttagaaaacgttggtgcttggtgatgctttatttgtttaattatcaagaacaaattatggcaatgctagtttctgcttaaccaaaatactctgtgtatatattatacatatataaatacatgggattgtgtatgtctatatgtgtttaaagcttactatgtcttcattttggcttccatgactatcttttatacatggaattccttaagattgagaatatgtcactgagtgaatgatacctgcagacagtcagttgatatatgtagagttcagaatgactgttttctcatgtgcctttggccatgattctcaacactgattgtataacagaattttggggggagcttttaaaaaataatgactgagtctcccaccagaccgattacatcattctcttgtggcgggacccaagtagaattgccttttcttttaaagttctccagatggagctaatatgcaacaaagttgaaaaccactgatcctgggggtgtcttgttaattttgaagtaaaagtgtacagaagacgtagtgtatgagaaagggccatttttaagacagttacctgttgtgctgctgttacaatatataatgaaaccaagtcaggggagtgaatttatcaatcttttgatgtaaagtaaaaacgtagttcacacttcaggagagaacttcatagcacaatgtctttctataagatatttttaatgatttagtattttacaacatttgtttaccatattttgatataccatttttttctatctgcccagttttattaaaaaaactatatattattttctaaagaaacaatcatatttttatacaaaattatgttttcaggtaacgaaatagatgtagggtacagtggaacataagcagtgttacccctggctgggagtcagtattatacaacaaatggtgagctggaacatgccctgtctgtgctgtccctcctgtgctgggtcgcggatgtgtaggcaacattgccttatcacgctaggttcacctgacactttaaaaggaaaaaaagttccatagagttctgtggtcacaaaattgttttgcttttatcaaatactttaatagaaccaaagttgcagatattggaatgtatggaagtatctcagtctctgcataagaggattaaagtatgaaaggatcatttaatgactgttttacttataagtcattaagtaatccaccatttcttatggatgatgcttaagcctggtgaggtttgtactctaaggagcccagatcataatgcagtgcatttccttagcccttagagtttcttgcaaacatttaaaaaaagacatatttaagaaagaaagataaagaaaaaacatatttaattactgtaaacaggtactgctttatgtttattttctctctacttcaaccaaaatcagatctttgaggttttgctgacattgttggtggttttgcacatgttctttctaattggatttatgaatagttctatgggttttcaaagatgaatcatgctaagaacacttctgctttttgatccactgtttgcagcagaattatatatatgtataggaaaaatccactttgaataatccatgttttgtatttggaaattgtttttaaaaataaaaaggaaaggaaatatataaagctgttatttattctgcatttcttacatatctatcgcttgtcagtatacccgttttggtatatattgcctctgcacatctacatttgtatatgcaacagtgagctttatatctacataaactgtaaataatcctttctgtgaaaggatcatcatatcaagatgataccaaaagtatgtaaaaagaaacctgcattattttgtaattatttcttatagatatttcatggtaagattagcagtcaataaagttacttttttgcctttaaa

SEQ ID NO: 338321 - DNA, 4779 bp, Homo sapiens
tgagaggagtggggcaggctcggcgccggtaggaagagtcagaggggtgaccagagagcccaacgcctggtgctcaagactttctccgagctatgaaacccacgtagtcgaacaccgtgatgcttctcctgcagggcgtgtgatgaggaggcgagcttggctttggagtgctgggaacctgaggaattgccaaggacccagagcccagccctgaccaccagagtgcccaaaacacaatgaacaaattgaattttcataacaacagagtcatgcaagaccgccgcagtgtgtgcattttccttcccaacgatgaatctctgaacatcatcataaatgttaagattctgtgtcaccagttgctggtccaggtttgtgacctgctcaggctaaaggactgccacctctttggactcagtgttatacaaaataatgaacatgtgtatatggagttgtcacaaaagctttacaaatattgtccaaaagaatggaagaaagaggccagcaagggtatcgaccaatttgggcctcctatgatcatccacttccgtgtgcagtactatgtggaaaatggcagattgatcagtgacagagcagcaagatactattattactggcacctgagaaaacaagttcttcattctcagtgtgtgctccgagaggaggcctacttcctgctggcagcctttgccctgcaggctgatcttgggaacttcaaaaggaataagcactatggaaaatacttcgagccaaaggcttacttcccatcttgggttgtttccaagagggggaaggactacatcctgaagcacattccaaacatgcacaaagatcagtttgcactaacagcttccgaagctcatcttaaatatatcaaagaggctgtccgactggatgacgtcgctgttcattactacagattgtataaggataaaagggaaattgaagcatcgctgactcttggattgaccatgaggggaatacagatttttcagaatttagatgaagagaaacaattactttatgatttcccctggacaaatgttggaaaattggtgtttgtgggtaagaaatttgagattttgccagatggcttgccttctgcccggaagctcatatactacacggggtgccccatgcgctccagacacctcctgcaacttctgagcaacagccaccgcctctatatgaatctgcagcctgtcctgcgccatatccggaagctggaggaaaacgaagagaagaagcagtaccgggaatcttacatcagtgacaacctggacctcgacatggaccagctggaaaaacggtcgcgggccagcgggagcagtgcgggcagcatgaaacacaagcgcctgtcccgtcattccaccgccagccacagcagttcccacacctcgggcattgaggcagacaccaagccccgggacacggggccagaagacagctactccagcagtgccatccaccgcaagctgaaaacctgcagctcaatgaccagtcatggcagctcccacacctcaggggtggagagtggcggcaaagaccggctggaagaggacttacaggacgatgaaatagagatgttggttgatgacccccgggatctggagcagatgaatgaagagtctctggaagtcagcccagacatgtgcatctacatcacagaggacatgctcatgtcgcggaagctgaatggacactctgggttgattgtgaaagaaattgggtcttccacctcgagctcttcagaaacagttgttaagcttcgtggccagagtactgattctcttccacagactatatgtcggaaaccaaagacctccactgatcgacacagcttgagcctcgatgacatcagactttaccagaaagacttcctgcgcattgcaggtctgtgtcaggacactgctcagagttacacctttggatgtggccatgaactggatgaggaaggcctctattgcaacagttgcttggcccagcagtgcatcaacatccaagatgcttttccagtcaaaagaaccagcaaatacttttctctggatctcactcatgatgaagttccagagtttgttgtgtaaagtccgtctgtgtgcagctgtacaggcagcttactgtttgctagaggatgcgaaagtcataagttctttacatattacttgtgccatatcttcttcaccctaaacatagctctttctttataatatttgtgatgatggaaacaaaagccttggaacaattgcactttaagtattacacagaagtaaaagaactacagaaaatgtacagcaagacaagtgcccggaagttcactgatccttcagaaggaaatgcgctttactgattgcaaagccttcagaatattggagtgtggtgtgtttgctcatctgatgctttttagttcagttacatgtaacatcacatttttttatcacgtgaaagatgttagatttgtttgcttataaattttttaccactcccacataaaatgctcatagtttgggagaggaaagagggaagattctctcttcttttaacagagagatgattgctctgtatacccattgcttcctccctgaggctgtcccaaagtgaacactgatggagtggtcaaaatcataaggttgtagcaagccaaagatacgtatgtgacagaagcacataagcaataagcagaaaaccagaagtgcatgctgtgatgcctgtgactccttcatcccgctcagtgccatgtcctcttttgtgatcttccagaaagctccaggattcatttgagttccacatccaagtaacagatgaattatattcatgttgtaatgcattttgtggagtttacaaaaccagtgtctgttaaaactttggaaaatgtcttagaaaacgttggtgcttggtgatgctttatttgtttaattatcaagaacaaattatggcaatgctagtttctgcttaaccaaaatactctgtgtatatattatacatatataaatacatgggattgtgtatgtctatatgtgtttaaagcttactatgtcttcattttggcttccatgactatcttttatacatggaattccttaagattgagaatatgtcactgagtgaatgatacctgcagacagtcagttgatatatgtagagttcagaatgactgttttctcatgtgcctttggccatgattctcaacactgattgtataacagaattttggggggagcttttaaaaaataatgactgagtctcccaccagaccgattacatcattctcttgtggcgggacccaagtagaattgccttttcttttaaagttctccagatggagctaatatgcaacaaagttgaaaaccactgatcctgggggtgtcttgttaattttgaagtaaaagtgtacagaagacgtagtgtatgagaaagggccatttttaagacagttacctgttgtgctgctgttacaatatataatgaaaccaagtcaggggagtgaatttatcaatcttttgatgtaaagtaaaaacgtagttcacacttcaggagagaacttcatagcacaatgtctttctataagatatttttaatgatttagtattttacaacatttgtttaccatattttgatataccatttttttctatctgcccagttttattaaaaaaactatatattattttctaaagaaacaatcatatttttatacaaaattatgttttcaggtaacgaaatagatgtagggtacagtggaacataagcagtgttacccctggctgggagtcagtattatacaacaaatggtgagctggaacatgccctgtctgtgctgtccctcctgtgctgggtcgcggatgtgtaggcaacattgccttatcacgctaggttcacctgacactttaaaaggaaaaaaagttccatagagttctgtggtcacaaaattgttttgcttttatcaaatactttaatagaaccaaagttgcagatattggaatgtatggaagtatctcagtctctgcataagaggattaaagtatgaaaggatcatttaatgactgttttacttataagtcattaagtaatccaccatttcttatggatgatgcttaagcctggtgaggtttgtactctaaggagcccagatcataatgcagtgcatttccttagcccttagagtttcttgcaaacatttaaaaaaagacatatttaagaaagaaagataaagaaaaaacatatttaattactgtaaacaggtactgctttatgtttattttctctctacttcaaccaaaatcagatctttgaggttttgctgacattgttggtggttttgcacatgttctttctaattggatttatgaatagttctatgggttttcaaagatgaatcatgctaagaacacttctgctttttgatccactgtttgcagcagaattatatatatgtataggaaaaatccactttgaataatccatgttttgtatttggaaattgtttttaaaaataaaaaggaaaggaaatatataaagctgttatttattctgcatttcttacatatctatcgcttgtcagtatacccgttttggtatatattgcctctgcacatctacatttgtatatgcaacagtgagctttatatctacataaactgtaaataatcctttctgtgaaaggatcatcatatcaagatgataccaaaagtatgtaaaaagaaacctgcattattttgtaattatttcttatagatatttcatggtaagattagcagtcaataaagttacttttttgcctttaaa

SEQ ID NO: 338322 - DNA, 3387 bp, Homo sapiens
aactttatttcctcacagttctagaggctgggaagtccgggattgaggggccagcatctaccaagggccttcttgttacttcatcccatgatggaaggtggaagggtaaagagaggagaagaagcagtaccgggaatcttacatcagtgacaacctggacctcgacatggaccagctggaaaaacggtcgcgggccagcgggagcagtgcgggcagcatgaaacacaagcgcctgtcccgtcattccaccgccagccacagcagttcccacacctcgggcattgaggcagacaccaagccccgggacacggggccagaagacagctactccagcagtgccatccaccgcaagctgaaaacctgcagctcaatgaccagtcatggcagctcccacacctcaggggtggagagtggcggcaaagaccggctggaagaggacttacaggacgatgaaatagagatgttggttgatgacccccgggatctggagcagatgaatgaagagtctctggaagtcagcccagacatgtgcatctacatcacagaggacatgctcatgtcgcggaagctgaatggacactctgggttgattgtgaaagaaattgggtcttccacctcgagctcttcagaaacagttgttaagcttcgtggccagagtactgattctcttccacagactatatgtcggaaaccaaagacctccactgatcgacacagcttgagcctcgatgacatcagactttaccagaaagacttcctgcgcattgcaggtctgtgtcaggacactgctcagagttacacctttggatgtggccatgaactggatgaggaaggcctctattgcaacagttgcttggcccagcagtgcatcaacatccaagatgcttttccagtcaaaagaaccagcaaatacttttctctggatctcactcatgatgaagttccagagtttgttgtgtaaagtccgtctgtgtgcagctgtacaggcagcttactgtttgctagaggatgcgaaagtcataagttctttacatattacttgtgccatatcttcttcaccctaaacatagctctttctttataatatttgtgatgatggaaacaaaagccttggaacaattgcactttaagtattacacagaagtaaaagaactacagaaaatgtacagcaagacaagtgcccggaagttcactgatccttcagaaggaaatgcgctttactgattgcaaagccttcagaatattggagtgtggtgtgtttgctcatctgatgctttttagttcagttacatgtaacatcacatttttttatcacgtgaaagatgttagatttgtttgcttataaattttttaccactcccacataaaatgctcatagtttgggagaggaaagagggaagattctctcttcttttaacagagagatgattgctctgtatacccattgcttcctccctgaggctgtcccaaagtgaacactgatggagtggtcaaaatcataaggttgtagcaagccaaagatacgtatgtgacagaagcacataagcaataagcagaaaaccagaagtgcatgctgtgatgcctgtgactccttcatcccgctcagtgccatgtcctcttttgtgatcttccagaaagctccaggattcatttgagttccacatccaagtaacagatgaattatattcatgttgtaatgcattttgtggagtttacaaaaccagtgtctgttaaaactttggaaaatgtcttagaaaacgttggtgcttggtgatgctttatttgtttaattatcaagaacaaattatggcaatgctagtttctgcttaaccaaaatactctgtgtatatattatacatatataaatacatgggattgtgtatgtctatatgtgtttaaagcttactatgtcttcattttggcttccatgactatcttttatacatggaattccttaagattgagaatatgtcactgagtgaatgatacctgcagacagtcagttgatatatgtagagttcagaatgactgttttctcatgtgcctttggccatgattctcaacactgattgtataacagaattttggggggagcttttaaaaaataatgactgagtctcccaccagaccgattacatcattctcttgtggcgggacccaagtagaattgccttttcttttaaagttctccagatggagctaatatgcaacaaagttgaaaaccactgatcctgggggtgtcttgttaattttgaagtaaaagtgtacagaagacgtagtgtatgagaaagggccatttttaagacagttacctgttgtgctgctgttacaatatataatgaaaccaagtcaggggagtgaatttatcaatcttttgatgtaaagtaaaaacgtagttcacacttcaggagagaacttcatagcacaatgtctttctataagatatttttaatgatttagtattttacaacatttgtttaccatattttgatataccatttttttctatctgcccagttttattaaaaaaactatatattattttctaaagaaacaatcatatttttatacaaaattatgttttcaggtaacgaaatagatgtagggtacagtggaacataagcagtgttacccctggctgggagtcagtattatacaacaaatggtgagctggaacatgccctgtctgtgctgtccctcctgtgctgggtcgcggatgtgtaggcaacattgccttatcacgctaggttcacctgacactttaaaaggaaaaaaagttccatagagttctgtggtcacaaaattgttttgcttttatcaaatactttaatagaaccaaagttgcagatattggaatgtatggaagtatctcagtctctgcataagaggattaaagtatgaaaggatcatttaatgactgttttacttataagtcattaagtaatccaccatttcttatggatgatgcttaagcctggtgaggtttgtactctaaggagcccagatcataatgcagtgcatttccttagcccttagagtttcttgcaaacatttaaaaaaagacatatttaagaaagaaagataaagaaaaaacatatttaattactgtaaacaggtactgctttatgtttattttctctctacttcaaccaaaatcagatctttgaggttttgctgacattgttggtggttttgcacatgttctttctaattggatttatgaatagttctatgggttttcaaagatgaatcatgctaagaacacttctgctttttgatccactgtttgcagcagaattatatatatgtataggaaaaatccactttgaataatccatgttttgtatttggaaattgtttttaaaaataaaaaggaaaggaaatata

SEQ ID NO: 338323 - DNA, 2604 bp, Homo sapiens
tggttgaatagtgttctattagcaacaatatatgaaatactagacacacccattaaaagtagaaaatacccactactgttttaaaattattctgcaagatctcactaatgcaatgagacataaaacagaaataatgggtgtaattattgaaaattggagataaaatttctattacttgcaaacaaaattctctatgtcaaaaacctgataagttaaacaatacagttaatatgtttaatagaactaattagatatgagaggcatccaaaatccattttttctatacaaacatggtttgatatatacagtcttgttttatctgtgtattaattggcttatgaaataatagaaaaatcaagtatgcattattaggttaaagaagcaggagagacagagctataaaaactaagaagaatgttgtaaggagggcttagcaaccaggataaatgttgtagagagatcaattaaagtgatggcctagagatcatgggcttcctttggcagagccatgttggtgaagtgaaggaagtgtaagccagaccacagtggttgaagaatgaatgtaatgtaagagccaagacatttatttgagtttgatagttatgaaaaagaacgagaattttcttattgctgttgtttttgccatttcatgttcaaaaccctttatctcccatgtgggactgaaaactcctccaagacaggatctctgtttctgtgaggcctgtagtacttagtacatccttgaatgtgtgaggctctcattggttataagtttaattcctgactgtggatgaaagctttaaaactttgtgggcaaaatacagaatgaatttcagtgagttcccatgtattaaataaggtggtgctggctggagatatgctgtccctgtgcccacaatagtagtggtgctgtgcttatcttcctgacgcgctcttcgcagtcttcaccgcctttcttcaggagtctccccttgggctttttcacagctatgaaacccacgtagtcgaacaccgtgatgcttctcctgcagggcgtgtgatgaggaggcgagcttggctttggagtgctgggaacctgaggaattgccaaggacccagagcccagccctgaccaccagagtgcccaaaacacaatgaacaaattgaattttcataacaacagagtcatgcaagaccgccgcagtgtgtgcattttccttcccaacgatgaatctctgaacatcatcataaatgttaagattctgtgtcaccagttgctggtccaggtttgtgacctgctcaggctaaaggactgccacctctttggactcagtgttatacaaaataatgaacatgtgtatatggagttgtcacaaaagctttacaaatattgtccaaaagaatggaagaaagaggccagcaagggtatcgaccaatttgggcctcctatgatcatccacttccgtgtgcagtactatgtggaaaatggcagattgatcagtgacagagcagcaagatactattattactggcacctgagaaaacaagttcttcattctcagtgtgtgctccgagaggaggcctacttcctgctggcagcctttgccctgcaggctgatcttgggaacttcaaaaggaataagcactatggaaaatacttcgagccaaaggcttacttcccatcttgggttgtttccaagagggggaaggactacatcctgaagcacattccaaacatgcacaaagatcagtttgcactaacagcttccgaagctcatcttaaatatatcaaagaggctgtccgactggatgacgtcgctgttcattactacagattgtataaggataaaagggaaattgaagcatcgctgactcttggattgaccatgaggggaatacagatttttcagaatttagatgaagagaaacaattactttatgatttcccctggacaaatgttggaaaattggtgtttgtgggtaagaaatttgagattttgccagatggcttgccttctgcccggaagctcatatactacacggggtgccccatgcgctccagacacctcctgcaacttctgagcaacagccaccgcctctatatgaatctgcagcctgtcctgcgccatatccggaagctggaggaaaacgaagagaagaagcagtaccgggaatcttacatcagtgacaacctggacctcgacatggaccagctggaaaaacggtcgcgggccagcgggagcagtgcgggcagcatgaaacacaagcgcctgtcccgtcattccaccgccagccacagcagttcccacacctcgggcattgaggcagacaccaagccccgggacacggggccagaagacagctactccagcagtgccatccaccgcaagctgaaaacctgcagctcaatgaccagtcatggcagctcccacacctcaggggtggagagtggcggcaaagaccggctggaagaggacttacaggacgatggtaacagtactgtcccctcactggctctctgtttagtctcccagttttttcaagcattggttctatagaactggtgtctggagagcaactttaggcagtagtaataaagtggaagaggtgtcttgttgtcttccc

SEQ ID NO: 338324 - DNA, 109 bp, Homo sapiens
cccttatcttgcagactatatgtcggaaaccaaagacctccactgatcgacacagcttgagcctcgatgacatcagactttaccagaaagacttcctgcgcattgcagg

SEQ ID NO: 338325 - DNA, 172 bp, Homo sapiens
aaaaaacaaagtttgaaagacactgatatagaggaagcgttatggttctgttatagatgagaactccagaagccctaactgagccacattggagaacagcaccagactgtgaagtctctgggctgtggtttcacaaatgtccccaggctccaatcccagtgcctccctgcat

SEQ ID NO: 338326 - DNA, 254 bp, Homo sapiens
ggtggcatggtgaggggtaccagggaaggacgaggacatgaaggcataaggttgggtaagacaggaacaagtgagacattaaacgaggctgtggtagagctgagccagagggcacagtaccaaagtgtcatagcaacaaagagggtgaggaggtgccctgaaaggacagcaccctcacaagctacagaagagatgtttccagagaccagggcaagcttctgtgcacacccatacctaatgcctctggagcagct

SEQ ID NO: 338327 - DNA, 140 bp, Homo sapiens
ctctgctgaagatggttgagaggatgactaagtggaaggctacgtgctccaggcatgcgggggtgggttatagaggcctgaggtccctgggatggggaagagggcagtgtttccttatcccaggaaccatcactgctgcc

SEQ ID NO: 338328 - DNA, 404 bp, Homo sapiens
gaagcctatgccttcctggtgaggggagtggaaggtaactgcactgagaaccccagcaaacctcacaaagccatgtcaggaagcaaagtggcagagccacagggagcacgggggaaggcaggatagagcacaggcagcatgtgaggagacagaagcagagacagggagaaacagagagacagagaaagaggaagagaacagatcccagattcaccagctgtgtctcaaggtcatctgggcaagtgacctggaaaccatcccaaaccatccagagatcagcagggtaaaccttcagccacccaggcctcctttcccacagccacaaaggtacataactccccttcccagccagacgccaccttagggaggaaaggggatgaattctggatgactaagcatttgcc

SEQ ID NO: 338329 - DNA, 115 bp, Homo sapiens
attaaatagccaaaatgaaagagtgaggtgctgagcttctggcaattcaccctgaggtatcacctttatataaagaccccaataagatatttgaatagagaaaaggcaatgaaaa

SEQ ID NO: 338330 - DNA, 748 bp, Homo sapiens
agtgctgggattacaggtgtgagccaccacacccggcctaccttttgttcttaaatgtaccctacttacttttgtatgttgctgtcttgagtgagcataataaaatcatttgtgtttttgctgagttacaaacctggaggagtgtatgcaaatgagatcacatggttgttcctcaagtgtttacaatattaatgcatattattaggtgtcacatagctcagatgtagtcttcaaatattaatctggtggtcataaatgcagaatatctagtatctagccttttcccttgcctcagagtttgtggtttaggagaaagaatcagatatgtggatgaaaacttcacattaaagaagtttcctttcaggaattggaagattggccacaactgcccatgttccagctgtgtctatccctcactcatgctaagcctgttctttagccttactgaggccacctgtttttttgttttgttttggggttttgccccattttgtattttgttagctctcttctttctttacttctttcctgactggatgtcatgatctgtcacttcaaacccctgtattgccaacatactttagtatccttgccctcttaccctctgaccgtgggtcagttgaactgtctatcctgtggactgctgagcactgctagcaaaacagcataatcttgcctctgcagcctctgctgagttctcatctcagcctacttaataatcctgctctcttttcttgggtagctcctt

SEQ ID NO: 338331 - DNA, 171 bp, Homo sapiens
ctgcccaaggttatgtaacttggcgatgagaaaaggaggacccaaacccagacctctcaagtcccccgtctgggccccttcatcttcttcacagcccacagcagctgccacctcggccgagcagccattttgatcgctaaagtgcctgcgggaagaccccatggccacccc

SEQ ID NO: 338332 - DNA, 192 bp, Homo sapiens
ccggacctctatccttaatctctctatccttagtctctctatccttaatctctctatccttaatgttcttccttagtctgataatgcggagaatgtgattttgagcatgtttttttgtgagcttttatggtaagagtccactagacctttgataatactttaatcgttcccataccagcttttttttttttt

SEQ ID NO: 338333 - DNA, 294 bp, Homo sapiens
aggggctggaacatattatcccattttcagcctgggataaaactggagggagcacccacaggcagggtcaggattcacaataggtgatggaagccttgaagttctattccacagagaacagaccagaaattttagtctggaaaataatcaggacacatttaatcagtcctccgtctcagtgaaaaatctcaagaatgtactcaaagaacaccgagtttcgaacaatactggttttcgtggatcccacaaaaagactggcattgttgtgaacaatctggccactttttttttttt

SEQ ID NO: 338334 - DNA, 248 bp, Homo sapiens
ttcacctaccccaaaaccatcaatggtttctcaatacctacattaaaagggtaaaaattctttgattaggcactccaagtccgtagacaagtcaattccaacctaaattttcaaatccatttctctgtacaccactccccatatacaccactccagggaaactgaactattctttcttatctgaatatactcttcacttcagatttttctttttctttacttttcctttttttttttttttttttttt

SEQ ID NO: 338335 - DNA, 204 bp, Homo sapiens
caggggtgagggaaccttagaattcaatcatcaggggaaaatgttggaggggtggctatagaggggatgatgagaaaatgtgtttcttgaccagtgattcagaatttttatgactagctttggctagttacattattagaaagtatacggtctgaagcagagagcttctgcttgcctggaacattaggatgtccagcttgttct

SEQ ID NO: 338336 - DNA, 979 bp, Homo sapiens
cttgagtccaggagatcaagaccagcctgggcaacatggtgaaaccccatctctactaaaaatacaaaagaattagccaggcgtggtggtgcatgcctgtggtgccagctacttggggggctgaggtgaaaggatctcttgagctcggtgagttgaggctgcagtgagctatgatcatgccactgtattccagcctgggaacagagtgagaacctgtcaaaaaaaaaaaaaaacttttttttccttttctgtgttccaaaggcagaacagaccaccagcggtatgaattttgcttcgtcttcacagacagacatggagcttgcaggaaagttgtttagagtaatcggacttttaacactggaaacagcacttccctgaatttgacttgagtttttttattaatattatgtttggatcatgagaagactcattcagacaggctgacttaagacattaaatgactagttaaccatatacactaatcacataaatatggtttgtggaatgatataaaatggtttacgaaatcatttttaagccatcttttcaacagtaattgtatcagtcctgtcatattttaaaccaagcgatattggcaagaatgagcctaaatgtctttaatattctgatgatgagcatgaaaaattgccactgcaataaaatgacagggttgtgttcatttctcttcttccatggcactttgctttcttccctttcaactttaaaacacacttcctaacatttcatcatgggagaaggctgcataagtttccagttgctgtaatttacttaaaccataaaattgtttccagattaccaaccataaaatggaaagacaatcttatttattaatgtataaatcagataatgtccccaatatgaatcctgaaaccagacacactttgacgattaaataggagggaaaatgttttctcattaccatatgtcaaaagaatggtatttttgtgaagtggctttg

SEQ ID NO: 338337 - DNA, 1039 bp, Homo sapiens
cttgagtccaggagatcaagaccagcctgggcaacatggtgaaaccccatctctactaaaaatacaaaagaattagccaggcgtggtggtgcatgcctgtggtgccagctacttggggggctgaggtgaaaggatctcttgagctcggtgagttgaggctgcagtgagctatgatcatgccactgtattccagcctgggaacagagtgagaacctgtcaaaaaaaaaaaaaaaaaaaaaaaaaggttctataaatggagtcattggctaaaaatcatcccctaaacacagattcttttttttccttttctgtgttccaaaggcagaacagaccaccagcggtatgaattttgcttcgtcttcacagacagacatggagcttgcaggaaagttgtttagagtaatcggacttttaacactggaaacagcacttccctgaatttgacttgagtttttttattaatattatgtttggatcatgagaagactcattcagacaggctgacttaagacattaaatgactagttaaccatatacactaatcacataaatatggtttgtggaatgatataaaatggtttacgaaatcatttttaagccatcttttcaacagtaattgtatcagtcctgtcatattttaaaccaagcgatattggcaagaatgagcctaaatgtctttaatattctgatgatgagcatgaaaaattgccactgcaataaaatgacagggttgtgttcatttctcttcttccatggcactttgctttcttccctttcaactttaaaacacacttcctaacatttcatcatgggagaaggctgcataagtttccagttgctgtaatttacttaaaccataaaattgtttccagattaccaaccataaaatggaaagacaatcttatttattaatgtataaatcagataatgtccccaatatgaatcctgaaaccagacacactttgacgattaaataggagggaaaatgttttctcattaccatatgtcaaaagaatggtatttttgtgaagtggctttg

SEQ ID NO: 338338 - DNA, 424 bp, Homo sapiens
ctccatggtaacctcagcctcttctggtagaaacttatttgctcagactgagagcaaaacaattgctttgtttctgttttctttcttattatgcctaggcacactgtctggactaggcctctcccagtctctcagaatgagaggtctctgtggctgcttaatctaaccttttgctagtgagggataatgacttgggaacagagagaaggtctatgagagactgtagcagggcttcacatgttttggaagacattcattcaacatgtgtaatgaccaattccaggtcaggccttattgcaaggactagaaatatagcccctatgactgccctgcctccttttcccaccctctcctgacctcatctacaaaatccccacccagggcctgcagcaggtgggcaggaagagccctgaggccacagctt

SEQ ID NO: 338339 - DNA, 6331 bp, Homo sapiens
  misc_feature (4346)..(4346): n is a, c, g, or t
  misc_feature (4530)..(4530): n is a, c, g, or t
  misc_feature (4723)..(4723): n is a, c, g, or t
  misc_feature (4765)..(4765): n is a, c, g, or t
  misc_feature (5067)..(5067): n is a, c, g, or t
gtcctccccggccgctcctccgagatgacgccggggtcggtgccccgggcctgccctatcccctggctccagggctaggcgggaccgagggctgccccagacagacggacccgcggacccacagaccccgcgcccaggagaggagccgcgccgcccgccgctggcagcccgtcaccatggaccctccatccctcgacacagccatccagcatgccctggcgggcctctatcctcctttcgaggccacagcacccaccgtcctgggtcaggtgttccgtctcctggactctggcttccagggggatgggctgagcttccttctggatttcctgatccctgccaagcgcctgtgtgagcaagtgcgagaagcagcctgtgctccctactcacactgcctcttcttacacgagggctggccactctgtctgagggatgaagttgtggtccacttggcacccctcaaccctctcttattgcgccagggtgacttctacctccaagtggagccccaggaggagcagtctgtctgcatcatgatcaaatgcctctccctggacctctgcacagtggacaagaagcctgttccagagccagcctaccctatacttttcacccaagaatggctggaggccatcaacagtgactttgagggaaatcccctacacaactgcttggtagcatcagaaaatgggattgcccctgtgccttggaccaagataaccagcccagagtttgtggatgacagaccccaagtagtgaatgccctctgccaagcctgggggccccttccattagaggcactggatttgagcagccctcaagagttgcaccaggccagctccccagacaaccaggtgcttcctgcccagagtttggccaagggtaagggcaggacatatgggagcaagtatccaggactcatcaaggtggagcaagcccggtgtggggaggtggctttcaggatggacgaggtggtcagccaggacttcgagggagactatgtggctctcctaggcttttcccaagagagcagaggagagtctcccagtagggaggcaggcacatccagtgggtgtacttctggggcactagaggagatagctggaactaaggaaactcccttatttcaaaagatactgcctctctcagaggccaatgaaggaccttccttgggaaatcgggcttgcacaaagccagaaagctctgaggagaggccctataatttgggcttcaggagaaaggtcaatcttaaagcacccacccacaactcagaaaggccgccccaaggctcctacatgaatgtccttgaggacgcactggactgtgcctctggtctcagggcaggtgtctcacaagagccagctgcctccaagatgcagggacctctaggaaacccagagaatatggtgcagctcaggcctggaccaagacaagcctcctctccccgcctgtccccagcttctcctgcagctgcagcctctgaaacaaagatagaggtgaagaccaaagagagaaatgggagacttcccaagcccatgccctgccctagcagaaacacctcctcccctgagccccccactcctgggctcaaattctcattcttgagagggcagaggcaaccctctgtgaccccggagaaagcctcactccagcacaatgggccctggaaagtcctgtgttccctctactctcctaaacccaaccgagccaaatctttggggaaagctggaacaactcagaccaaaacatctggcccagccactgcccccagcccactgactgaggaaaaggctgccttgccagaagcttctgcaggctccccagaaagaggccccaccctggaggaggagcccccagggcctgagcccaggattggggctctaggtgtcaaggttttccgctccaggatagcatgcctgccaggtggccgggacagggccgggcggcccctgcttctggtgtcaactacagagggggcctgggaggcaccatggtgcacagtttcagaggtcaccaagctactgtcctacctgtgtaccatccccaggcctgaagataaagccaaggggctggcggtcctgattgacgccaggagacagcccccacagcccggtctggtcagcgccctgcaggccacccaggctcaggtcccagcctctatccgggctattctcttcctgggggagaaggaggcggctctccagctgcagacattacctgacgtccaggtggaggtgctgacctcattgaaggccctcagccaccatgtggaccccagccagctgcccgcagtcctggaaggccccttcccctactgccacaccgagtgggttcatttcttccagaagctggaccctttccttgctgacctccaccaggcctcttccctgctacaagcttccatcgaggaattcgagaaggccgacccccctggggggatgcaggaggctaccaggtgcctgagcaagtccaaggagctgatggaggctgtgctgagggaccccggcctactgggcctccagcgggaaggtggagccaccctggccaggctgcagcatgatgccagcaggctggacttcagccctgatgtcaggagccatctggctgcagccactgccttgtacagccttgtggacgagcagcttcatgttctggtcaccgcttccaacagcctcctggggaagctggagctccgtgtccgcctgggccgcctggaagctgccattcaccaggtcagcgactggatggagcaggaaggaaggcggtgcctgcaatcactgacccccaaggatggaagtttggagacagtggagaaagcccacgcagaatttgagaacttcttcctccaggctgcagcccagtaccgccgaggcctggagctgtccaagcaggccgctcagctgggagctacagccagaggggctggggaggcagaacgtgcagagttcccagagctggcagcctttgcctctacccagcgggccttccaggctgagctgacccacttttacatggcggccgagcggcaacgcacggacctcgagacgctgctccacctgcaccgcttctgcaagaggatgacctggttccacatggactgtcaggacctgatggcccagctcaggctggacaagacctcaagggtcagtcctggggaccagcgccgcctccaccgctacctgcagcgactggcatctgagttccctgctgagaagctcgcagccgtggggctgcaggtggcctccctgagccgggcaggcctgggccaggagctatgggaggaggcccggatcaggcatgaggagatccggatgctcctggagaaggcactgacccacagctcttgcccagaggctccagctgctcactcagcgcgcccagaacgaagaggggtggcagccaagggccagggtgtgagtgtagaggtcacttccaaggggaggtgggatcagcctccactagactcactgggcatggaccatttgccaaagtcctattggcctcctgggccccccagaggggaacagaacagaactttccaggcaggctctccaccccaggaagctggccaggctgcagaggctgaagacggcaaaggctcccacaagctgcctgaccctgcccgcgagcatttgcttgccaccaccttcttccggcagcagccccccaggcagagccaggtccctcgcctcactgggggcagcttctcctcagaggggacagactcacagacatcccttgaggactcaccccagacaagtccccttgcctccctctagctgagaggccccttcagtcgcaccagcctccaggagcactgggccagggcccagctggaggggtagctgggagctctggtcagtcccagtgagacgtcaccatggagcactggttttacattctgcctctgctgggaggatgagaactgtcgacctgcccctggctccagaaaactcctggaagacccgatcttcacccatgcagaatagcaagagtgggcgtcagaaccagggcacaataaatggtgtgattggctccatccctccaggctctcattgtggaaagacctgtcggcacagacccctccagaggtctcgctcgcaggcaggcagacacccacctgcagctcaggaacatacacagctctcccctcgggtacgagggccagtgttgcccttaggcagaatcctcggggagattcgggagtgcttccttgtcttggattccaggaaaatggaccctgagatgaggatttaaggatcagtgtgtttggtgctgatccaggaacctctgctgggggagtaggaggcgaatctgcaaagggaataaagagtatgttgtcaagnaaattttcttttttttaatttttaaaacttcattgtattttatgtttagagatggggcctcactacattgcccaggctggtctcaaactcctgggctcaagtgatcctcttgccttggcctgccaaagtgctgggattgccttttccgcccaccccccccgaccccaccagagacagggtctcnctctggtgtccaggctggagtgcagtggtgcaatcatagccttaaattcctgggttcaaccaatcctcccacctcagcctcctaagtagctgggactacagttatgcaccaccatgctcagcttattatttatttattttttgtagacatggggtcttgctatgttgcccaggcaggctgatctcaagctcangtgatcctctggactcagcctcccaaagtgctgggattatangtatgagccactgtgccccaccctcatacaaatttccatgttggcaactgtagctggatctttctggagatctctgaaagacagcatggaatccttgaacaccccctgaggcgtgaggcatccagagcatttatctgccaaccctcaggagctggcactcgtagacagcacgcacagccagctccattggtcttggcaaagagaattgcctcctggagccagaggccggttcctgtgcttagaaaggaaggacatgtcttctgtgctccctgtctcacaaggcctcttcagcaggcatgggnccttcattctcaagttcaaggaaccctgtggaaccttgtccttgtcctccagagagaatcctctccgccttagaggtccctcctctctctcacctccccaccaagcctccctgaactcaatgtcttctgtccccttccctgcccaacttccacttctctatgcccagcctctgtggcccagtaccattggggttctgtgggcagctgggtcctggtggttggggaccgtgggaaggggcctatctgtcggatcttagatggagcatccagaagccccacccttcatactggccagagtggcccctgccagcgcctctctggagtgtcattaagctgaaagtgtttgccttacctctgcagtaggatgcattactgaagtggcctcttggtcacctagctctgaattttcctggctccagaaagaggctgtggggcacaggtcccccacaatgaggctgtgaaggggagagaggcaggcctgggccaggcacaggaggacaactagggcttctcaggagctgtctcagccaagagtcacacacttgatacctaaaatggcttcaggaatcttccaagactgaagacttccccaggtgtggtctagggcctgcctgcctcagagccatgagcagagccggtcaaaaggcttcctagggaatcctaccccagacattaaaatagactcttggtgctggcaggtggctggaatctgcgtttgtagccaagtgctcttcctgtgtgactcagcaaagtgggggtgcatttggggaacacccggggctggggcctgagtcctccacccaaagccaggtttgattcttgcattcccctccctgccttccatccagacaggcccaaggatgcaagaggcgttgatcagcccatctccatccatgcctgttgcctcagagagggccgacggcttttaaaatgctgttgccatagcaacagcatccagccagtgggtaccacaggcagggagccacagaaactggggtgctgggatggaaactgacttgtgagagaccacagctactgctagaaggaaggggggcaaagcgggcacaggtaatctaagaatacttgggcgggaggagtccccaaggttaccttgtgcatccctctgtccccagaaagaactgtaccccaacaatctctcccctcactgcatcccctggggaagaagggaatgcagaaatgaaatgtcataatgagtaacaatgtataaaaatatcgaataataacagctaacatttcttttgca

SEQ ID NO: 338340 - DNA, 4073 bp, Homo sapiens
  misc_feature (4070)..(4070): n is a, c, g, or t
tgcacgctgcagagggtggtgcccacgtggagtggctggtggtcattgcagggcatcctggagtgaggtgactgaagtgcagggctctgagtccaggctgcgagacaggtgtggtttcccaaggcccgagcctctttccctgctgctgtatttgccctcccctttcctccccatgaggatgggctgtactggctcccggagcctcagcctcatgactcctgtggggagagtgaggcacaccgcccagattcctggaacaggaaatagcctgtcggaaacccagggttgaaagtctgcaagaagaaatagtgctggtggccacagggctgcacgctcaccaccccttggactggagacgagaacagagacagtgatcattgtaacgaccaacgattgagcaactcaatcattcactgagctcttgctgtgtattaagtgcttctcaggagctgtctgatttcatccttgaaataacctaataagctcagcatattattctccctgtttaacagatgaggaaactgaagctcagaggtgcactgacttgcccacagacacacagtgagtcactgcagagcagagacttgacccctttctgtgtgaccccagagctcatgccatgagctttgcctgcccacgtatcttatacagagggagtgctctgcacagaggagattcagggaagacttttctcacgaagtggtgtttgagctgggtcttgaaggataagtagaagtcagagttcacagaaggagaaggagagaaagggtgttccaggcaaaggaaccgttacggccaaaggtctgcaggccacaggagaggtccctagagggccccccacaagttctcactgctcacgtgtgccctctgtcctccaggtggccgggacagggccgggcggcccctgcttctggtgtcaactacagagggggcctgggaggcaccatggtgcacagtttcagaggtcaccaagctactgtcctacctgtgtaccatccccaggcctgaagataaagccaaggggctggcggtcctgattgacgccaggagacagcccccacagcccggtctggtcagcgccctgcaggccacccaggctcaggtcccagcctctatccgggctattctcttcctgggggagaaggaggcggctctccagctgcagacattacctgacgtccaggtggaggtgctgacctcattgaaggccctcagccaccatgtggaccccagccagctgcccgcagtcctggaaggccccttcccctactgccacaccgagtgggttcatttcttccagaagctggaccctttccttgctgacctccaccaggcctcttccctgctacaagcttccatcgaggaattcgagaaggccgacccccctggggggatgcaggaggctaccaggtgcctgagcaagtccaaggagctgatggaggctgtgctgagggaccccggcctactgggcctccagcgggaaggtggagccaccctggccaggctgcagcatgatgccagcaggctggacttcagccctgatgtcaggagccatctggctgcagccactgccttgtacagccttgtggacgagcagcttcatgttctggtcaccgcttccaacagcctcctggggaagctggagctccgtgtccgcctgggccgcctggaagctgccattcaccaggtcagcgactggatggagcaggaaggaaggcggtgcctgcaatcactgacccccaaggatggaagtttggagacagtggagaaagcccacgcagaatttgagaacttcttcctccaggctgcagtgcgttccagacaacagaggagcaggactggagcagatggagagggcgttagagggggtggcactgccagggcaaagctgtggaggtgggaaagagcaagaaaagttccagagacagtgagggaaccagcttggattgcagagttcagctgagatgttatctcccccagagattcttaccagatggccaagcccaaagaatattctgaatcccccagagggtttcttaaaatgcagtttccagggccccatcctagacctaataactcagcctcacagagccgggggttggagggcagggaagctgcatcaacgtgatgcgatgtgacaaggctctggaccacagggtgattcagccccgtatcagcgctcaggaattctcaggccagtggggagcgggggcgggggcggggacaaacagggaagcgcacagtaagggagaatgtggggactcagagcaggagcctttggagtcagagaagttttccagaaggaacatctaagcagagcccggctaggcaaagtgaactgccatggcgagggcctggagacttccagaagcgtgataactgctcttaattgttcaaccctcaccaggagctaagccctgtgaggtgggtgctattagggtccccattctacagatgaggaaactgaagctcaggaagtctcctggctcgccagcaaggcagctggaggttgctgacctccgagggaggccccagccaaggtgggtgctgagtgggcgccccctcctctcccctctcaggcccagtaccgccgaggcctggagctgtccaagcaggccgctcagctgggagctacagccagaggggctggggaggcagaacgtgcagagttcccagagctggcagcctttgcctctacccagcgggccttccaggctgagctgacccacttttacatggcggccgagcggcaacgcacggacctcgagacgctgctccacctgcaccgcttctgcaagaggatgacctggttccacatggactgtcaggacctgatggcccagctcaggctggacaagacctcaagggtcagtcctggggaccagcgccgcctccaccgctacctgcagcgactggcatctgagttccctgctgagaagctcgcagccgtggggctgcaggtggcctccctgagccgggcaggcctgggccaggagctatgggaggaggcccggatcaggcatgaggagatccggatgctcctggagaaggcactgacccacagctcttgcccagaggctccagctgctcactcagcgcgcccagaacgaagaggggtggcagccaagggccagggtgtgagtgtagaggtcacttccaaggggaggtgggatcagcctccactagactcactgggcatggaccatttgccaaagtcctattggcctcctgggccccccagaggggaacagaacagaactttccaggcaggctctccaccccaggaagctggccaggctgcagaggctgaagacggcaaaggctcccacaagctgcctgaccctgcccgcgagcatttgcttgccaccaccttcttccggcagcagccccccaggcagagccaggtccctcgcctcactgggggcagcttctcctcagaggggacagactcacagacatcccttgaggactcaccccagacaagtccccttgcctccctctagctgagaggccccttcagtcgcaccagcctccaggagcactgggccagggcccagctggaggggtagctgggagctctggtcagtcccagtgagacgtcaccatggagcactggttttacattctgcctctgctgggaggatgagaactgtcgacctgcccctggctccagaaaactcctggaagacccgatcttcacccatgcagaatagcaagagtgggcgtcagaaccagggcacaataaatggtgtgattggctccatccctccaggctctcattgtggaaagacctgtcggcacagacccctccagaggtctcgctcgcaggcaggcagacacccacctgcagctcaggaacatacacagctctcccctcgggtacgagggccagtgttgcccttaggcagaatcctcggggagattcgggagtgcttccttgtcttggattccaggaaaatggaccctgagatgaggatttaaggatcagtgtgtttggtgctgatccaggaacctctgctgggggagtaggaggcgaatctgcaaagggaataaagagtatgttgtcaagnaaa

SEQ ID NO: 338341 - DNA, 3221 bp, Homo sapiens
  misc_feature (3218)..(3218): n is a, c, g, or t
ggggggctgtgctccaggcagggggcaaacacatgtgaaggccctgaggtgggattatacctggggtgttcaggagtagcaaggaggccagtgtggagcagaatgagtgggaaagaagcatgagtggagcttctagatgcagcaggagctggaccaaggaagagttgggctgggattcagttcgaagcctgcagggaaagccactggagagttttaaaccaggggttatcagatttgcactttgagatccgttcaactgccatgtggagaacagactgtagggggagccagagggcagcagggagatcagcgaagaggctggaatgggtgtcccagcaagagatgctggagggtggaccaatgaggttgccgtggtgacgagaggggacatggctagaggggatgttttagagacagaaatgacagactttctggaggaccttgaatgccaaactgggagttggacttgatctgggtgtggggagccttggaaggttgcagagggagagtggggatggggcctcagggcacctccctacgctggcaggaggctaccaggtgcctgagcaagtccaaggagctgatggaggctgtgctgagggaccccggcctactgggcctccagcgggaaggtggagccaccctggccaggctgcagcatgatgccagcaggctggacttcagccctgatgtcaggagccatctggctgcagccactgccttgtacagccttgtggacgagcagcttcatgttctggtcaccgcttccaacagcctcctggggaagctggagctccgtgtccgcctgggccgcctggaagctgccattcaccaggtcagcgactggatggagcaggaaggaaggcggtgcctgcaatcactgacccccaaggatggaagtttggagacagtggagaaagcccacgcagaatttgagaacttcttcctccaggctgcagtgcgttccagacaacagaggagcaggactggagcagatggagagggcgttagagggggtggcactgccagggcaaagctgtggaggtgggaaagagcaagaaaagttccagagacagtgagggaaccagcttggattgcagagttcagctgagatgttatctcccccagagattcttaccagatggccaagcccaaagaatattctgaatcccccagagggtttcttaaaatgcagtttccagggccccatcctagacctaataactcagcctcacagagccgggggttggagggcagggaagctgcatcaacgtgatgcgatgtgacaaggctctggaccacagggtgattcagccccgtatcagcgctcaggaattctcaggccagtggggagcgggggcgggggcggggacaaacagggaagcgcacagtaagggagaatgtggggactcagagcaggagcctttggagtcagagaagttttccagaaggaacatctaagcagagcccggctaggcaaagtgaactgccatggcgagggcctggagacttccagaagcgtgataactgctcttaattgttcaaccctcaccaggagctaagccctgtgaggtgggtgctattagggtccccattctacagatgaggaaactgaagctcaggaagtctcctggctcgccagcaaggcagctggaggttgctgacctccgagggaggccccagccaaggtgggtgctgagtgggcgccccctcctctcccctctcaggcccagtaccgccgaggcctggagctgtccaagcaggccgctcagctgggagctacagccagaggggctggggaggcagaacgtgcagagttcccagagctggcagcctttgcctctacccagcgggccttccaggctgagctgacccacttttacatggcggccgagcggcaacgcacggacctcgagacgctgctccacctgcaccgcttctgcaagaggatgacctggttccacatggactgtcaggacctgatggcccagctcaggctggacaagacctcaagggtcagtcctggggaccagcgccgcctccaccgctacctgcagcgactggcatctgagttccctgctgagaagctcgcagccgtggggctgcaggtggcctccctgagccgggcaggcctgggccaggagctatgggaggaggcccggatcaggcatgaggagatccggatgctcctggagaaggcactgacccacagctcttgcccagaggctccagctgctcactcagcgcgcccagaacgaagaggggtggcagccaagggccagggtgtgagtgtagaggtcacttccaaggggaggtgggatcagcctccactagactcactgggcatggaccatttgccaaagtcctattggcctcctgggccccccagaggggaacagaacagaactttccaggcaggctctccaccccaggaagctggccaggctgcagaggctgaagacggcaaaggctcccacaagctgcctgaccctgcccgcgagcatttgcttgccaccaccttcttccggcagcagccccccaggcagagccaggtccctcgcctcactgggggcagcttctcctcagaggggacagactcacagacatcccttgaggactcaccccagacaagtccccttgcctccctctagctgagaggccccttcagtcgcaccagcctccaggagcactgggccagggcccagctggaggggtagctgggagctctggtcagtcccagtgagacgtcaccatggagcactggttttacattctgcctctgctgggaggatgagaactgtcgacctgcccctggctccagaaaactcctggaagacccgatcttcacccatgcagaatagcaagagtgggcgtcagaaccagggcacaataaatggtgtgattggctccatccctccaggctctcattgtggaaagacctgtcggcacagacccctccagaggtctcgctcgcaggcaggcagacacccacctgcagctcaggaacatacacagctctcccctcgggtacgagggccagtgttgcccttaggcagaatcctcggggagattcgggagtgcttccttgtcttggattccaggaaaatggaccctgagatgaggatttaaggatcagtgtgtttggtgctgatccaggaacctctgctgggggagtaggaggcgaatctgcaaagggaataaagagtatgttgtcaagnaaa

SEQ ID NO: 338342 - DNA, 5392 bp, Homo sapiens
  misc_feature (5115)..(5115): n is a, c, g, or t
gtcctccccggccgctcctccgagatgacgccggggtcggtgccccgggcctgccctatcccctggctccagggctaggcgggaccgagggctgccccagacagacggacccgcggacccacagaccccgcgcccaggagaggagccgcgccgcccgccgctggcagcccgtcaccatggaccctccatccctcgacacagccatccagcatgccctggcgggcctctatcctcctttcgaggccacagcacccaccgtcctgggtcaggtgttccgtctcctggactctggcttccagggggatgggctgagcttccttctggatttcctgatccctgccaagcgcctgtgtgagcaagtgcgagaagcagcctgtgctccctactcacactgcctcttcttacacgagggctggccactctgtctgagggatgaagttgtggtccacttggcacccctcaaccctctcttattgcgccagggtgacttctacctccaagtggagccccaggaggagcagtctgtctgcatcatgatcaaatgcctctccctggacctctgcacagtggacaagaagcctgttccagagccagcctaccctatacttttcacccaagaatggctggaggccatcaacagtgactttgagggaaatcccctacacaactgcttggtagcatcagaaaatgggattgcccctgtgccttggaccaagataaccagcccagagtttgtggatgacagaccccaagtagtgaatgccctctgccaagcctgggggccccttccattagaggcactggatttgagcagccctcaagagttgcaccaggccagctccccagacaaccaggtgcttcctgcccagagtttggccaagggtaagggcaggacatatgggagcaagtatccaggactcatcaaggtggagcaagcccggtgtggggaggtggctttcaggatggacgaggtggtcagccaggacttcgagggagactatgtggctctcctaggcttttcccaagagagcagaggagagtctcccagtagggaggcaggcacatccagtgggtgtacttctggggcactagaggagatagctggaactaaggaaactcccttatttcaaaagatactgcctctctcagaggccaatgaaggaccttccttgggaaatcgggcttgcacaaagccagaaagctctgaggagaggccctataatttgggcttcaggagaaaggtcaatcttaaagcacccacccacaactcagaaaggccgccccaaggctcctacatgaatgtccttgaggacgcactggactgtgcctctggtctcagggcaggtgtctcacaagagccagctgcctccaagatgcagggacctctaggaaacccagagaatatggtgcagctcaggcctggaccaagacaagcctcctctccccgcctgtccccagcttctcctgcagctgcagcctctgaaacaaagatagaggtgaagaccaaagagagaaatgggagacttcccaagcccatgccctgccctagcagaaacacctcctcccctgagccccccactcctgggctcaaattctcattcttgagagggcagaggcaaccctctgtgaccccggagaaagcctcactccagcacaatgggccctggaaagtcctgtgttccctctactctcctaaacccaaccgagccaaatctttggggaaagctggaacaactcagaccaaaacatctggcccagccactgcccccagcccactgactgaggaaaaggctgccttgccagaagcttctgcaggctccccagaaagaggccccaccctggaggaggagcccccagggcctgagcccaggattggggctctaggtgtcaaggttttccgctccaggatagcatgcctgccaggtggccgggacagggccgggcggcccctgcttctggtgtcaactacagagggggcctgggaggcaccatggtgcacagtttcagaggtcaccaagctactgtcctacctgtgtaccatccccaggcctgaagataaagccaaggggctggcggtcctgattgacgccaggagacagcccccacagcccggtctggtcagcgccctgcaggccacccaggctcaggtcccagcctctatccgggctattctcttcctgggggagaaggaggcggctctccagctgcagacattacctgacgtccaggtggaggtgctgacctcattgaaggccctcagccaccatgtggaccccagccagctgcccgcagtcctggaaggccccttcccctactgccacaccgagtgggttcatttcttccagaagctggaccctttccttgctgacctccaccaggcctcttccctgctacaagcttccatcgaggaattcgagaaggccgacccccctggggggatgcaggaggctaccaggtgcctgagcaagtccaaggagctgatggaggctgtgctgagggaccccggcctactgggcctccagcgggaaggtggagccaccctggccaggctgcagcatgatgccagcaggctggacttcagccctgatgtcaggagccatctggctgcagccactgccttgtacagccttgtggacgagcagcttcatgttctggtcaccgcttccaacagcctcctggggaagctggagctccgtgtccgcctgggccgcctggaagctgccattcaccaggtcagcgactggatggagcaggaaggaaggcggtgcctgcaatcactgacccccaaggatggaagtttggagacagtggagaaagcccacgcagaatttgagaacttcttcctccaggctgcagtgcgttccagacaacagaggagcaggactggagcagatggagagggcgttagagggggtggcactgccagggcaaagctgtggaggtgggaaagagcaagaaaagttccagagacagtgagggaaccagcttggattgcagagttcagctgagatgttatctcccccagagattcttaccagatggccaagcccaaagaatattctgaatcccccagagggtttcttaaaatgcagtttccagggccccatcctagacctaataactcagcctcacagagccgggggttggagggcagggaagctgcatcaacgtgatgcgatgtgacaaggctctggaccacagggtgattcagccccgtatcagcgctcaggaattctcaggccagtggggagcgggggcgggggcggggacaaacagggaagcgcacagtaagggagaatgtggggactcagagcaggagcctttggagtcagagaagttttccagaaggaacatctaagcagagcccggctaggcaaagtgaactgccatggcgagggcctggagacttccagaagcgtgataactgctcttaattgttcaaccctcaccaggagctaagccctgtgaggtgggtgctattagggtccccattctacagatgaggaaactgaagctcaggaagtctcctggctcgccagcaaggcagctggaggttgctgacctccgagggaggccccagccaaggtgggtgctgagtgggcgccccctcctctcccctctcaggcccagtaccgccgaggcctggagctgtccaagcaggccgctcagctgggagctacagccagaggggctggggaggcagaacgtgcagagttcccagagctggcagcctttgcctctacccagcgggccttccaggctgagctgacccacttttacatggcggccgagcggcaacgcacggacctcgagacgctgctccacctgcaccgcttctgcaagaggatgacctggttccacatggactgtcaggacctgatggcccagctcaggctggacaagacctcaagggtcagtcctggggaccagcgccgcctccaccgctacctgcagcgactggcatctgagttccctgctgagaagctcgcagccgtggggctgcaggtggcctccctgagccgggcaggcctgggccaggagctatgggaggaggcccggatcaggcatgaggagatccggatgctcctggagaaggcactgacccacagctcttgcccagaggctccagctgctcactcagcgcgcccagaacgaagaggggtggcagccaagggccagggtgtgagtgtagaggtcacttccaaggggaggtgggatcagcctccactagactcactgggcatggaccatttgccaaagtcctattggcctcctgggccccccagaggggaacagaacagaactttccaggcaggctctccaccccaggaagctggccaggctgcagaggctgaagacggcaaaggctcccacaagctgcctgaccctgcccgcgagcatttgcttgccaccaccttcttccggcagcagccccccaggcagagccaggtccctcgcctcactgggggcagcttctcctcagaggggacagactcacagacatcccttgaggactcaccccagacaagtccccttgcctccctctagctgagaggccccttcagtcgcaccagcctccaggagcactgggccagggcccagctggaggggtagctgggagctctggtcagtcccagtgagacgtcaccatggagcactggttttacattctgcctctgctgggaggatgagaactgtcgacctgcccctggctccagaaaactcctggaagacccgatcttcacccatgcagaatagcaagagtgggcgtcagaaccagggcacaataaatggtgtgattggctccatccctccaggctctcattgtggaaagacctgtcggcacagacccctccagaggtctcgctcgcaggcaggcagacacccacctgcagctcaggaacatacacagctctcccctcgggtacgagggccagtgttgcccttaggcagaatcctcggggagattcgggagtgcttccttgtcttggattccaggaaaatggaccctgagatgaggatttaaggatcagtgtgtttggtgctgatccaggaacctctgctgggggagtaggaggcgaatctgcaaagggaataaagagtatgttgtcaagnaaaaaaaaaaaaaaaaaaacaagaacagaaaggaaagaaaaaagaaggggggggggggggaaaaaagaatcccccggggagcggcccagtgtatgcggctgcccccgcttttgtgtgaaacgaagcggggcccataagagagagcgccgataaaagaacgacagacacgggcccgggattacaacagcgcggcgcgggggacaacacgggctacgcgggggaccccttccgcgagcgaccaacactccgggggggacacaagtgcggcacacaccgg

SEQ ID NO: 338343 - DNA, 2125 bp, Homo sapiens
gtcctccccggccgctcctccgagatgacgccggggtcggtgccccgggcctgccctatcccctggctccagggctaggcgggaccgagggctgccccagacagacggacccgcggacccacagaccccgcgcccaggagaggagccgcgccgcccgccgctggcagcccgtcaccatggaccctccatccctcgacacagccatccagcatgccctggcgggcctctatcctcctttcgaggccacagcacccaccgtcctgggtcaggtgttccgtctcctggactctggcttccagggggatgggctgagcttccttctggatttcctgatccctgccaagcgcctgtgtgagcaagtgcgagaagcagcctgtgctccctactcacactgcctcttcttacacgagggctggccactctgtctgagggatgaagttgtggtccacttggcacccctcaaccctctcttattgcgccagggtgacttctacctccaagtggagccccaggaggagcagtctgtctgcatcatgatcaaatgcctctccctggacctctgcacagtggacaagaagcctgttccagagccagcctaccctatacttttcacccaagaatggctggaggccatcaacagtgactttgagggaaatcccctacacaactgcttggtagcatcagaaaatgggattgcccctgtgccttggaccaagataaccagcccagagtttgtggatgacagaccccaagtagtgaatgccctctgccaagcctgggggccccttccattagaggcactggatttgagcagccctcaagagttgcaccaggccagctccccagacaaccaggtgcttcctgcccagagtttggccaagggtaagggcaggacatatgggagcaagtatccaggactcatcaaggtggagcaagcccggtgtggggaggtggctttcaggatggacgaggtggtcagccaggacttcgagggagactatgtggctctcctaggcttttcccaagagagcagaggagagtctcccagtagggaggcaggcacatccagtgggtgtacttctggggcactagaggagatagctggaactaaggaaactcccttatttcaaaagatactgcctctctcagaggccaatgaaggaccttccttgggaaatcgggcttgcacaaagccagaaagctctgaggagaggccctataatttgggcttcaggagaaaggtcaatcttaaagcacccacccacaactcagaaaggccgccccaaggctcctacatgaatgtccttgaggacgcactggactgtgcctctggtctcagggcaggtgtctcacaagagccagctgcctccaagatgcagggacctctaggaaacccagagaatatggtgcagctcaggcctggaccaagacaagcctcctctccccgcctgtccccagcttctcctgcagctgcagcctctgaaacaaagatagaggtgaagaccaaagagagaaatgggagacttcccaagcccatgccctgccctagcagaaacacctcctcccctgagccccccactcctgggctcaaattctcattcttgagagggcagaggcaaccctctgtgaccccggagaaagcctcactccagcacaatgggccctggaaagtcctgtgttccctctactctcctaaacccaaccgagccaaatctttggggaaagctggaacaactcagaccaaaacatctggcccagccactgcccccagcccactgactgaggaaaaggctgccttgccagaagcttctgcaggctccccagaaagaggccccaccctggaggaggagcccccagggcctgagcccaggattggggctctaggtgtcaaggttttccgctccaggatagcatgcctgccaggttccaggggattcaagcaggaggtggtagggagggagctgggggccccagagcatcttcagctgctgttgggtggaggggaggcagggaatgccctggaggcctaggttctagaccaagcctccttgggcctcagtttcctcatctttcccatgggagaattggaatagatgaaagcaatttgttggtatccatccaccca

SEQ ID NO: 338344 - DNA, 5118 bp, Homo sapiens
  misc_feature (5115)..(5115): n is a, c, g, or t
gtcctccccggccgctcctccgagatgacgccggggtcggtgccccgggcctgccctatcccctggctccagggctaggcgggaccgagggctgccccagacagacggacccgcggacccacagaccccgcgcccaggagaggagccgcgccgcccgccgctggcagcccgtcaccatggaccctccatccctcgacacagccatccagcatgccctggcgggcctctatcctcctttcgaggccacagcacccaccgtcctgggtcaggtgttccgtctcctggactctggcttccagggggatgggctgagcttccttctggatttcctgatccctgccaagcgcctgtgtgagcaagtgcgagaagcagcctgtgctccctactcacactgcctcttcttacacgagggctggccactctgtctgagggatgaagttgtggtccacttggcacccctcaaccctctcttattgcgccagggtgacttctacctccaagtggagccccaggaggagcagtctgtctgcatcatgatcaaatgcctctccctggacctctgcacagtggacaagaagcctgttccagagccagcctaccctatacttttcacccaagaatggctggaggccatcaacagtgactttgagggaaatcccctacacaactgcttggtagcatcagaaaatgggattgcccctgtgccttggaccaagataaccagcccagagtttgtggatgacagaccccaagtagtgaatgccctctgccaagcctgggggccccttccattagaggcactggatttgagcagccctcaagagttgcaccaggccagctccccagacaaccaggtgcttcctgcccagagtttggccaagggtaagggcaggacatatgggagcaagtatccaggactcatcaaggtggagcaagcccggtgtggggaggtggctttcaggatggacgaggtggtcagccaggacttcgagggagactatgtggctctcctaggcttttcccaagagagcagaggagagtctcccagtagggaggcaggcacatccagtgggtgtacttctggggcactagaggagatagctggaactaaggaaactcccttatttcaaaagatactgcctctctcagaggccaatgaaggaccttccttgggaaatcgggcttgcacaaagccagaaagctctgaggagaggccctataatttgggcttcaggagaaaggtcaatcttaaagcacccacccacaactcagaaaggccgccccaaggctcctacatgaatgtccttgaggacgcactggactgtgcctctggtctcagggcaggtgtctcacaagagccagctgcctccaagatgcagggacctctaggaaacccagagaatatggtgcagctcaggcctggaccaagacaagcctcctctccccgcctgtccccagcttctcctgcagctgcagcctctgaaacaaagatagaggtgaagaccaaagagagaaatgggagacttcccaagcccatgccctgccctagcagaaacacctcctcccctgagccccccactcctgggctcaaattctcattcttgagagggcagaggcaaccctctgtgaccccggagaaagcctcactccagcacaatgggccctggaaagtcctgtgttccctctactctcctaaacccaaccgagccaaatctttggggaaagctggaacaactcagaccaaaacatctggcccagccactgcccccagcccactgactgaggaaaaggctgccttgccagaagcttctgcaggctccccagaaagaggccccaccctggaggaggagcccccagggcctgagcccaggattggggctctaggtgtcaaggttttccgctccaggatagcatgcctgccaggtggccgggacagggccgggcggcccctgcttctggtgtcaactacagagggggcctgggaggcaccatggtgcacagtttcagaggtcaccaagctactgtcctacctgtgtaccatccccaggcctgaagataaagccaaggggctggcggtcctgattgacgccaggagacagcccccacagcccggtctggtcagcgccctgcaggccacccaggctcaggtcccagcctctatccgggctattctcttcctgggggagaaggaggcggctctccagctgcagacattacctgacgtccaggtggaggtgctgacctcattgaaggccctcagccaccatgtggaccccagccagctgcccgcagtcctggaaggccccttcccctactgccacaccgagtgggttcatttcttccagaagctggaccctttccttgctgacctccaccaggcctcttccctgctacaagcttccatcgaggaattcgagaaggccgacccccctggggggatgcaggaggctaccaggtgcctgagcaagtccaaggagctgatggaggctgtgctgagggaccccggcctactgggcctccagcgggaaggtggagccaccctggccaggctgcagcatgatgccagcaggctggacttcagccctgatgtcaggagccatctggctgcagccactgccttgtacagccttgtggacgagcagcttcatgttctggtcaccgcttccaacagcctcctggggaagctggagctccgtgtccgcctgggccgcctggaagctgccattcaccaggtcagcgactggatggagcaggaaggaaggcggtgcctgcaatcactgacccccaaggatggaagtttggagacagtggagaaagcccacgcagaatttgagaacttcttcctccaggctgcagtgcgttccagacaacagaggagcaggactggagcagatggagagggcgttagagggggtggcactgccagggcaaagctgtggaggtgggaaagagcaagaaaagttccagagacagtgagggaaccagcttggattgcagagttcagctgagatgttatctcccccagagattcttaccagatggccaagcccaaagaatattctgaatcccccagagggtttcttaaaatgcagtttccagggccccatcctagacctaataactcagcctcacagagccgggggttggagggcagggaagctgcatcaacgtgatgcgatgtgacaaggctctggaccacagggtgattcagccccgtatcagcgctcaggaattctcaggccagtggggagcgggggcgggggcggggacaaacagggaagcgcacagtaagggagaatgtggggactcagagcaggagcctttggagtcagagaagttttccagaaggaacatctaagcagagcccggctaggcaaagtgaactgccatggcgagggcctggagacttccagaagcgtgataactgctcttaattgttcaaccctcaccaggagctaagccctgtgaggtgggtgctattagggtccccattctacagatgaggaaactgaagctcaggaagtctcctggctcgccagcaaggcagctggaggttgctgacctccgagggaggccccagccaaggtgggtgctgagtgggcgccccctcctctcccctctcaggcccagtaccgccgaggcctggagctgtccaagcaggccgctcagctgggagctacagccagaggggctggggaggcagaacgtgcagagttcccagagctggcagcctttgcctctacccagcgggccttccaggctgagctgacccacttttacatggcggccgagcggcaacgcacggacctcgagacgctgctccacctgcaccgcttctgcaagaggatgacctggttccacatggactgtcaggacctgatggcccagctcaggctggacaagacctcaagggtcagtcctggggaccagcgccgcctccaccgctacctgcagcgactggcatctgagttccctgctgagaagctcgcagccgtggggctgcaggtggcctccctgagccgggcaggcctgggccaggagctatgggaggaggcccggatcaggcatgaggagatccggatgctcctggagaaggcactgacccacagctcttgcccagaggctccagctgctcactcagcgcgcccagaacgaagaggggtggcagccaagggccagggtgtgagtgtagaggtcacttccaaggggaggtgggatcagcctccactagactcactgggcatggaccatttgccaaagtcctattggcctcctgggccccccagaggggaacagaacagaactttccaggcaggctctccaccccaggaagctggccaggctgcagaggctgaagacggcaaaggctcccacaagctgcctgaccctgcccgcgagcatttgcttgccaccaccttcttccggcagcagccccccaggcagagccaggtccctcgcctcactgggggcagcttctcctcagaggggacagactcacagacatcccttgaggactcaccccagacaagtccccttgcctccctctagctgagaggccccttcagtcgcaccagcctccaggagcactgggccagggcccagctggaggggtagctgggagctctggtcagtcccagtgagacgtcaccatggagcactggttttacattctgcctctgctgggaggatgagaactgtcgacctgcccctggctccagaaaactcctggaagacccgatcttcacccatgcagaatagcaagagtgggcgtcagaaccagggcacaataaatggtgtgattggctccatccctccaggctctcattgtggaaagacctgtcggcacagacccctccagaggtctcgctcgcaggcaggcagacacccacctgcagctcaggaacatacacagctctcccctcgggtacgagggccagtgttgcccttaggcagaatcctcggggagattcgggagtgcttccttgtcttggattccaggaaaatggaccctgagatgaggatttaaggatcagtgtgtttggtgctgatccaggaacctctgctgggggagtaggaggcgaatctgcaaagggaataaagagtatgttgtcaagnaaa

SEQ ID NO: 338345 - DNA, 2063 bp, Homo sapiens
gtcctccccggccgctcctccgagatgacgccggggtcggtgccccgggcctgccctatcccctggctccagggctaggcgggaccgagggctgccccagacagacggacccgcggacccacagaccccgcgcccaggagaggagccgcgccgcccgccgctggcagcccgtcaccatggaccctccatccctcgacacagccatccagcatgccctggcgggcctctatcctcctttcgaggccacagcacccaccgtcctgggtcaggtgttccgtctcctggactctggcttccagggggatgggctgagcttccttctggatttcctgatccctgccaagcgcctgtgtgagcaagtgcgagaagcagcctgtgctccctactcacactgcctcttcttacacgagggctggccactctgtctgagggatgaagttgtggtccacttggcacccctcaaccctctcttattgcgccagggtgacttctacctccaagtggagccccaggaggagcagtctgtctgcatcatgatcaaatgcctctccctggacctctgcacagtggacaagaagcctgttccagagccagcctaccctatacttttcacccaagaatggctggaggccatcaacagtgactttgagggaaatcccctacacaactgcttggtagcatcagaaaatgggattgcccctgtgccttggaccaagataaccagcccagagtttgtggatgacagaccccaagtagtgaatgccctctgccaagcctgggggccccttccattagaggcactggatttgagcagccctcaagagttgcaccaggccagctccccagacaaccaggtgcttcctgcccagagtttggccaagggtaagggcaggacatatgggagcaagtatccaggactcatcaaggtggagcaagcccggtgtggggaggtggctttcaggatggacgaggtggtcagccaggacttcgagggagactatgtggctctcctaggcttttcccaagagagcagaggagagtctcccagtagggaggcaggcacatccagtgggtgtacttctggggcactagaggagatagctggaactaaggaaactcccttatttcaaaagatactgcctctctcagaggccaatgaaggaccttccttgggaaatcgggcttgcacaaagccagaaagctctgaggagaggccctataatttgggcttcaggagaaaggtcaatcttaaagcacccacccacaactcagaaaggccgccccaaggctcctacatgaatgtccttgaggacgcactggactgtgcctctggtctcagggcaggtgtctcacaagagccagctgcctccaagatgcagggacctctaggaaacccagagaatatggtgcagctcaggcctggaccaagacaagcctcctctccccgcctgtccccagcttctcctgcagctgcagcctctgaaacaaagatagaggtgaagaccaaagagagaaatgggagacttcccaagcccatgccctgccctagcagaaacacctcctcccctgagccccccactcctgggctcaaattctcattcttgagagggcagaggcaaccctctgtgaccccggagaaagcctcactccagcacaatgggccctggaaagtcctgtgttccctctactctcctaaacccaaccgagccaaatctttggggaaagctggaacaactcagaccaaaacatctggcccagccactgcccccagcccactgactgaggaaaaggctgccttgccagaagcttctgcaggctccccagaaagaggccccaccctggaggaggagcccccagggcctgagcccaggattggggctctaggtgtcaaggttttccgctccaggatagcatgcctgccaggatcatctttcctctttggctctgggccattcccatcaggatgagaacacgctgcaatattgcccagcttgaaatgagctattctaggcccccgtgttcccaccctcacccttttacattaaaactccacaaagcagttg

SEQ ID NO: 338346 - DNA, 447 bp, Homo sapiens
tgtactacatcctgggtgagagaatgagactcaaaaaattaagtaacttcttacctaaatctaaatttgtcatattttacaaaatctagaaacaacctcagaataataacaactctattcccagaaagagcttcccaaccccacttttgtgccaatcccaactgcatctgcctgtggatttcgaggttttcagggctccgtggcttctctaagtataaatgctctgtccatggctattgtgagcaggccagaacatctgcaggggaggctcctcaggcagaactggctgctccttcaatgatctcactttacaggcaaagctgtccttagcttgcagtcactgagttcaggcttctacttaccagtcagggttactcacttagttttaaataagaaaatgaccaatgtaaggccaggtgcggtggttcaatgcctgtaatcccagca

SEQ ID NO: 338347 - DNA, 267 bp, Homo sapiens
tattcagatttggagattaggactcttgtttagaacctatatttcccctatatttaaatttaaagtggcttcctctaagaattcagagttccattgtatgcaattaaaaagatagctactgagcaattaaaaaaatacacagcacataagttctgccatagaaggagataacctaatgagagttaggaaacatggcacggtaagctggcctttcttgtttttacctctagaagtgactcagtctttttttttttttttttttttttt

SEQ ID NO: 338348 - DNA, 195 bp, Homo sapiens
acaggagacaatcttggtgaccttgggtttggtgatgaggtttttgatacaacacacccaaaaacacaatctatgaagtaaaacaattgatcagttggactttattaaaattcagaacttatgctccacaaaacacacttttttatttgtagatatgcatggggtagaaatgcaattttgctacattgatatact

SEQ ID NO: 338349 - DNA, 302 bp, Homo sapiens
ctctcccctttccctatgtttccccgctttctacttaactttttagacatgcacatagaactgtttactttccccccaccagacagtcccttcgggcgagttcatctaactatgtgctccacgagggatctctccttgagacttgacagttgatttgcagacaaaagtatgccctcatggaactctcacctccaggggttccccttagacctcacatccattaggaggggatgtggaaaggatgcccacgtggccacttttacaactgctgtcctgctcatttccttccctactttataaaa

SEQ ID NO: 338350 - DNA, 642 bp, Homo sapiens
aggtgacttagaggaccccggcactgctcggatggattggtgaatggatgaacagcggggtggatggatgggtaggtagaagggtggatggattgctggctgtgtggtttactggctaggtgggtgggtaaattggtatatggttaggtggaagggtggatgtatggataggtgggtggatgcttgggtgaataaatgaaatggcaactgaaaggacaggtggaaggatgtgtgggtaactagatgggagggtgaatagaataatgctgacataagcattaacaattatgtctagcctcttgcccctctcttcccaactgccttttccagtggaaaaattgaaaatcatggacccggggaacacattcccctgtggtctgttaatagaggcccagcaaggccagccgaggctgtcaactcacctccccactaggaccctgtcattagccacactcccccaaccctgcccttgggtggaagtatgatctggtgggcactgaggggctgggcccatccaggccccttattaagccttattaagcccacagacggggagcaaaaaggggagaagaactttctcccaaaggtcagctgttggaaaaagaaggtacagatgtctctggggtggtcgtctactctcag

SEQ ID NO: 338351 - DNA, 717 bp, Homo sapiens
agaaacaggaagacatacaatctaagaaatagag[206 bp omitted]caaagcaaatcaaaacaaacacaaaaacaaaaagccaaacaggaaaagaaagacctgtcagctttgtagactgacttatcttttctctccttgccgtctccacacaatataattatattactgttttcacattttctaccatttatctcagttttctctttttcagctacagagagtatcccttacattct[286 bp omitted]

SEQ ID NO: 338352 - DNA, 377 bp, Homo sapiens
gctggtgtgaggagtcaggaacttgaggcatgcaaagtacttgtaatggtttccagtacacaggaagtgcttaatagatgttaactaaatgagatgatgtgtacaaagcccagatgctcagcctgtgagctgcaatggtggtgctgggggtataggggacttgaagctacttgtgtcatgtcctcttgcattccccattggattcagaggttggggccagatcctggggtgcctcagatgccaggttaaaggtttggaccctaatccagtggccttggagaaggccagggatactttagcctgggggtggttgcagtgatccttacgtgataaaatgcttgttaaatctaccagctctgtgcttcctccctcggaga

SEQ ID NO: 338353 - DNA, 353 bp, Homo sapiens
agtgattcaaacccatgttgctcaagggccaactgtaatatgaggcaaggggctgactcacaatgaatgggacagggtcatcaggaaggcctcttgaagaaggcactgtttaaatgatgctcagtctccctggattttccttgttacccggtccctgtactcttttacactgtttccatcacctagaacaaatccgccagctaaaggttcaaagcaacatttccaaaatgcttccctggatcacgtaaaatgtatggaactgtcttttcccacctttcagagaaaagcatctcaatttccaaagtaacaaagtgagctcctctctcacatccggtttttaatttcctttcatc

SEQ ID NO: 338354 - DNA, 126 bp, Homo sapiens
tattaaagtcggaacaaggatcctaggaaaggaatttttttttttctagatctgtctgtagtccctccgaaagtggtatgaaacacaccaccaacaggtgcttttcatcttcaaagaacgtgtcat

SEQ ID NO: 338355 - DNA, 448 bp, Homo sapiens
tccttctcaggtgttggcacatggagcccacagagctaacagccaccccactcctgagtttggatctgcttcagtgtctgggaggtggaggtgaaagacacctgcttttattatggacagagctgattgggtggcgtggtcccatgagttttcaaggtcatcatccagactcgagcaggtttgccctttagttgagggcaggggggactactgcaggggacgccggtggccccagcacgttgcccaaagtgtgcctggtctgcggtctgcaggacagttctcagctctcacagaacatcacggccagctgggggccagggtctgcccttgactctgttccacttcgcccaaggtggggccgggactttggcacttagggaaccccagatggctgtgagggctgaggaccactggactaaatgggatggtgctgaaaagcagttatgca

SEQ ID NO: 338356 - DNA, 154 bp, Homo sapiens
ctcaatagataaaaagcatttgttaaaattcagcatcctttcatgataaaaaccttcagcaaactaggcacagaagaaacatacctcataataataaaataataaaagccatatatgaggccgagtgcggtgcctcatgcctgtaatctcagca

SEQ ID NO: 338357 - DNA, 522 bp, Homo sapiens
ctctggattgagtgtcgtcaggaagcaaaggtacgagtactatgacgtggaatcttaataatgttttgctagaaggcaggaaatctagagtagagatatacctataattggtaaagacagcttgtgactcatatcagccagcctaagggtatgtttggtccttttgaggtttagacatgttcttggtttagtttgtgctcagacatgattggggaatagacttgcttttgtcttgttccattgtggtcttacagcagtcttgtccaatgctgttattctgtgaaaacatgtatgttccacagaacaccaagtcctggcagtgactgacaggccagctcctggttttctctttcttacagtttagtgacattaaaaaacaaaatttcaacaaatttagtttaaagatgtggccaggcgcagtggttcatgcctgtaatcctagcacttgggaggtcacggcaggcagatcacttgagaacaggagtttgagaccagcctggccaacatagtgagacccgtctc

SEQ ID NO: 338358 - DNA, 129 bp, Homo sapiens
ttttgttcctctatatctcctttagtgtttcttttgattaatattttctagtataacattatatctccttcaattatttctttactatatttcccaagttactttcttttttttttttttttttttttt

SEQ ID NO: 338359 - DNA, 1035 bp, Homo sapiens
gtgctttgaaattgcaaaggcttattgtgcagatggcggtgaggaggagatctcggctaccccacatgaaagaccagcgcagtggaggatacctctctccacacccacacacacgctcctgctcagcctgcagttgctcattctctagagaatcctccccagggagttcacacctgcctttgcaagatgcttccatgcacggattgatggccccaggactcctggtaagatgatatgtggcaataactgtcacccagagccaccaaagcacttcacctgccctgccttgtagcctgccctgccttgtagcgcttctgccgggtgtcactgctatttgtatgttaattagactgggggttccccgagagtggcttgtatctccgtgacccctgtgtctctgccggggccctgcacagtatctgctacaccggagcagcaaaataaatggggctggttgaaggagtaagctaaggccagctaactgctctcaagcgcctttaattatggtctttggtgccctcttaccgcttcatcttatttatcactcttttcctgagaccttctaatatagaatgcagacacgaacatgtgtgcatgcacacacacgcacgctggcttaatatatgcacagtggaagctgaatacaacatctcgctgggacacttccacacttgttaagacagttcccaaaacacattaaaaaatgatggattgtgccgtcccggctccttgttcattttagcacgatagaatttcttgatagtgtctgatttcagagcacacctgtagacctagtgacagcctgcgctcctgggtgggtttggaaaagcgcttatttgttctgaagctaaaattaaactgcaagtttttacatgttgtttagcggcagcagctgatgcaaatctttgtcaacacggaacttttcacacctcaggtttcaactacagtaagtggattactatgtaagactggcattgggttttggcactgaaaatgaatgaagtagcttggagaaattaaaagtcatgctcttta

SEQ ID NO: 338360 - DNA, 303 bp, Homo sapiens
atttataagctactgtgagactaaaattcaaaaatggctgttctgtatttattagtttccacatagtttggggccagttgtcttctctttctgaacacttctcttgataacagtaacagatcacacaggaaatatgagagattgtttatgaatgccctgagacccaaaatgcttagacataaactaagattaatttattgcactaaagaagtaattacaagcagagtaattaagattcacaattgtcttgggatttacaacacagaatattccttaatagaacactctggatctataacaacc

SEQ ID NO: 338361 - DNA, 928 bp, Homo sapiens
gtacttatatgatagtgcaactgaacacttaggaatagaaagataatttgatagaatgataatagaactttatagagaccattctcacttcctacgtggaggcctttgtttccgagttgctgtctgtctaacgcttgctgacttgcgttgtgccattactgcaagtcatcctgccacgtgtcttccctccgtattccgtatgcctgcaagctgctcttccaggaactacagtctatgaacatcatccccaggttaaaactgtccaagtacaatgaatgaggatggaaaaaatgattattaaagagaacaagtgatacatccaatgcaacggaaagcagaagggatttaggactacgtctcctcctgtgaagaattcccttgcgtattctctctctaaaacaaccaaaaaaaaatggagaggctttttatatactctaagactggctaaacaaccttgatcattgagcctcgagccatgggagagatgctgaccatgtggactgcaaggctgcttgattcacagatggatgtgacctaaaggataaataagctattacttatgtgctgatctcttgacattcactcattagaagaccttactccttcaagcaaatgtttggggtcaaatttaccatatcttctggctaaccatattcaagattcttctgaaacttggaggatgtaaagaatccatttgatttggtcagcctggcttttgtcgtggtggctggctcggataaattttcccaacaattaaatcttgcctttacacacccaaactttgtaattttagtcttggtgaaatataatgaatttgttcctaccttgtcaagcaagaatgtcgtcttctcctatggactcaattgctattattttaaacctgcatgattgtaccatgcaatactattcgttaaatatctgaatctaa

SEQ ID NO: 338362 - DNA, 4154 bp, Homo sapiens
  misc_feature (1)..(1): n is a, c, g, or t
nttttttacaaaaaattatgtttgttacctgttctggaattcccgggatcagggaaggcgggcgcggaggttctatctgtttcttcctccttcgtgagcagcatggacgtgctagcggaggagtttgggaacctgactccggagcagctggcggcgccgatcccgactgtagaggaaaaatggaggctgcttccagcatttttaaaggtgaaaggccttgtgaaacagcatatagattcatttaactatttcattaatgtagagataaagaagataatgaaagccaatgaaaaggttacaagtgacgctgaccctatgtggtacttaaaatatcttaatatctatgttgggcttcctgatgttgaagaaagcttcaatgtaactagaccagtgtcccctcatgagtgccgtttgagagacatgacatactctgcccctattacagtggatattgaatatacccgaggcagccagaggatcatccgcaatgccttacctatcggcagaatgcccataatgctacgtagttcaaactgtgttcttacaggaaaaacgccagcagaatttgccaaactgaacgaatgtcccttagatccaggtggctacttcattgttaaaggagtagaaaaagttattcttatccaagagcagctgtctaagaacaggatcatcgtggaggctgatagaaaaggggctgttggagcttcagttaccagctctacccatgagaaaaaaagcagaaccaatatggctgtgaaacaaggacgattttatttgaggcataatactttgtcagaagatatacccattgtcatcatatttaaggccatgggtgttgagagtgaccaggaaattgtgcagatgattggaacagaggagcacgtgatggctgcatttgggcccagtctggaagagtgccagaaagctcagattttcacacagatgcaggcattaaaatatatagggaacaaagtaagaaggcaaaggatgtggggaggtggaccaaagaaaaccaaaatagaagaagcaagagagctcctggcttccaccattctgacccatgtcccagttaaggaattcaatttccgagccaaatgtatctatactgcagtgatggtgcgaagagttattctggcccaaggagataataaagttgacgacagagattattatggtaacaagcgactggaattggcaggacagcttttatctcttctttttgaagacttgttcaaaaaatttaattctgaaatgaaaaagattgccgaccaggtgattcctaagcaaagagcagcccagtttgatgttgtcaaacacatgcgccaagaccagatcaccaatggcatggtgaatgctatttctaccggaaattggtctttaaagagatttaaaatggaccgccagggtgtaacccaagtgctgtctcgcttgtcatatatatccgcactgggcatgatgacaagaatctcttcccagtttgaaaaaacgagaaaagtgagtggtcctcgctccctccagccatctcagtggggaatgctgtgtccttcggacactcctgaaggagaggcatgtggtttggttaaaaacttggcccttatgacacacatcacaactgatatggaagatggacccattgttaaattagccagtaacttgggagtagaagatgtgaatttattatgtggggaagagctctcttacccaaatgtgtttcttgtctttcttaatggtaacatcttaggtgtcattcgagaccacaaaaagctagtgaatacatttcgactcatgagaagagcaggatatatcaatgaatttgtttccatctcaacaaatcttacagatcgatgtgtctatatttcttctgatgggggaaggctatgcagaccctacataattgtcaagaaacagaagccagcagtcacaaataaacatatggaagagctggcccaagggtacagggaattttgaagatttcttacatgagagtctggttgaatatttagatgtgaatgaagaaaatgattgtaacattgcactgtacgaacacacaattaataaagacaccacccacttggagattgaacccttcactcttctcggcgtgtgtgctggacttatcccataccctcaccataaccagtcaccgagaaacacttatcagtgtgccatggggaaacaagccatgggtactataggatacaaccagcgaaacagaattgatactctcatgtatctactagcatatccacaaaaacccatggttaagacaaaaaccattgaattgatagaatttgagaaactgccagctggacagaatgcaacagttgctgtgatgagctatagtggctatgatattgaagatgctcttgttttaaacaaggcctctttagacagaggctttgggcgttgccttgtatataaaaatgctaaatgtacgttgaaacgatacaccaatcagacttttgataaagtgatggggcccatgttggatgctgctacaaggaaacctatctggcgacatgaaatcttagatgcagatggtatttgttctccaggtgagaaagtagaaaacaaacaagtgcttgtaaataagtccatgcccacagtgactcagattcctttggaaggaagtaatgtaccacagcaaccacagtacaaagatgtacccataacctacaaaggagcaacagactcatatattgaaaaagtgatgatatcttcaaatgctgaagatgcttttctgatcaaaatgctgctgagacagacaaggcgtccagaaattggagacaaattcagcagtcgtcatgggcaaaaaggtgtttgtggcttgatcgtcccccaggaagacatgccattttgtgattctggcatctgtccggacatcatcatgaacccacacggcttcccatcacgaatgacggtggggaagctcattgagctgctggctggcaaggccggtgtgctggacggcagattccactacggcactgcgtttggaggcagtaaagtgaaggatgtgtgtgaggacctcgttcgccatggttataactacttggggaaagactatgttacatccggcatcacaggtgagcccttagaagcatacatctattttggccccgtgtactatcagaagctgaaacacatggtgctagataaaatgcatgcccgggcccggggcccacgagccgtccttaccaggcaacccactgaaggacggtctcgtgatggtggcttgcgtctcggggaaatggaacgtgactgtttaatcggttatggagccagtatgcttttgctagagagactaatgatttcaagtgatgcctttgaggttgatgtctgtgggcagtgtggacttctggggtattctggctggtgccattactgcaagtcatcctgccacgtgtcttccctccgtattccgtatgcctgcaagctgctcttccaggaactacagtctatgaacatcatccccaggttaaaactgtccaagtacaatgaatgaggatggaaaaaatgattattaaagagaacaagtgatacatccaatgcaacggaaagcagaagggatttaggactacgtctcctcctgtgaagaattcccttgcgtattctctctctaaaacaaccaaaaaaaaatggagaggctttttatatactctaagactggctaaacaaccttgatcattgagcctcgagccatgggagagatgctgaccatgtggactgcaaggctgcttgattcacagatggatgtgacctaaaggataaataagctattacttatgtgctgatctcttgacattcactcattagaagaccttactccttcaagcaaatgtttggggtcaaatttaccatatcttctggctaaccatattcaagattcttctgaaacttggaggatgtaaagaatccatttgatttggtcagcctggcttttgtcgtggtggctggctcggataaattttcccaacaattaaatcttgcctttacacacccaaactttgtaattttagtcttggtgaaatataatgaatttgttcctaccttgtcaagcaagaatgtcgtcttctcctatggactcaattgctattattttaaacctgcatgattgtaccatgcaatactattcgttaaatatctgaatctaa

SEQ ID NO: 338363 - DNA, 3547 bp, Homo sapiens
tcttctgccaatttattttttattaattctatttgttggtgattttttaaaatctgttcagaaaattaaaaattttccgtggaatcataaaatcgtgtttagattataaaatcctttatgatttgactgttgccgtcttgaaagtcttcaacatctcaatgttatgaatatctgcacttacattttcttctaagtttttgttaacatttcaatatttaatccacaaaagattcacttacatgtattttttccccaaatgggtaatcagctcttcaaacattatttactggacaggccatccttcccctactaacgtaaatgtcatcttttcatattaaatttctccatgcgctgggtatttactcctacatcttccatctagtgcttttgagaattttcaacactcttccattacacgcatgtaccatcatttatttaatcaatcttctattggtaggcatttgggacgtttcctgctcttccatactaaacaatgcatagaattttggactacattaaataattctctgcctcagtggttcaagttgcgtaaattatgcgtttacacttttcttcggattacttttaaaatgacaaccactatgttttgctggtctcaattaccagagaattggcaagaaacctgacagctggggcttaggattccctgcgccagacctccgagctacaccagagggcgtactttccttactcggcctcggccacatccgggttccaccgcagattcgggcagggagcgggcggaacctttctaccgcgtctctagctaacacgcacggcggggacagtttaggcctccgcgcaccgttcgccgggagtcttgcagtttgcttggtgcagggaaggcgggcgcggaggttctatctgtttcttcctccttcgtgagcagcatggacgtgctagcggaggagtttgggaacctgactccggagcagctggcggcgccgatcccgactgtagaggaaaaatggaggctgcttccagcatttttaaaggtgaaaggccttgtgaaacagcatatagattcatttaactatttcattaatgtagagataaagaagataatgaaagccaatgaaaaggttacaagtgacgctgaccctatgtggtacttaaaatatcttaatatctatgttgggcttcctgatgttgaagaaagcttcaatgtaactagaccagtgtcccctcatgagtgccgtttgagagacatgacatactctgcccctattacagtggatattgaatatacccgaggcagccagaggatcatccgcaatgccttacctatcggcagaatgcccataatgctacgtagttcaaactgtgttcttacaggaaaaacgccagcagaatttgccaaactgaacgaatgtcccttagatccaggtggctacttcattgttaaaggagtagaaaaagttattcttatccaagagcagctgtctaagaacaggatcatcgtggaggctgatagaaaaggggctgttggagcttcagttaccagctctacccatgagaaaaaaagcagaaccaatatggctgtgaaacaaggacgattttatttgaggcataatactttgtcagaagatatacccattgtcatcatatttaaggccatgggtgttgagagtgaccaggaaattgtgcagatgattggaacagaggagcacgtgatggctgcatttgggcccagtctggaagagtgccagaaagctcagattttcacacagatgcaggcattaaaatatatagggaacaaagtaagaaggcaaaggatgtggggaggtggaccaaagaaaaccaaaatagaagaagcaagagagctcctggcttccaccattctgacccatgtcccagttaaggaattcaatttccgagccaaatgtatctatactgcagtgatggtgcgaagagttattctggcccaaggagataataaagttgacgacagagattattatggtaacaagcgactggaattggcaggacagcttttatctcttctttttgaagacttgttcaaaaaatttaattctgaaatgaaaaagattgccgaccaggtgattcctaagcaaagagcagcccagtttgatgttgtcaaacacatgcgccaagaccagatcaccaatggcatggtgaatgctatttctaccggaaattggtctttaaagagatttaaaatggaccgccagggtgtaacccaagtgctgtctcgcttgtcatatatatccgcactgggcatgatgacaagaatctcttcccagtttgaaaaaacgagaaaagtgagtggtcctcgctccctccagccatctcagtggggaatgctgtgtccttcggacactcctgaaggagaggcatgtggtttggttaaaaacttggcccttatgacacacatcacaactgatatggaagatggacccattgttaaattagccagtaacttgggagtagaagatgtgaatttattatgtggggaagagctctcttacccaaatgtgtttcttgtctttcttaatggtaacatcttaggtgtcattcgagaccacaaaaagctagtgaatacatttcgactcatgagaagagcaggatatatcaatgaatttgtttccatctcaacaaatcttacagatcgatgtgtctatatttcttctgatgggggaaggctatgcagaccctacataattgtcaagaaacagaagccagcagtcacaaataaacatatggaagagctggcccaagggtacagggtgccattactgcaagtcatcctgccacgtgtcttccctccgtattccgtatgcctgcaagctgctcttccaggaactacagtctatgaacatcatccccaggttaaaactgtccaagtacaatgaatgaggatggaaaaaatgattattaaagagaacaagtgatacatccaatgcaacggaaagcagaagggatttaggactacgtctcctcctgtgaagaattcccttgcgtattctctctctaaaacaaccaaaaaaaaatggagaggctttttatatactctaagactggctaaacaaccttgatcattgagcctcgagccatgggagagatgctgaccatgtggactgcaaggctgcttgattcacagatggatgtgacctaaaggataaataagctattacttatgtgctgatctcttgacattcactcattagaagaccttactccttcaagcaaatgtttggggtcaaatttaccatatcttctggctaaccatattcaagattcttctgaaacttggaggatgtaaagaatccatttgatttggtcagcctggcttttgtcgtggtggctggctcggataaattttcccaacaattaaatcttgcctttacacacccaaactttgtaattttagtcttggtgaaatataatgaatttgttcctaccttgtcaagcaagaatgtcgtcttctcctatggactcaattgctattattttaaacctgcatgattgtaccatgcaatactattcgttaaatatctgaatctaa

SEQ ID NO: 338364 - DNA, 421 bp, Homo sapiens
ccatatataaaattggccttgtatatatgctctacactggatcaaagtaattcaaggtagagtcaaagtgaagttggtcagaaagtaattgtcactcattcacacacagaacttccatcataatctcaaagtcaaagaaaaatttatagtgtttttaaatgttcactgaagtggcagcagggcaggaaaggaattgtctttttaaagtacttattagaaaggaccttgtgattgttgttgatcagttgacccttattgattaatgatcattgctattattgcatgttactagcttgaaactaagtggggatgcagtttaaccaacttgtatttactcatagctctacccatgagaaaaaaagcagaaccaatatggctgtgaaacaaggacgattttatttgaggcataatactttgtcag

SEQ ID NO: 338365 - DNA, 357 bp, Homo sapiens
ccaatatggctgtgaaacaaggacgattttatttgaggcataatactttgtcagaagatatacccattgtcatcatatttaaggtaaagctgcagctctcttctgaaaattgtaagaattctttctctggtttatttacatatgtaattagagatttggagggtaaggaattcttggaatagaaagatttgtgatgtaagttgtcagtcatatgatgtattttaaattgaaagctggctgggcgtggtgggtcatgcctgaaatcccaacactttgggaggccaagatgggcagatcgcctgagcccaggagtttgagaccagcttgtgcaacatggtgaaaccccatctctaccaa

SEQ ID NO: 338366 - DNA, 560 bp, Homo sapiens
agctctggcagcagctactggaggatccaggtttcccccacagtctattctgcttagtttttctgcttttaaataatagaatactgagactctttgaaaatacttaaagacattgtttcctgatttgaaaactctgctgtcctaataataatgatagtgatggtaatagtaatggtgttttctgtgattatatattaatatgttattacatcatatgatattatgcaattatatattcatttaaccataacaaccatcaatattacatcttttctcaattgaggctctttgggataggtgtgcttatgcacttttacaaatgaggctaagcagcgtgtccaaggtccctgtccagttattgatttggatccagatgagccctgctccaaagcctcgtgctctctgccagcatgtgatgctacctctttgtttgtttaacagaataataacacatttgtctaataacttgtttcaaaggcaacccactgaaggacggtctcgtgatggtggcttgcgtctcggggaaatggaacgtgactgtttaatcggttatggagcca

SEQ ID NO: 338367 - DNA, 537 bp, Homo sapiens
ctctaaaacaaccaaaaaaaaatggagaggctttttatatactctaagactggctaaacaaccttgatcattgagcctcgagccatgggagagatgctgaccatgtggactgcaaggctgcttgattcacagatggatgtgacctaaaggataaataagctattacttatgtgctgatctcttgacattcactcattagaagaccttactccttcaagcaaatgtttggggtcaaatttaccatatcttctggctaaccatattcaagattcttctgaaacttggaggatgtaaagaatccatttgatttggtcagcctggcttttgtcgtggtggctggctcggataaattttcccaacaattaaatcttgcctttacacacccaaactttgtaattttagtcttggtgaaatataatgaatttgttcctaccttgtcaagcaagaatgtcgtcttctcctatggactcaattgctattattttaaacctgcatgattgtaccatgcaatactattcgttaaatatctgaatctaa

SEQ ID NO: 338368 - DNA, 950 bp, Homo sapiens
ttcctcttttcttttgcttccttggatgtttctttttttctgggcacatacgtacttatatgatagtgcaactgaacacttaggaatagaaagataatttgatagaatgataatagaactttatagagaccattctcacttcctacgtggaggcctttgtttccgagttgctgtctgtctaacgcttgctgacttgcgttgtgccattactgcaagtcatcctgccacgtgtcttccctccgtattccgtatgcctgcaagctgctcttccaggaactacagtctatgaacatcatccccaggttaaaactgtccaagtacaatgaatgaggatggaaaaaatgattattaaagagaacaagtgatacatccaatgcaacggaaagcagaagggatttaggactacgtctcctcctgtgaagaattcccttgcgtattctctctctaaaacaaccaaaaaaaaatggagaggctttttatatactctaagactggctaaacaaccttgatcattgagcctcgagccatgggagagatgctgaccatgtggactgcaaggctgcttgattcacagatggatgtgacctaaaggataaataagctattacttatgtgctgatctcttgacattcactcattagaagaccttactccttcaagcaaatgtttggggtcaaatttaccatatcttctggctaaccatattcaagattcttctgaaacttggaggatgtaaagaatccatttgatttggtcagcctggcttttgtcgtggtggctggctcggataaattttcccaacaattaaatcttgcctttacacacccaaactttgtaattttagtcttggtgaaatataatgaatttgttcctaccttgtcaagcaagaatgtcgtcttctcctatggactcaattgctattattttaaacctgcatgattgtaccatgc

SEQ ID NO: 338369 - DNA, 4963 bp, Homo sapiens
tcttctgccaatttattttttattaattctatttgttggtgattttttaaaatctgttcagaaaattaaaaattttccgtggaatcataaaatcgtgtttagattataaaatcctttatgatttgactgttgccgtcttgaaagtcttcaacatctcaatgttatgaatatctgcacttacattttcttctaagtttttgttaacatttcaatatttaatccacaaaagattcacttacatgtattttttccccaaatgggtaatcagctcttcaaacattatttactggacaggccatccttcccctactaacgtaaatgtcatcttttcatattaaatttctccatgcgctgggtatttactcctacatcttccatctagtgcttttgagaattttcaacactcttccattacacgcatgtaccatcatttatttaatcaatcttctattggtaggcatttgggacgtttcctgctcttccatactaaacaatgcatagaattttggactacattaaataattctctgcctcagtggttcaagttgcgtaaattatgcgtttacacttttcttcggattacttttaaaatgacaaccactatgttttgctggtctcaattaccagagaattggcaagaaacctgacagctggggcttaggattccctgcgccagacctccgagctacaccagagggcgtactttccttactcggcctcggccacatccgggttccaccgcagattcgggcagggagcgggcggaacctttctaccgcgtctctagctaacacgcacggcggggacagtttaggcctccgcgcaccgttcgccgggagtcttgcagtttgcttggtgcagggaaggcgggcgcggaggttctatctgtttcttcctccttcgtgagcagcatggacgtgctagcggaggagtttgggaacctgactccggagcagctggcggcgccgatcccgactgtagaggaaaaatggaggctgcttccagcatttttaaaggtgaaaggccttgtgaaacagcatatagattcatttaactatttcattaatgtagagataaagaagataatgaaagccaatgaaaaggttacaagtgacgctgaccctatgtggtacttaaaatatcttaatatctatgttgggcttcctgatgttgaagaaagcttcaatgtaactagaccagtgtcccctcatgagtgccgtttgagagacatgacatactctgcccctattacagtggatattgaatatacccgaggcagccagaggatcatccgcaatgccttacctatcggcagaatgcccataatgctacgtagttcaaactgtgttcttacaggaaaaacgccagcagaatttgccaaactgaacgaatgtcccttagatccaggtggctacttcattgttaaaggagtagaaaaagttattcttatccaagagcagctgtctaagaacaggatcatcgtggaggctgatagaaaaggggctgttggagcttcagttaccagctctacccatgagaaaaaaagcagaaccaatatggctgtgaaacaaggacgattttatttgaggcataatactttgtcagaagatatacccattgtcatcatatttaaggccatgggtgttgagagtgaccaggaaattgtgcagatgattggaacagaggagcacgtgatggctgcatttgggcccagtctggaagagtgccagaaagctcagattttcacacagatgcaggcattaaaatatatagggaacaaagtaagaaggcaaaggatgtggggaggtggaccaaagaaaaccaaaatagaagaagcaagagagctcctggcttccaccattctgacccatgtcccagttaaggaattcaatttccgagccaaatgtatctatactgcagtgatggtgcgaagagttattctggcccaaggagataataaagttgacgacagagattattatggtaacaagcgactggaattggcaggacagcttttatctcttctttttgaagacttgttcaaaaaatttaattctgaaatgaaaaagattgccgaccaggtgattcctaagcaaagagcagcccagtttgatgttgtcaaacacatgcgccaagaccagatcaccaatggcatggtgaatgctatttctaccggaaattggtctttaaagagatttaaaatggaccgccagggtgtaacccaagtgctgtctcgcttgtcatatatatccgcactgggcatgatgacaagaatctcttcccagtttgaaaaaacgagaaaagtgagtggtcctcgctccctccagccatctcagtggggaatgctgtgtccttcggacactcctgaaggagaggcatgtggtttggttaaaaacttggcccttatgacacacatcacaactgatatggaagatggacccattgttaaattagccagtaacttgggagtagaagatgtgaatttattatgtggggaagagctctcttacccaaatgtgtttcttgtctttcttaatggtaacatcttaggtgtcattcgagaccacaaaaagctagtgaatacatttcgactcatgagaagagcaggatatatcaatgaatttgtttccatctcaacaaatcttacagatcgatgtgtctatatttcttctgatgggggaaggctatgcagaccctacataattgtcaagaaacagaagccagcagtcacaaataaacatatggaagagctggcccaagggtacagggaattttgaagatttcttacatgagagtctggttgaatatttagatgtgaatgaagaaaatgattgtaacattgcactgtacgaacacacaattaataaagacaccacccacttggagattgaacccttcactcttctcggcgtgtgtgctggacttatcccataccctcaccataaccagtcaccgagaaacacttatcagtgtgccatggggaaacaagccatgggtactataggatacaaccagcgaaacagaattgatactctcatgtatctactagcatatccacaaaaacccatggttaagacaaaaaccattgaattgatagaatttgagaaactgccagctggacagaatgcaacagttgctgtgatgagctatagtggctatgatattgaagatgctcttgttttaaacaaggcctctttagacagaggctttgggcgttgccttgtatataaaaatgctaaatgtacgttgaaacgatacaccaatcagacttttgataaagtgatggggcccatgttggatgctgctacaaggaaacctatctggcgacatgaaatcttagatgcagatggtatttgttctccaggtgagaaagtagaaaacaaacaagtgcttgtaaataagtccatgcccacagtgactcagattcctttggaaggaagtaatgtaccacagcaaccacagtacaaagatgtacccataacctacaaaggagcaacagactcatatattgaaaaagtgatgatatcttcaaatgctgaagatgcttttctgatcaaaatgctgctgagacagacaaggcgtccagaaattggagacaaattcagcagtcgtcatgggcaaaaaggtgtttgtggcttgatcgtcccccaggaagacatgccattttgtgattctggcatctgtccggacatcatcatgaacccacacggcttcccatcacgaatgacggtggggaagctcattgagctgctggctggcaaggccggtgtgctggacggcagattccactacggcactgcgtttggaggcagtaaagtgaaggatgtgtgtgaggacctcgttcgccatggttataactacttggggaaagactatgttacatccggcatcacaggtgagcccttagaagcatacatctattttggccccgtgtactatcagaagctgaaacacatggtgctagataaaatgcatgcccgggcccggggcccacgagccgtccttaccaggcaacccactgaaggacggtctcgtgatggtggcttgcgtctcggggaaatggaacgtgactgtttaatcggttatggagccagtatgcttttgctagagagactaatgatttcaagtgatgcctttgaggttgatgtctgtgggcagtgtggacttctggggtattctggctggtgccattactgcaagtcatcctgccacgtgtcttccctccgtattccgtatgcctgcaagctgctcttccaggaactacagtctatgaacatcatccccaggttaaaactgtccaagtacaatgaatgaggatggaaaaaatgattattaaagagaacaagtgatacatccaatgcaacggaaagcagaagggatttaggactacgtctcctcctgtgaagaattcccttgcgtattctctctctaaaacaaccaaaaaaaaatggagaggctttttatatactctaagactggctaaacaaccttgatcattgagcctcgagccatgggagagatgctgaccatgtggactgcaaggctgcttgattcacagatggatgtgacctaaaggataaataagctattacttatgtgctgatctcttgacattcactcattagaagaccttactccttcaagcaaatgtttggggtcaaatttaccatatcttctggctaaccatattcaagattcttctgaaacttggaggatgtaaagaatccatttgatttggtcagcctggcttttgtcgtggtggctggctcggataaattttcccaacaattaaatcttgcctttacacacccaaactttgtaattttagtcttggtgaaatataatgaatttgttcctaccttgtcaagcaagaatgtcgtcttctcctatggactcaattgctattattttaaacctgcatgattgtaccatgcaatactattcgttaaatatctgaatctaa

SEQ ID NO: 338370 - DNA, 4840 bp, Homo sapiens
  misc_feature (4829)..(4829): n is a, c, g, or t
tcttctgccaatttattttttattaattctatttgttggtgattttttaaaatctgttcagaaaattaaaaattttccgtggaatcataaaatcgtgtttagattataaaatcctttatgatttgactgttgccgtcttgaaagtcttcaacatctcaatgttatgaatatctgcacttacattttcttctaagtttttgttaacatttcaatatttaatccacaaaagattcacttacatgtattttttccccaaatgggtaatcagctcttcaaacattatttactggacaggccatccttcccctactaacgtaaatgtcatcttttcatattaaatttctccatgcgctgggtatttactcctacatcttccatctagtgcttttgagaattttcaacactcttccattacacgcatgtaccatcatttatttaatcaatcttctattggtaggcatttgggacgtttcctgctcttccatactaaacaatgcatagaattttggactacattaaataattctctgcctcagtggttcaagttgcgtaaattatgcgtttacacttttcttcggattacttttaaaatgacaaccactatgttttgctggtctcaattaccagagaattggcaagaaacctgacagctggggcttaggattccctgcgccagacctccgagctacaccagagggcgtactttccttactcggcctcggccacatccgggttccaccgcagattcgggcagggagcgggcggaacctttctaccgcgtctctagctaacacgcacggcggggacagtttaggcctccgcgcaccgttcgccgggagtcttgcagtttgcttggtgcagggaaggcgggcgcggaggttctatctgtttcttcctccttcgtgagcagcatggacgtgctagcggaggagtttgggaacctgactccggagcagctggcggcgccgatcccgactgtagaggaaaaatggaggctgcttccagcatttttaaaggtgaaaggccttgtgaaacagcatatagattcatttaactatttcattaatgtagagataaagaagataatgaaagccaatgaaaaggttacaagtgacgctgaccctatgtggtacttaaaatatcttaatatctatgttgggcttcctgatgttgaagaaagcttcaatgtaactagaccagtgtcccctcatgagtgccgtttgagagacatgacatactctgcccctattacagtggatattgaatatacccgaggcagccagaggatcatccgcaatgccttacctatcggcagaatgcccataatgctacgtagttcaaactgtgttcttacaggaaaaacgccagcagaatttgccaaactgaacgaatgtcccttagatccaggtggctacttcattgttaaaggagtagaaaaagttattcttatccaagagcagctgtctaagaacaggatcatcgtggaggctgatagaaaaggggctgttggagcttcagttaccagctctacccatgagaaaaaaagcagaaccaatatggctgtgaaacaaggacgattttatttgaggcataatactttgtcagaagatatacccattgtcatcatatttaaggccatgggtgttgagagtgaccaggaaattgtgcagatgattggaacagaggagcacgtgatggctgcatttgggcccagtctggaagagtgccagaaagctcagattttcacacagatgcaggcattaaaatatatagggaacaaagtaagaaggcaaaggatgtggggaggtggaccaaagaaaaccaaaatagaagaagcaagagagctcctggcttccaccattctgacccatgtcccagttaaggaattcaatttccgagccaaatgtatctatactgcagtgatggtgcgaagagttattctggcccaaggagataataaagttgacgacagagattattatggtaacaagcgactggaattggcaggacagcttttatctcttctttttgaagacttgttcaaaaaatttaattctgaaatgaaaaagattgccgaccaggtgattcctaagcaaagagcagcccagtttgatgttgtcaaacacatgcgccaagaccagatcaccaatggcatggtgaatgctatttctaccggaaattggtctttaaagagatttaaaatggaccgccagggtgtaacccaagtgctgtctcgcttgtcatatatatccgcactgggcatgatgacaagaatctcttcccagtttgaaaaaacgagaaaagtgagtggtcctcgctccctccagccatctcagtggggaatgctgtgtccttcggacactcctgaaggagaggcatgtggtttggttaaaaacttggcccttatgacacacatcacaactgatatggaagatggacccattgttaaattagccagtaacttgggagtagaagatgtgaatttattatgtggggaagagctctcttacccaaatgtgtttcttgtctttcttaatggtaacatcttaggtgtcattcgagaccacaaaaagctagtgaatacatttcgactcatgagaagagcaggatatatcaatgaatttgtttccatctcaacaaatcttacagatcgatgtgtctatatttcttctgatgggggaaggctatgcagaccctacataattgtcaagaaacagaagccagcagtcacaaataaacatatggaagagctggcccaagggtacagggaattttgaagatttcttacatgagagtctggttgaatatttagatgtgaatgaagaaaatgattgtaacattgcactgtacgaacacacaattaataaagacaccacccacttggagattgaacccttcactcttctcggcgtgtgtgctggacttatcccataccctcaccataaccagtcaccgagaaacacttatcagtgtgccatggggaaacaagccatgggtactataggatacaaccagcgaaacagaattgatactctcatgtatctactagcatatccacaaaaacccatggttaagacaaaaaccattgaattgatagaatttgagaaactgccagctggacagaatgcaacagttgctgtgatgagctatagtggctatgatattgaagatgctcttgttttaaacaaggcctctttagacagaggctttgggcgttgccttgtatataaaaatgctaaatgtacgttgaaacgatacaccaatcagacttttgataaagtgatggggcccatgttggatgctgctacaaggaaacctatctggcgacatgaaatcttagatgcagatggtatttgttctccaggtgagaaagtagaaaacaaacaagtgcttgtaaataagtccatgcccacagtgactcagattcctttggaaggaagtaatgtaccacagcaaccacagtacaaagatgtacccataacctacaaaggagcaacagactcatatattgaaaaagtgatgatatcttcaaatgctgaagatgcttttctgatcaaaatgctgctgagacagacaaggcgtccagaaattggagacaaattcagcagtcgtcatgggcaaaaaggtgtttgtggcttgatcgtcccccaggaagacatgccattttgtgattctggcatctgtccggacatcatcatgaacccacacggcttcccatcacgaatgacggtggggaagctcattgagctgctggctggcaaggccggtgtgctggacggcagattccactacggcactgcgtttggaggcagtaaagtgaaggatgtgtgtgaggacctcgttcgccatggttataactacttggggaaagactatgttacatccggcatcacaggtgagcccttagaagcatacatctattttggccccgtgtactatcagaagctgaaacacatggtgctagataaaatgcatgcccgggcccggggcccacgagccgtccttaccaggcaacccactgaaggacggtctcgtgatggtggcttgcgtctcggggaaatggaacgtgactgtttaatcggttatggagccagtatgcttttgctagagagactaatgatttcaagtgatgcctttgaggttgatgtctgtgggcagtgtggacttctggggtattctggctggtgccattactgcaagtcatcctgccacgtgtcttccctccgtattccgtatgcctgcaagctgctcttccaggaactacagtctatgaacatcatccccaggttaaaactgtccaagtacaatgaatgaggatggaaaaaatgattattaaagagaacaagtgatacatccaatgcaacggaaagcagaagggatttaggactacgtctcctcctgtgaagaattcccttgcgtattctctctctaaaacaaccaaaaaaaaatggagaggctttttatatactctaagactggctaaacaaccttgatcattgagcctcgagccatgggagagatgctgaccatgtggactgcaaggctgcttgattcacagatggatgtgacctaaaggataaataagctattacttatgtgctgatctcttgacattcactcattagaagaccttactccttcaagcaaatgtttggggtcaaatttaccatatcttctggctaaccatattcaagattcttctgaaacttggaggatgtaaagaatccatttgatttggtcagcctggcttttgtcgtggtggctggctcggataaattttcccaacaattaaatcttgcctttacacatagttcagcgtctgacgggtnccgagctcgaa

SEQ ID NO: 338371 - DNA, 409 bp, Homo sapiens
  misc_feature (395)..(395): n is a, c, g, or t
accctatctaaaacaaactggcatttgggaacaacatattcttggcaatggaacctggacagcattgatcaaacatggtagggaaagttctcattctgcattataaaaaggactgccagatatcaactgttagagatacgaaataagatggaacatttttaactggtttattttcttaaagagacttcctgccctgccagagatcttgaatagccccctagtcagtcatccagaagccattcacataattgattttcttggcttccactctgaaaagagaaccaccttttgcgatactccgccgcgcggggagtatcgcgatactccgggtatggctcagcgctagcgctgagcaatattccatctcaaaaaatactatttataataataatttnagttaagcgatact

SEQ ID NO: 338372 - DNA, 552 bp, Homo sapiens
gatgaatattctggaattaacggtgatggttgcacaactttgtgactatactaaaaacactaaattgtatagtttcagagagaaattttatagtgtgtaaactacatctcaattaaaaaaaaaaaaagtaaaaagaaaacgctgcataagcctcccgtggggttaaaataagagtaagagaaaaaaacatgacttcattgtgtgggtgcctgtgttgaagatgatttagtagcttctgccgtgaggcatttgctagaataaaatcctttctgccctcatcattgtcagcacactggttcgggcctttagcactcctacctggatcgtggaactaaagaattttagcagctgacaaggaccttaaagattgtagcctaactctctcgcttgtcaggggaggcagctggtgccaggcagaagaagtggcatgtttggagtggcctgcctggtgtctgagccacacctgacacccagtgttctttccactgggcctttattgcaattgttttcctctctctttagtctcttcctgctccagtaggattgtacatt

SEQ ID NO: 338373 - DNA, 356 bp, Homo sapiens
gctgggttggtgtccttgactggtgaattgggactgatgagttgggacatgagcagtcactgtcatgtggcaatgattttacgtcagcagcccggcatatctggtagcagcaggagggaaaaataaaatacctcctctgattgaaactgttagagaattcatggaagaggagcacaagtgcccaaattgggaggagacagggattgtcaattgaaatccctgctcttgtggggagaaaaatctttctgatgagtgcgaggaactggggccttgtttcactcttttatagctcatcttagaaatgataccctttcttgcctataaaaaaaactgtttgaggcttaattcagaatgac

SEQ ID NO: 338374 - DNA, 125 bp, Homo sapiens
catgagaaaaaggctgattcctaggtattttgtctttctaggttttgctattgcttttattttaagtttaaccaactgggtgatttcataataccatctattgatgtaagacataaaggaacaaa

SEQ ID NO: 338375 - DNA, 373 bp, Homo sapiens
cagttcagtcctgccctcaaggagttcacacaactataaaaagaaaggtgccaaatgtcacaagacagaaaaatgacaaattactatggaaatgagttatgaagagggagaaattactacctgcaccaggcatgaagccttgtggaaaagagggtgttaggagtgggccttggaaaatgggtagtacaagacatgtagaaactgtgggtagtaaaaccatgtgatcaaaggaccagaggccaccattgaagcactggtgggttggataggtaggaggccagtgaggcttttgagtaaaattgtgatatgattagagctgattcaaccccttgataagtacaaaagttgtagtctataattagcatttaagctg

SEQ ID NO: 338376 - DNA, 304 bp, Homo sapiens
tgcagtggtgcgatctcggctcactgcaagctctgcctgccgggttcacgccattctcctgcctcagcctcccgagtagctgggactacaaggcacccgccaccacgcccagctaattttttgtatttttagtagagatggggtttcactgtgttagccaagatggtctccatctcctgacctcgtgatctgcccgcctcggcttcccaaagtgctgggattacaggtgtgagccactgtgcctggccgcatttaaacattttttaaattgacacataatgtacatatttatgggggcagtgtg

SEQ ID NO: 338377 - DNA, 347 bp, Homo sapiens
ggtctgtagtgatattctccatttcatttctgatactgggaatttacgtactcttttttatggttagcctaagtagagggttgtcaatttcattcatcttttcaaagaacgagattttcctcttgattttatctactgtttttctgttttcaatatcactgatttctgttcatatctttgtttttttccttctgcttgctttgggtttattttgctttattttttctaggttcctgagatgagagcctagattattgacctgagacttttcctcttttctaacataaacatttattactttaaattttcctggctgggcacagtggttcatgcctataatcctagca

SEQ ID NO: 338378 - DNA, 359 bp, Homo sapiens
tgacgtactgaacacagtgcctcagaatgtgatcttatctagagataaggttttcaaagaggtaatcaagttaaaagtaaggccattaaggtgggtcctaacccagtatgactggtgtttttataagaagaggagacaaagaggtagacagacacagaggggagtgaccatgtgacgaacgaggcagagattggagggatgcttctacaagtcaaggagcaccaaggactgccggcaagcagacactgaaggggcctgaacagagtcttccccagggggaagaacccaccatgctgtgatctcagacttctggcctccagagccccgagagaataactgtgtgttgtgcaagccactca

SEQ ID NO: 338379 - DNA, 629 bp, Homo sapiens
ctgttgtgatggagaacatcataaagctcctccaccaacatggaatccatagagaatattcttacctagatacaaaaagttcagtattctatcatgactttaatataagggaaaaataaaaggaaggtgatttacaataaaagaatgcacacttgaaatgttcgggcatgactacacaagaagatataatgacacagccaaatgtttgcacctatgtgtaataaatcaacttgaatttaggagaagtaagatgattcagaaatgcatttctttttttccagtgtctcttctacagaatattttctgaatcataatcattgcagattaaaaatcccacaaaaaatgttcatacaaggagtcaggctcttggctcagaaaattctgaagaagtttctcgcctccatgaatgcttaaagagtcaaatacaaaatgagataatcctttgttgggggaactgttcacgtttcagaacttttggcatcctttgctccacctgcagagagccaacaaaatccttcactaattttaggaaccaaaaaacaaatttccccacttctcagtacagccttcgatactggtctgtcatttctgcctgaccttgtttcttctcccaacacatctatccattt

SEQ ID NO: 338380 - DNA, 629 bp, Homo sapiens
gaaggctggatggcatctgcatttgagggccagagctacgtcttccacactggctacaacttcccacagtgcccagcatcatgcaggacatacagtgcctcctctttacatctctgttaggtgattagtgaacagattaaccccagaggatatatggcattgagatgactttggagaggaagtgagctttgagttgggcctaaaggatagagagcgtctggcatgaggagcaaaagtgaaaggataatccttcattgagaagcatgatgagaacattctagtgacagaaataggacacctccccacctggagtcaagaacatggttgggaaaaggaaaaaatatataatctatatggtgggtccatggaggatctaggatttatccacttaagctggatttgatctgatagacactaggaagctggggaaagctgggagcagggaagtgatgtacatgttaagtggggtgagaatattttagtgactctgtttctttacacagctcatttaaatccctgaatatgtgctaagtatttttgtccatttttctcatagaaaagttttaacttcttaaattttaagaaatgtgaattatcttttgccctccgtaggtgtgagtagccatttt

SEQ ID NO: 338381 - DNA, 322 bp, Homo sapiens
ggtcgactactactactaaattcgcggccgcgtcgacgaaaacacacctgccccaggtgctcatatgctagtggggagagcagatattacatgagatgcctgtagaagatgcatcatacagcagaagcaaaagtgctgtggagcaaagcaaagcaagggcggggtggggcagggacaggatccctgcaaaggtgacctctgaggttagggagggggcgtgcagggaagagcgcctcgggcagggtggggggcagtgcagcaagcaggcaggtgtggcatgagtgtgcgtggggaggtcagagaggaagcaggatgggaagga

SEQ ID NO: 338382 - DNA, 697 bp, Homo sapiens
aaccaattgaaaaactagatatgaaagtagacaagaagttaaggaagactgatttgtttagtttgggtaacaaggatgggtggaaatgtgattgagttatggaatacaggaagaagatcgggttgtagtgggaggagagatcaacagttcagctacagacaaggagagtttcatgtgactctagggagatgttgggtatttgtagatcagatagatttgggtatttgtagagcaggagaagagtggggtttacagttagacttggaaatcttgagtgtttaggtgatagttgacacttcagagtggacgagaacaccaggaagacaagtagaggaagaagaaaggaaggccaaaaatagagctctgaggaacactgacgtgaaagaaacagatgaggtggcacaagtagaggaaactgagaaatagccattagaggtagggaaagaaccagaagagtgttgtttcagtatgcaagggaagaatggacttcaggaagctaaggttcaagggatgcagccatattgagtgagatgaagactgggaagaaaagtttccgaattgggcggcagctatacagcatgggtgtctttagtgagagcaatttcagaaaagtagcaagacagaaaaattgcagagttgaaaaaatgaatgataaatgaacatatggatagtgtgtgaggccagttctttcataatt

SEQ ID NO: 338383 - DNA, 698 bp, Homo sapiens
tttttgacccttaaagcttttagcattttgattgtaagaatatagcatattttaggtgcatttatcttattttctttactgtgtagttgataacatttttatacggatttctttaaacctcataggtagttctcactggaattggtgcagatgagcaacttgcaggttattctcgtcatcgtgtccgctttcagtcgcatgggctggaaggattgaataaggaaataatgatggaactgggtcgaatttcttctagaaatcttggtcgtgatgacagagttattggtgatcatggaaaagaagcaagatttcctttcctggatgaaaatgttgtctcctttctaaattctctgccgatttgggaaaaagcaaacttgactttaccccgaggaattggtgaaaaattacttttacgccttgcagctgtggaacttggtcttacagcctctgctcttctgcccaaacgggccatgcagtttggatcaagaattgcaaaaatggaaaaaattaatgaaaaggcatctgataaatgtggacggctccaaatcatgtccttagaaaatctttctattgaaaaggagactaaattgtaatgtgattcacaatgtaacaatataaaaataagtttttatataattatataaaagtaagatactctgctgctttactattgtataatatagtagttttaaagttca

SEQ ID NO: 338384 - DNA, 615 bp, Homo sapiens
gttttcaaggcctccacaaagataccttgtaaaacaatttgaaattatttctggacacaataaacctaatttatttattgagatttagactattttgtagtatatgtattaaaattagtcatgttgtgaaacaatttggttaaattttagctataaaactgtgtataaatcaaagcaggttgattttatttttacatagtggttatattatctgtctattttagatttcctttcctggatgaaaatgttgtctcctttctaaattctctgccgatttgggaaaaagcaaacttgactttaccccgaggaattggtgaaaaattacttttacgccttgcagctgtggaacttggtcttacagcctctgctcttctgcccaaacgggccatgcagtttggatcaagaattgcaaaaatggaaaaaattaatgaaaaggcatctgataaatgtggacggctccaaatcatgtccttagaaaatctttctattgaaaaggagactaaattgtaatgtgattcacaatgtaacaatataaaaataagtttttatataattatataaaagtaagatactctgctgctttactattgtataatatagtagttttaaagttca

SEQ ID NO: 338385 - DNA, 700 bp, Homo sapiens
aaaagaaagggtgagcgcggctggaagcgcgcatgcgctgtggctaatgccgtaggctctttcagggctgagccatcctgcgtgtcttgcgctcggtggaaatgcccagccgagggacgcgaccagaggacagctctgtgctgatccccaccgacaattcgaccccacacaaggaggatctaagcagcaagattaaagaacaaaaaattgtggtggatgaactttctaaccttaagaagaataggaaagtatataggcaacaacagaacagcaatatattctttcttgcagaccgaacagaaatgctgtctgagagcaagagtaagttttttcttttttggggtttttggggggtgcctaaattatactcatctgagtgttaaaatatatatctaaagattaatgcagcagtttgattttcttcaaattaggcttccgaagatgagtcaacagttatatatatatgtatatatatatatatatatatatatatatatatattataaatgttttagaaagcaatagttattaacatgtgctttagaattttaaacaggtctaagtatgacaaaccattaccactttctacctttgtgactttgggtgaaatactttaagcctccaaggtattgtgggatctaaataagatgctatgttaaaagtgcttagccaagtgcttgggccaaaatcagcactcggc

SEQ ID NO: 338386 - DNA, 647 bp, Homo sapiens
aaaagaaagggtgagcgcggctggaagcgcgcatgcgctgtggctaatgccgtaggctctttcagggctgagccatcctgcgtgtcttgcgctcggtggaaatgcccagccgagggacgcgaccagaggacagctctgtgctgatccccaccgacaattcgaccccacacaaggaggatctaagcagcaagattaaagaacaaaaaattgtggtggatgaactttctaaccttaagaagaataggaaagtatataggcaacaacagaacagcaatatattctttcttgcagaccgaacagaaatgctgtctgagagcaagagtaagttttttcttttttggggtttttggggggtgcctaaattatactcatctgagtgcttccgaagatgagtcaacagttatatatatatgtatatatatatatatatatatatatatatatatattataaatgttttagaaagcaatagttattaacatgtgctttagaattttaaacaggtctaagtatgacaaaccattaccactttctacctttgtgactttgggtgaaatactttaagcctccaaggtattgtgggatctaaataagatgctatgttaaaagtgcttagccaagtgcttgggccaaaatcagcactcggc

SEQ ID NO: 338387 - DNA, 206 bp, Homo sapiens
gcggccgcctactactactactgctcgaattcaagcttctaacgatgtacggggacatgtccttagaaaatctttctattgaaaaggagactaaattgtaatgtgattcacaatgtaacaatataaaaataagtttttatataattatataaaagtaagatactctgctgctttactattgtataatatagtagttttaaagttca

SEQ ID NO: 338388 - DNA, 2538 bp, Homo sapiens
aaaagaaagggtgagcgcggctggaagcgcgcatgcgctgtggctaatgccgtaggctctttcagggctgagccatcctgcgtgtcttgcgctcggtggaaatgcccagccgagggacgcgaccagaggacagctctgtgctgatccccaccgacaattcgaccccacacaaggaggatctaagcagcaagattaaagaacaaaaaattgtggtggatgaactttctaaccttaagaagaataggaaagtatataggcaacaacagaacagcaatatattctttcttgcagaccgaacagaaatgctgtctgagagcaagaatatattggatgaactgaaaaaagaataccaagaaatagaaaacttagacaagaccaaaatcaagaaatagtcaacctgatttcacataacaatgtgtggcatttgttgttctgtaaacttttctgctgagcatttcagtcaagatttaaaagaggacttactatataatcttaaacagcggggacccaatagtagtaaacaattgttaaagtctgatgttaactaccagtgtttattttctgctcacgtcctacacttgaggggtgttttgactacccagcctgtggaagatgaaagaggcaatgtgtttctatggaatggagaaatttttagtggaataaaggttgaagctgaagagaatgacactcaaattttgtttaattatctttcctcctgtaagaatgaatctgagattttgtcactcttctcagaagtacaaggtccctggtcatttatatattatcaagcatctagtcattatttatggtttggtagggatttttttggtcgccgtagcttgctttggcattttagtaatttgggcaagagtttctgcctctcttcagttggcacccaaacatctggattggcaaatcagtggcaagaagttccagcatctggacttttcagaattgatcttaagtctactgtcatttccagatgcattattttacaactgtatccttggaaatatatttctagggagaatattattgaagaaaatgttaatagcctgagtcaaatttcagcagacttaccagcatttgtatcagtggtagcaaatgaagccaaactgtatcttgaaaaacctgttgttcctttaaatatgatgttgccacaagctgcattggagactcattgcagtaatatttccaatgtgccacctacaagagagatacttcaagtctttcttactgatgtacacatgaaggaagtaattcagcagttcattgatgtcctgagtgtagcagtcaagaaacgtgtcttgtgtttacctagggatgaaaacctgacagcaaatgaagttttgaaaacgtgtgataggaaagcaaatgttgcaatcctgttttctgggggcattgattccatggttattgcaacccttgctgaccgtcatattcctttagatgaaccaattgatcttcttaatgtagctttcatagctgaagaaaagaccatgccaactacctttaacagagaagggaataaacagaaaaataaatgtgaaataccttcagaagaattctctaaagatgttgctgctgctgctgctgacagtcctaataaacatgtcagtgtaccagatcgaatcacaggaagggcgggactaaaggaactacaagctgttagcccttcccgaatttggaattttgttgaaattaatgtttctatggaagaactgcagaaattaagaagaactcgaatatgtcacttaattcggccattggatacagttttggatgatagcattggctgtgcagtctggtttgcttctagaggaattggttggttagtggcccaggaaggagtgaaatcctatcagagcaatgcaaaggtagttctcactggaattggtgcagatgagcaacttgcaggttattctcgtcatcgtgtccgctttcagtcgcatgggctggaaggattgaataaggaaataatgatggaactgggtcgaatttcttctagaaatcttggtcgtgatgacagagttattggtgatcatggaaaagaagcaagatttcctttcctggatgaaaatgttgtctcctttctaaattctctgccgatttgggaaaaagcaaacttgactttaccccgaggaattggtgaaaaattacttttacgccttgcagctgtggaacttggtcttacagcctctgctcttctgcccaaacgggccatgcagtttggatcaagaattgcaaaaatggaaaaaattaatgaaaaggcatctgataaatgtggacggctccaaatcatgtccttagaaaatctttctattgaaaaggagactaaattgtaatgtgattcacaatgtaacaatataaaaataagtttttatataattatataaaagtaagatactctgctgctttactattgtataatatagtagttttaaagttcaaaacacacaacccaaaccacaccaaagaaaaagccccctccaaacaaacaacacaccaacacacgggggcgccgcgccctatcacccc

SEQ ID NO: 338389 - DNA, 465 bp, Homo sapiens
tgatagctgactctagaggataaacatacattgactgatgacagagttattggcgatcatggaaaagaagcaagatttcctttcctggatgaaaatgttgtctcctttctaaattctctgccgatttgggaaaaagcaaacttgactttaccccgaggaattggtgaaaaattacttttacgccttgcagctgtggaacttggtcttacagcctctgctcttctgcccaaacgggccatgcagtttggatcaagaattgcaaaaatggaaaaaattaatgaaaaggcatctgataaatgtggacggctccaaatcatgtccttagaaaatctttctattgaaaaggagactaaattgtaatgtgattcacaatgtaacaatataaaaataagtttttatataattatataaaagtaagatactctgctgctttactattgtataatatagtagttttaaagttca

SEQ ID NO: 338390 - DNA, 485 bp, Homo sapiens
gccatgcagtttggatcaagaattgcaaaaatggaaaaaattaatgaaaaggcatctgataaatgtggacggctccaaatcatgtccttagaaaatctttctattgaaaaggagactaaattgtaatgtgattcacaatgtaacaatataaaaataagtttttatataattatataaaagtaagatactctgctgctttactattgtataatatagtagttttaaagttcatttggttgaattttcattttttcctgtcacagagcttctaaaaccatggaatttccttagtgatagggaatatcttttgttgttcataataagccccttttgatcacacctgagtttatgctaatgcgttgacttagggtgaggtctctaaatagcctttaacacctgcagcttgggaggccaaggcagagggatctcttgagtccaggagtttgagaacagcctgggcaacatgatgaaacctcatctctacc

SEQ ID NO: 338391 - DNA, 483 bp, Homo sapiens
gccatcctgcgtgtcttgcgctcggtggaaatgcccagccgagggacgcgaccagaggacagctctgtgctgatccccaccgacaattcgaccccacacaaggaggatctaagcagcaaggtgagtgtgagacgcgacgaaaaggctcctggactcgggaccgggcgccactggaccctgaaggtggtccgcagcgggcagcgtggggcctgcctgggcctcggctttgccctgctactttgctctttttattcatagcacttgacagccacagttagtccttttattttctgaaaacagttgcgaaaagggagatcttgaaatttgtcccgagactggacccaggtgacagtggggcggagttttggttgggtgttttcctccctagtctttttaaacttttggaaataccgcccaccccaaatctgttccatcaaagatattctccatccagttaaccatgccagcaacccggggtccatc

SEQ ID NO: 338392 - DNA, 2450 bp, Homo sapiens
aaaagaaagggtgagcgcggctggaagcgcgcatgcgctgtggctaatgccgtaggctctttcagggctgagccatcctgcgtgtcttgcgctcggtggaaatgcccagccgagggacgcgaccagaggacagctctgtgctgatccccaccgacaattcgaccccacacaaggaggatctaagcagcaagattaaagaacaaaaaattgtggtggatgaactttctaaccttaagaagaataggaaagtatataggcaacaacagaacagcaatatattctttcttgcagaccgaacagaaatgctgtctgagagcaagaatatattggatgaactgaaaaaagaataccaagaaatagaaaacttagacaagaccaaaatcaagaaatagtcaacctgatttcacataacaatgtgtggcatttgttgttctgtaaacttttctgctgagcatttcagtcaagatttaaaagaggacttactatataatcttaaacagcggggacccaatagtagtaaacaattgttaaagtctgatgttaactaccagtgtttattttctgctcacgtcctacacttgaggggtgttttgactacccagcctgtggaagatgaaagaggcaatgtgtttctatggaatggagaaatttttagtggaataaaggttgaagctgaagagaatgacactcaaattttgtttaattatctttcctcctgtaagaatgaatctgagattttgtcactcttctcagaagtacaaggtccctggtcatttatatattatcaagcatctagtcattatttatggtttggtagggatttttttggtcgccgtagcttgctttggcattttagtaatttgggcaagagtttctgcctctcttcagttggcacccaaacatctggattggcaaatcagtggcaagaagttccagcatctggacttttcagaattgatcttaagtctactgtcatttccagatgcattattttacaactgtatccttggaaatatatttctagggagaatattattgaagaaaatgttaatagcctgagtcaaatttcagcagacttaccagcatttgtatcagtggtagcaaatgaagccaaactgtatcttgaaaaacctgttgttcctttaaatatgatgttgccacaagctgcattggagactcattgcagtaatatttccaatgtgccacctacaagagagatacttcaagtctttcttactgatgtacacatgaaggaagtaattcagcagttcattgatgtcctgagtgtagcagtcaagaaacgtgtcttgtgtttacctagggatgaaaacctgacagcaaatgaagttttgaaaacgtgtgataggaaagcaaatgttgcaatcctgttttctgggggcattgattccatggttattgcaacccttgctgaccgtcatattcctttagatgaaccaattgatcttcttaatgtagctttcatagctgaagaaaagaccatgccaactacctttaacagagaagggaataaacagaaaaataaatgtgaaataccttcagaagaattctctaaagatgttgctgctgctgctgctgacagtcctaataaacatgtcagtgtaccagatcgaatcacaggaagggcgggactaaaggaactacaagctgttagcccttcccgaatttggaattttgttgaaattaatgtttctatggaagaactgcagaaattaagaagaactcgaatatgtcacttaattcggccattggatacagttttggatgatagcattggctgtgcagtctggtttgcttctagaggaattggttggttagtggcccaggaaggagtgaaatcctatcagagcaatgcaaaggtagttctcactggaattggtgcagatgagcaacttgcaggttattctcgtcatcgtgtccgctttcagtcgcatgggctggaaggattgaataaggaaataatgatggaactgggtcgaatttcttctagaaatcttggtcgtgatgacagagttattggtgatcatggaaaagaagcaagatttcctttcctggatgaaaatgttgtctcctttctaaattctctgccgatttgggaaaaagcaaacttgactttaccccgaggaattggtgaaaaattacttttacgccttgcagctgtggaacttggtcttacagcctctgctcttctgcccaaacgggccatgcagtttggatcaagaattgcaaaaatggaaaaaattaatgaaaaggcatctgataaatgtggacggctccaaatcatgtccttagaaaatctttctattgaaaaggagactaaattgtaatgtgattcacaatgtaacaatataaaaataagtttttatataattatataaaagtaagatactctgctgctttactattgtataatatagtagttttaaagttca

SEQ ID NO: 338393 - DNA, 2404 bp, Homo sapiens
aaaagaaagggtgagcgcggctggaagcgcgcatgcgctgtggctaatgccgtaggctctttcagggctgagccatcctgcgtgtcttgcgctcggtggaaatgcccagccgagggacgcgaccagaggacagctctgtgctgatccccaccgacaattcgaccccacacaaggaggatctaagcagcaagattaaagaacaaaaaattgtggtggatgaactttctaaccttaagaagaataggaccgaacagaaatgctgtctgagagcaagaatatattggatgaactgaaaaaagaataccaagaaatagaaaacttagacaagaccaaaatcaagaaatagtcaacctgatttcacataacaatgtgtggcatttgttgttctgtaaacttttctgctgagcatttcagtcaagatttaaaagaggacttactatataatcttaaacagcggggacccaatagtagtaaacaattgttaaagtctgatgttaactaccagtgtttattttctgctcacgtcctacacttgaggggtgttttgactacccagcctgtggaagatgaaagaggcaatgtgtttctatggaatggagaaatttttagtggaataaaggttgaagctgaagagaatgacactcaaattttgtttaattatctttcctcctgtaagaatgaatctgagattttgtcactcttctcagaagtacaaggtccctggtcatttatatattatcaagcatctagtcattatttatggtttggtagggatttttttggtcgccgtagcttgctttggcattttagtaatttgggcaagagtttctgcctctcttcagttggcacccaaacatctggattggcaaatcagtggcaagaagttccagcatctggacttttcagaattgatcttaagtctactgtcatttccagatgcattattttacaactgtatccttggaaatatatttctagggagaatattattgaagaaaatgttaatagcctgagtcaaatttcagcagacttaccagcatttgtatcagtggtagcaaatgaagccaaactgtatcttgaaaaacctgttgttcctttaaatatgatgttgccacaagctgcattggagactcattgcagtaatatttccaatgtgccacctacaagagagatacttcaagtctttcttactgatgtacacatgaaggaagtaattcagcagttcattgatgtcctgagtgtagcagtcaagaaacgtgtcttgtgtttacctagggatgaaaacctgacagcaaatgaagttttgaaaacgtgtgataggaaagcaaatgttgcaatcctgttttctgggggcattgattccatggttattgcaacccttgctgaccgtcatattcctttagatgaaccaattgatcttcttaatgtagctttcatagctgaagaaaagaccatgccaactacctttaacagagaagggaataaacagaaaaataaatgtgaaataccttcagaagaattctctaaagatgttgctgctgctgctgctgacagtcctaataaacatgtcagtgtaccagatcgaatcacaggaagggcgggactaaaggaactacaagctgttagcccttcccgaatttggaattttgttgaaattaatgtttctatggaagaactgcagaaattaagaagaactcgaatatgtcacttaattcggccattggatacagttttggatgatagcattggctgtgcagtctggtttgcttctagaggaattggttggttagtggcccaggaaggagtgaaatcctatcagagcaatgcaaaggtagttctcactggaattggtgcagatgagcaacttgcaggttattctcgtcatcgtgtccgctttcagtcgcatgggctggaaggattgaataaggaaataatgatggaactgggtcgaatttcttctagaaatcttggtcgtgatgacagagttattggtgatcatggaaaagaagcaagatttcctttcctggatgaaaatgttgtctcctttctaaattctctgccgatttgggaaaaagcaaacttgactttaccccgaggaattggtgaaaaattacttttacgccttgcagctgtggaacttggtcttacagcctctgctcttctgcccaaacgggccatgcagtttggatcaagaattgcaaaaatggaaaaaattaatgaaaaggcatctgataaatgtggacggctccaaatcatgtccttagaaaatctttctattgaaaaggagactaaattgtaatgtgattcacaatgtaacaatataaaaataagtttttatataattatataaaagtaagatactctgctgctttactattgtataatatagtagttttaaagttca

SEQ ID NO: 338394 - DNA, 252 bp, Homo sapiens
ggggcctgatgcccatctgggccctgggtgtccacctgcagcatggatgtccactggtactttatatccaccaggggcctaatgtccacctaagacctggtgttcacctggggtctgatgttcagctgaagaccggatgtccacctggagccgaggaatccactcagggactggtgttgaactggggcctgatgaccacccggggacaaggtacacaccaggcttgttgtccacctgtcaccagatgtccac

SEQ ID NO: 338395 - DNA, 350 bp, Homo sapiens
aggctaacaagtaaccaataaggtggtttactcaaaaaggtgtactaagtccaacaaatactcagttaggaatgtttaattgaaaagcagttcaaccgaggcaatgatcagtgaaaggggaagctagtgatttatgatgtaaaggaggcccgatgatccattgtgagtctaatgccagctgatgtcattacagaacagaaactgagggcaagaagaagctatcaggtagaaagtatctcaattataaattagaggtcaaagtggtgatttgagacagaaggaacaagtagcacaaaagaaacagcgttatcttgaagggaaagctgtagagatccagctccttagatctc

SEQ ID NO: 338396 - DNA, 104 bp, Homo sapiens
tacacaattgcttctttatagaattcaccactcctgagttttaactttcccaaggatactggtcttccaaaggaattttaaaaacaaattaaagaaccacacta

SEQ ID NO: 338397 - DNA, 218 bp, Homo sapiens
ccttcccaaactaagcttacatctagatgcagacaaatgcaggttttaaagggaaaacctatatatgtgtggtgagacatgcaaatgaaacagtaaggcttccaacacaacttacatacttataattaattattcatatatggatgagaatatgttcaaataccatgcacgactatttctaacattttccctattttcactatatttgtgcataaaag

SEQ ID NO: 338398 - DNA, 423 bp, Homo sapiens
tcctatttttttccatctcaggaaactaccatatatctaactgctcaggtcaaaagtctaggccattatctttgatgtcactctttcccttattctcccaatgcaatcaattagaaaattcaatcaactctaccctaaaacttgtcccaaatgtatccacttctctccattaattactattatcctagtctaagctaccattatgtcctacctagacttttgcctgtctctacaacatattctccatacagtagcccaggatattttaaaaacacaaagcagatcatgtcactttcctgtctaagccttcaatggctcttcccactgaactcaaaatccaaactccttaccctgacttacaaaggcctatgtggactgattcttgcctatgtctcagatttcatctcctaacactctcctgct

SEQ ID NO: 338399 - DNA, 450 bp, Homo sapiens
tccagtgagcatgatagatgccattgtttcgcaagttttctattttctttgtctgtacaggttgttcctgacttcgtggctgggaggaaattgaggatgctgaagagtacttgccgtttggccggtggggttgagccagtcagctggctcctgttctcccatgggcccctatcggggctgggtcctgtggctgtaggagaggggccacatagaggcaccgttctaagttctgtggggggacagcacagttcctctggtcgccacacatgccctgtctgactcatctattatctagactcataaaaaaaaagatcctaaaaaatactggctccattctggagagttggcgcagaaattcagattgtggactcattctgtaagctggcttctgttcctcacctcccacccttttcgccatggccttccctacctactatcatcaatccccac

SEQ ID NO: 338400 - DNA, 264 bp, Homo sapiens
cctcgcaaaatgcaccatttcttcctctcaatgcctacctacgcctttccccttcaaaacccaactccaatgccatttcctcaaaaaaaggcttttttatcatggctgagtcaataccagcaagcactccccctccccgaactcttccagcaacagctacatataaaaagtccctgacaataaatctgctctccacgacctacattcctacatagctctacagactgctctgcagttgtttaaaattcattattcagccgggcc

SEQ ID NO: 338401 - DNA, 3850 bp, Homo sapiens
cgctccctcccgaggggccgcgcgcacgggaggacggagaggcggaaaggatggcgctgtgacagccgggccggagccctcgcgtccccaccccgcgccctggccgctgggcccggcgagatggagtccacagcctaccctctcaatttgagcctgaaagaagaggaagaggaagaagagattcagagccgggaactagaggacggcccggcagacatgcagaaagtacgaatctgctctgagggcggatgggtaccggccctatttgatgaggtggccatatatttttccgatgaggaatgggaagttttgacggagcaacaaaaggccctctaccgggaagtcatgaggatgaattatgaaactgtcctgtccctggaattcccattccctaagccagacatgatcacccgtttggaaggggaggaggagtctcagaattctgacgagtggcagctccaaggaggcacctctgcagaaaatgaagaatctgacgtaaagcctccagactggccaaacccaatgaatgctacctcccagtttcctcagcctcagcactttgacagctttggcctccgtctgcctcgggatatcacagagctgcccgagtggagtgaggggtaccccttctacatggccatgggcttcccagggtatgacctctcggctgatgacatagctgggaagtttcagttcagccggggcatgcgccgcagttacgacgcagggttcaagctgatggtagtggaatatgctgagagtaccaacaactgccaggctgccaagcagtttggagtattggaaaaaaacgttcgagactggcgcaaagtgaagccacagcttcaaaacgcccacgccatgcggcgggcattccgaggccccaagaatgggaggtttgctctggtggaccagcgtgtggccgaatatgtcagatacatgcaggccaaaggggaccccatcacccgggaggcgatgcagctgaaagctctcgaaatcgcccaggaaatgaacattccagagaaagggttcaaggcaagcttgggttggtgtcgaagaatgatgagaaggtatgacctgtctctgaggcataaagtgcccgtgccccagcacctgccggaagacctgactgagaaactcgtcacttaccagcgcagtgtcctggctctgcgcagggcgcatgactatgaggtagctcagatggggaatgcagatgagacgcccatttgtttagaggtgccatcacgggtaactgttgataaccagggcgaaaagcctgtcttggtcaagacaccaggcagggaaaaactgaaaatcacagcaatgcttggtgtcttggctgatgggaggaagttaccaccgtacatcattttgaggggaacatatatccccccggggaagtttcccagtgggatggaaattcgctgccaccggtatgggtggatgactgaagacttgatgcaggactggttggaagtggtgtggagacggaggacaggagcagtgcccaagcagcgagggatgctgatcttgaatggcttccggggccatgccacagattccgtgaagaactccatggaaagcatgaacactgacatggtgatcatcccagggggtctgacctcacagcttcaggtgctggatgtcgtggtctacaagccactgaatgacagtgtgcgggcccagtactccaactggcttctggctgggaacctggcgctgagcccaaccgggaatgctaagaagccacccctgggcctctttctggagtgggtcatggtcgcgtggaatagcatctcaagtgagtccatcgtccaagggttcaagaagtgccatatctccagcaacttggaggaggaagacgatgtcctgtgggaaatcgagagtgagttgccaggaggaggagaaccaccaaaagattgtgacaccgaaagcatggctgagagcaactgaagggaaagggaaagcaaatggaactctgatttaaacagctggggatgaaattcctcaagatgattattcctgaaagtgtggatgcgctggatgcgcagggaacatcaggaaaaggccacggggctctgaacagccccggtccagacagcagcctgtacatccatcccaggacacagcccagcccctccccacaccatacaaggtatcagaaaagtctaggacctatcatttcatcagagacatgatcagaaaagaaactgcttctgccccatttcttgttttggagattactccatctgtccatcaaaagaaacctgtaaatatgaaagaacaaaggttatttcctggagaaaagacaatttattcaacaccaacaagggactcatcatatgggcacaactctggtgtccttctatggagaaaacctcaagtaaagttttattctgcctttgaaaatgcttccaaaagtagaccctgtccccacacaggtcaagactacagagaaggctttgtagaaatgtgtcacctatgtacacctgctacttacacatttcctcttttggaaaaatgagatacttagaataacaagaaaattaagacatactggcctggtgccagcagatggcttttctatagacaaactaggttagtgtggaagatataggttaaaataaactatgctgttttatttatcttcccaacctgattggcagctagacttttttagggtctcatttaatggccctgtttttttcattattatatttaatgatagggcaggatttcgtatgcaagctcttgtttctcaggctgcctgcagaagaagtcgctataaattatctgttgtctacatggtacaaggcccattgactcatctgatgcttgttttgttaatttctttaatatttttatcacggggcagtgggagggcttgggcttttagccacagctgttttaagacttctgatctcctgccctgcaggaataggtgggaagtcattgaatttttacactatagtaatttgcattcccacataagtttgagtgttacgaaaacattcctttaaagggatctgtgctacacaaaatatgccaggacctcacagacaaagccattgctagaaatgtcattccaatgatcagatctggaaacaggctgccataaccacttttccttcttgtagactcagctcacctgtatatttaaactgttcttggcatcttgaaacacctatttctactcaggtactcattgtcctgttactgattcacctttctgatccttttcaaccagttttcccccaaggggggaaattttacttaacctctagtatttgaacaactcaatatttgaattgttgccccatttgcttttacctgtactgtattcttggtcatctcaaatggcgtctaaacccagctactttgcattccagaagtttccattccctccaattccacctaatttttcatctgtcctagttactggctctttcttcatgtcttatttctcttgctttgggagcttaaaagattttacaagacctaattttgggttccttccttggagccatagttaccctgccaagaagagtagaaaatgggttcaactcctgtttcgctccaccaacacctctgtgagtctcatcatcagctgagcgatgatgccttacaggttgcatagcactggaactttcctagagtaacggctctgctgccagggtttctctgggctcattcttccactgacttaattatgatctatgcctaacagagccccagtacaactattttgcagaatggctgttaccctagaattactatagcacatattgagatatagttgtactccctagtagataggaactgaccccaacaataaactttgataataaagaca

SEQ ID NO: 338402 - DNA, 3624 bp, Homo sapiens
cgctccctcccgaggggccgcgcgcacgggaggacggagaggcggaaaggatggcgctgtgacagccgggccggagccctcgcgtccccaccccgcgccctggccgctgggcccggcgagatggagtccacagcctaccctctcaatttgagcctgaaagaagaggaagaggaagaagagattcagagccgggaactagaggacggcccggcagacatgcagaaagtacgaatctgctctgagggcggatggaaaatgaagaatctgacgtaaagcctccagactggccaaacccaatgaatgctacctcccagtttcctcagcctcagcactttgacagctttggcctccgtctgcctcgggatatcacagagctgcccgagtggagtgaggggtaccccttctacatggccatgggcttcccagggtatgacctctcggctgatgacatagctgggaagtttcagttcagccggggcatgcgccgcagttacgacgcagggttcaagctgatggtagtggaatatgctgagagtaccaacaactgccaggctgccaagcagtttggagtattggaaaaaaacgttcgagactggcgcaaagtgaagccacagcttcaaaacgcccacgccatgcggcgggcattccgaggccccaagaatgggaggtttgctctggtggaccagcgtgtggccgaatatgtcagatacatgcaggccaaaggggaccccatcacccgggaggcgatgcagctgaaagctctcgaaatcgcccaggaaatgaacattccagagaaagggttcaaggcaagcttgggttggtgtcgaagaatgatgagaaggtatgacctgtctctgaggcataaagtgcccgtgccccagcacctgccggaagacctgactgagaaactcgtcacttaccagcgcagtgtcctggctctgcgcagggcgcatgactatgaggtagctcagatggggaatgcagatgagacgcccatttgtttagaggtgccatcacgggtaactgttgataaccagggcgaaaagcctgtcttggtcaagacaccaggcagggaaaaactgaaaatcacagcaatgcttggtgtcttggctgatgggaggaagttaccaccgtacatcattttgaggggaacatatatccccccggggaagtttcccagtgggatggaaattcgctgccaccggtatgggtggatgactgaagacttgatgcaggactggttggaagtggtgtggagacggaggacaggagcagtgcccaagcagcgagggatgctgatcttgaatggcttccggggccatgccacagattccgtgaagaactccatggaaagcatgaacactgacatggtgatcatcccagggggtctgacctcacagcttcaggtgctggatgtcgtggtctacaagccactgaatgacagtgtgcgggcccagtactccaactggcttctggctgggaacctggcgctgagcccaaccgggaatgctaagaagccacccctgggcctctttctggagtgggtcatggtcgcgtggaatagcatctcaagtgagtccatcgtccaagggttcaagaagtgccatatctccagcaacttggaggaggaagacgatgtcctgtgggaaatcgagagtgagttgccaggaggaggagaaccaccaaaagattgtgacaccgaaagcatggctgagagcaactgaagggaaagggaaagcaaatggaactctgatttaaacagctggggatgaaattcctcaagatgattattcctgaaagtgtggatgcgctggatgcgcagggaacatcaggaaaaggccacggggctctgaacagccccggtccagacagcagcctgtacatccatcccaggacacagcccagcccctccccacaccatacaaggtatcagaaaagtctaggacctatcatttcatcagagacatgatcagaaaagaaactgcttctgccccatttcttgttttggagattactccatctgtccatcaaaagaaacctgtaaatatgaaagaacaaaggttatttcctggagaaaagacaatttattcaacaccaacaagggactcatcatatgggcacaactctggtgtccttctatggagaaaacctcaagtaaagttttattctgcctttgaaaatgcttccaaaagtagaccctgtccccacacaggtcaagactacagagaaggctttgtagaaatgtgtcacctatgtacacctgctacttacacatttcctcttttggaaaaatgagatacttagaataacaagaaaattaagacatactggcctggtgccagcagatggcttttctatagacaaactaggttagtgtggaagatataggttaaaataaactatgctgttttatttatcttcccaacctgattggcagctagacttttttagggtctcatttaatggccctgtttttttcattattatatttaatgatagggcaggatttcgtatgcaagctcttgtttctcaggctgcctgcagaagaagtcgctataaattatctgttgtctacatggtacaaggcccattgactcatctgatgcttgttttgttaatttctttaatatttttatcacggggcagtgggagggcttgggcttttagccacagctgttttaagacttctgatctcctgccctgcaggaataggtgggaagtcattgaatttttacactatagtaatttgcattcccacataagtttgagtgttacgaaaacattcctttaaagggatctgtgctacacaaaatatgccaggacctcacagacaaagccattgctagaaatgtcattccaatgatcagatctggaaacaggctgccataaccacttttccttcttgtagactcagctcacctgtatatttaaactgttcttggcatcttgaaacacctatttctactcaggtactcattgtcctgttactgattcacctttctgatccttttcaaccagttttcccccaaggggggaaattttacttaacctctagtatttgaacaactcaatatttgaattgttgccccatttgcttttacctgtactgtattcttggtcatctcaaatggcgtctaaacccagctactttgcattccagaagtttccattccctccaattccacctaatttttcatctgtcctagttactggctctttcttcatgtcttatttctcttgctttgggagcttaaaagattttacaagacctaattttgggttccttccttggagccatagttaccctgccaagaagagtagaaaatgggttcaactcctgtttcgctccaccaacacctctgtgagtctcatcatcagctgagcgatgatgccttacaggttgcatagcactggaactttcctagagtaacggctctgctgccagggtttctctgggctcattcttccactgacttaattatgatctatgcctaacagagccccagtacaactattttgcagaatggctgttaccctagaattactatagcacatattgagatatagttgtactccctagtagataggaactgaccccaacaataaactttgataataaagaca

SEQ ID NO: 338403 - DNA, 3055 bp, Homo sapiens
cgctccctcccgaggggccgcgcgcacgggaggacggagaggcggaaaggatggcgctgtgacagccgggccggagccctcgcgtccccaccccgcgccctggccgctgggcccggcgagatggagtccacagcctaccctctcaatttgagcctgaaagaagaggaagaggaagaagagattcagagccgggaactagaggacggcccggcagacatgcagaaagtacgaatctgctctgagggcggatgggtaccggccctatttgatgaggtggccatatatttttccgatgaggaatgggaagttttgacggagcaacaaaaggccctctaccgggaagtcatgaggatgaattatgaaactgtcctgtccctggaattcccattccctaagccagacatgatcacccgtttggaaggggaggaggagtctcagaattctgacgagtggcagctccaaggaggcacctctgcagaaaatgaagaatctgacgtaaagcctccagactggccaaacccaatgaatgctacctcccagtttcctcagcctcagcactttgacagctttggcctccgtctgcctcgggatatcacagagctgcccgagtggagtgaggggtaccccttctacatggccatgggcttcccagggtatgacctctcggctgatgacatagctgggaagtttcagttcagccggggcatgcgccgcagttacgacgcagggttcaagctgatggtagtggaatatgctgagagtaccaacaactgccaggctgccaagcagtttggagtattggaaaaaaacgttcgagactggcgcaaagtgaagccacagcttcaaaacgcccacgccatgcggcgggcattccgaggccccaagaatgggaggtttgctctggtggaccagcgtgtggccgaatatgtcagatacatgcaggccaaaggggaccccatcacccgggaggcgatgcagctgaaagctctcgaaatcgcccaggaaatgaacattccagagaaagggttcaaggcaagcttgggttggtgtcgaagaatgatgagaaggtatgacctgtctctgaggcataaagtgcccgtgccccagcacctgccggaagacctgactgagaaactcgtcacttaccagcgcagtgtcctggctctgcgcagggcgcatgactatgaggtagctcagatggggaatgcagatgagacgcccatttgtttagaggtgccatcacgggtaactgttgataaccagggcgaaaagcctgtcttggtcaagacaccaggcagggaaaaactgaaaatcacagcaatgcttggtgtcttggctgatgggaggaagttaccaccgtacatcattttgaggggaacatatatccccccggggaagtttcccagtgggatggaaattcgctgccaccggtatgggtggatgactgaagacttgatgcaggactggttggaagtggtgtggagacggaggacaggagcagtgcccaagcagcgagggatgctgatcttgaatggcttccggggccatgccacagattccgtgaagaactccatggaaagcatgaacactgacatggtgatcatcccagggggtctgacctcacagcttcaggtgctggatgtcgtggtctacaagccactgaatgacagtgtgcgggcccagtactccaactggcttctggctgggaacctggcgctgagcccaaccgggaatgctaagaagccacccctgggcctctttctggagtgggtcatggtcgcgtggaatagcatctcaagtgagtccatcgtccaagggttcaagaagtgccatatctccagcaacttggaggaggaagacgatgtcctgtgggaaatcgagagtgagttgccaggaggaggagaaccaccaaaagattgtgacaccgaaagcatggctgagagcaactgaagggaaagggaaaggtaaccactcaggagtagatactcagtgcctttgctgacatgtctgtgttctacaaacaccttctctccattatttttctgtttttaagttcccttagagcctacagtgcagtagtgtagatcaggggtccccaacccccaggtcacggaccatactggtccatggcctgtcaggaactgggctgcacagcaggaggtgagcggcaggtgagcaagcattaccacctgagctccgcccgctgtcacagcagcggcattagattctcataggagcacaaaccctgttgtgaactgcacatgtgagggatctaggttgcaggctcctcaatgcctgaggatctgaggcggaacagtttcatcccaaagccatcctaccacccactaccccgcacttcctgggtccctgcaaaaattgtcttccatgaaaccagtccctggtgccagaaaagttggggactgctggtatagataacagaccattagcattttctcctttatatgaaacatttattatttgatttatttgtgtctattttgctctgtggcttggacccagaaacacttgtataataggtgaaatgaacaaagaatgagctgccagaacatctgagagctgtaaagttaaaattatttggacccaaagaagcatagtctgacgttgttcagttcacacaaaattttgtctgaaaagccaacttttttctttcccttttaaattatgctgaacatttagggccagtatgtgtaactgacatgctgggacagttgtactcacttttgctggcctgtaggactgtgacatagggagaacactaagtgtgtcctccgggcctcgggtctcagtcctggagctatctacagtatgttaccagcgagtaagaataatagcttctacttgcttttccctacagagttcaggagttttaaaacgtcatcttagtctcattatgaccttcacatgggctatgacaataatttcctgtagtcagcagatgtctgaaggaagatattttttaactgaatctttacaccaaaaaaagaaaataaaacggtgcgtatctaggactctagtgagggctgaggacaatagg

SEQ ID NO: 338404 - DNA, 2258 bp, Homo sapiens
cgctccctcccgaggggccgcgcgcacgggaggacggagaggcggaaaggatggcgctgtgacagccgggccggagccctcgcgtccccaccccgcgccctggccgctgggcccggcgagatggagtccacagcctaccctctcaatttgagcctgaaagaagaggaagaggaagaagagattcagagccgggaactagaggacggcccggcagacatgcagaaagtacgaatctgctctgagggcggatgggtaccggccctatttgatgaggtggccatatatttttccgatgaggaatgggaagttttgacggagcaacaaaaggccctctaccgggaagtcatgaggatgaattatgaaactgtcctgtccctggaattcccattccctaagccagacatgatcacccgtttggaaggggaggaggagtctcagaattctgacgagtggcagctccaaggaggcacctctgcagaaaatgaagaatctgacgtaaagcctccagactggccaaacccaatgaatgctacctcccagtttcctcagcctcagcactttgacagctttggcctccgtctgcctcgggatatcacagagctgcccgagtggagtgaggggtaccccttctacatggccatgggcttcccagggtatgacctctcggctgatgacatagctgggaagtttcagttcagccggggcatgcgccgcagttacgacgcagggttcaagctgatggtagtggaatatgctgagagtaccaacaactgccaggctgccaagcagtttggagtattggaaaaaaacgttcgagactggcgcaaagtgaagccacagcttcaaaacgcccacgccatgcggcgggcattccgaggccccaagaatgggaggtttgctctggtggaccagcgtgtggccgaatatgtcagatacatgcaggccaaaggggaccccatcacccgggaggcgatgcagctgaaagctctcgaaatcgcccaggaaatgaacattccagagaaagggttcaaggcaagcttgggttggtgtcgaagaatgatgagaaggtatgacctgtctctgaggcataaagtgcccgtgccccagcacctgccggaagacctgactgagaaactcgtcacttaccagcgcagtgtcctggctctgcgcagggcgcatgactatgaggtagctcagatggggaatgcagatgagacgcccatttgtttagaggtgccatcacgggtaactgttgataaccagggcgaaaagcctgtcttggtcaagacaccaggcagggaaaaactgaaaatcacagcaatgcttggtgtcttggctgatgggaggaagttaccaccgtacatcattttgaggggaacatatatccccccggggaagtttcccagtgggatggaaattcgctgccaccggtatgggtggatgactgaagacttgatgcaggactggttggaagtggtgtggagacggaggacaggagcagtgcccaagcagcgagggatgctgatcttgaatggcttccggggccatgccacagattccgtgaagaactccatggaaagcatgaacactgacatggtgatcatcccagggggtctgacctcacagcttcaggtgctggatgtcgtggtctacaagccactgaatgacagtgtgcgggcccagtactccaactggcttctggctgggaacctggcgctgagcccaaccgggaatgctaagaagccacccctgggcctctttctggagtgggtcatggtcgcgtggaatagcatctcaagtgagtccatcgtccaagggttcaagaagtgccatatctccagcaacttggaggaggaagacgatgtcctgtgggaaatcgagagtgagttgccaggaggaggagaaccaccaaaagattgtgacaccgaaagcatggctgagagcaactgaagggaaagggaaagcaaatggaactctgatttaaacagctggggatgaaattcctcaagatgattattcctgaaagtgtggatgcgctggatgcgcagggaacatcaggaaaaggccacggggctctgaacagccccggtccagacagcagcctgtacatccatcccaggacacagcccagcccctccccacaccatacaaggtatcagaaaagtctaggacctatcatttctgatcatgtctctgcttttattataataaactgattccatctctaaaaaaaggctttagagcaggaacaaagggaa

SEQ ID NO: 338405 - DNA, 241 bp, Homo sapiens
aatagcaatcatagcatacatttgagcaaatgtatctaagaagtacctagtcctttgtcaagaaaaatggttattgaggccacagttgaataaatatagcattgcctccagacggccaaaatagttttatcttttctccggaagtaagagtttaaaatgccatatttcactgactctgagacatgtttttctcccattgctttactgtttctgaaattgagaatgcctcttaaaatcagtg

SEQ ID NO: 338406 - DNA, 398 bp, Homo sapiens
taacacacagctgttacctattttatttcctataaacagaattcccattccctaagccagacatgatcacccgtttggaaggggaggaggagtctcagaattctgacgagtggcagctccaaggaggcacctctgcaggtactacaagtaaagcagttcagcgtccatccagctgggaacattgtggagtgggattttcagtgtacattccacggggtatttaagaggtagaaggattatgggttttggagttttgaaatctccctctttgcagtgctaaatgtgtgacagtgtgtgacaggcaactgcttttacctcagagcttccattcttcctctatcagctctgagtaacaagacttgatgtatgaccttgtttgtggatgaagcaaaatgagg

SEQ ID NO: 338407 - DNA, 5724 bp, Homo sapiens
cgctccctcccgaggggccgcgcgcacgggaggacggagaggcggaaaggatggcgctgtgacagccgggccggagccctcgcgtccccaccccgcgccctggccgctgggcccggcgagatggagtccacagcctaccctctcaatttgagcctgaaagaagaggaagaggaagaagagattcagagccgggaactagaggacggcccggcagacatgcagaaagtacgaatctgctctgagggcggatgggtaccggccctatttgatgaggtggccatatatttttccgatgaggaatgggaagttttgacggagcaacaaaaggccctctaccgggaagtcatgaggatgaattatgaaactgtcctgtccctggaattcccattccctaagccagacatgatcacccgtttggaaggggaggaggagtctcagaattctgacgagtggcagctccaaggaggcacctctgcagaaaatgaagaatctgacgtaaagcctccagactggccaaacccaatgaatgctacctcccagtttcctcagcctcagcactttgacagctttggcctccgtctgcctcgggatatcacagagctgcccgagtggagtgaggggtaccccttctacatggccatgggcttcccagggtatgacctctcggctgatgacatagctgggaagtttcagttcagccggggcatgcgccgcagttacgacgcagggttcaagctgatggtagtggaatatgctgagagtaccaacaactgccaggctgccaagcagtttggagtattggaaaaaaacgttcgagactggcgcaaagtgaagccacagcttcaaaacgcccacgccatgcggcgggcattccgaggccccaagaatgggaggtttgctctggtggaccagcgtgtggccgaatatgtcagatacatgcaggccaaaggggaccccatcacccgggaggcgatgcagctgaaagctctcgaaatcgcccaggaaatgaacattccagagaaagggttcaaggcaagcttgggttggtgtcgaagaatgatgagaaggtatgacctgtctctgaggcataaagtgcccgtgccccagcacctgccggaagacctgactgagaaactcgtcacttaccagcgcagtgtcctggctctgcgcagggcgcatgactatgaggtagctcagatggggaatgcagatgagacgcccatttgtttagaggtgccatcacgggtaactgttgataaccagggcgaaaagcctgtcttggtcaagacaccaggcagggaaaaactgaaaatcacagcaatgcttggtgtcttggctgatgggaggaagttaccaccgtacatcattttgaggggaacatatatccccccggggaagtttcccagtgggatggaaattcgctgccaccggtatgggtggatgactgaagacttgatgcaggactggttggaagtggtgtggagacggaggacaggagcagtgcccaagcagcgagggatgctgatcttgaatggcttccggggccatgccacagattccgtgaagaactccatggaaagcatgaacactgacatggtgatcatcccagggggtctgacctcacagcttcaggtgctggatgtcgtggtctacaagccactgaatgacagtgtgcgggcccagtactccaactggcttctggctgggaacctggcgctgagcccaaccgggaatgctaagaagccacccctgggcctctttctggagtgggtcatggtcgcgtggaatagcatctcaagtgagtccatcgtccaagggttcaagaagtgccatatctccagcaacttggaggaggaagacgatgtcctgtgggaaatcgagagtgagttgccaggaggaggagaaccaccaaaagattgtgacaccgaaagcatggctgagagcaactgaagggaaagggaaagcaaatggaactctgatttaaacagctggggatgaaattcctcaagatgattattcctgaaagtgtggatgcgctggatgcgcagggaacatcaggaaaaggccacggggctctgaacagccccggtccagacagcagcctgtacatccatcccaggacacagcccagcccctccccacaccatacaaggtatcagaaaagtctaggacctatcatttcatcagagacatgatcagaaaagaaactgcttctgccccatttcttgttttggagattactccatctgtccatcaaaagaaacctgtaaatatgaaagaacaaaggttatttcctggagaaaagacaatttattcaacaccaacaagggactcatcatatgggcacaactctggtgtccttctatggagaaaacctcaagtaaagttttattctgcctttgaaaatgcttccaaaagtagaccctgtccccacacaggtcaagactacagagaaggctttgtagaaatgtgtcacctatgtacacctgctacttacacatttcctcttttggaaaaatgagatacttagaataacaagaaaattaagacatactggcctggtgccagcagatggcttttctatagacaaactaggttagtgtggaagatataggttaaaataaactatgctgttttatttatcttcccaacctgattggcagctagacttttttagggtctcatttaatggccctgtttttttcattattatatttaatgatagggcaggatttcgtatgcaagctcttgtttctcaggctgcctgcagaagaagtcgctataaattatctgttgtctacatggtacaaggcccattgactcatctgatgcttgttttgttaatttctttaatatttttatcacggggcagtgggagggcttgggcttttagccacagctgttttaagacttctgatctcctgccctgcaggaataggtgggaagtcattgaatttttacactatagtaatttgcattcccacataagtttgagtgttacgaaaacattcctttaaagggatctgtgctacacaaaatatgccaggacctcacagacaaagccattgctagaaatgtcattccaatgatcagatctggaaacaggctgccataaccacttttccttcttgtagactcagctcacctgtatatttaaactgttcttggcatcttgaaacacctatttctactcaggtactcattgtcctgttactgattcacctttctgatccttttcaaccagttttcccccaaggggggaaattttacttaacctctagtatttgaacaactcaatatttgaattgttgccccatttgcttttacctgtactgtattcttggtcatctcaaatggcgtctaaacccagctactttgcattccagaagtttccattccctccaattccacctaatttttcatctgtcctagttactggctctttcttcatgtcttatttctcttgctttgggagcttaaaagattttacaagacctaattttgggttccttccttggagccatagttaccctgccaagaagagtagaaaatgggttcaactcctgtttcgctccaccaacacctctgtgagtctcatcatcagctgagcgatgatgccttacaggttgcatagcactggaactttcctagagtaacggctctgctgccagggtttctctgggctcattcttccactgacttaattatgatctatgcctaacagagccccagtacaactattttgcagaatggctgttaccctagaattactatagcacatattgagatatagttgtactccctagtagataggaactgaccccaacaataaactttgataataaagacaataggctatggtgattttatttctttacctattagcattgtgaaaagttacattcaaggtattggctacaccttattctccatccggtttggtaccaatatattacatctttcagtcaaaaagtgttcatgagatgcagtgtaagtaatattggtatctgtgaagacacagggaagaacgtgtgcagtggggcaagtttgacataaatagcttttttcctcagtcatgttttgtatgctctcagcagtggtacattaccaaaatcacatgaaagaaatcccataaagggatctgaattttaaatgaaagtatgatgaacccgcaagtcttaattatgcacttttaataaaattagtcctgacaatttacagtgcccataaagtagtagttgattctccaggaataatctggcagtgttatttttccttttcaacccatcagcattaaatgctgagccactctccaagtctgacccctagactaagcttccttactcttactcttcctcccagaggcattttggaatgagtcaaaggcatggtaggacacggcatttacctgtggtcatcacttcaggcaatggaaaggaaaagtgtttgtccttggttgatcagagaagtgggtgataagaacgtgctaaataacaaacctgcacacttgtacctctgaacctaaaatgttttttttttaattcagaacaacaaaagaacatgctaagcgagtcctcccacctgcctggtaaaatacagccagctttatcacacctggttttgcacagtgataaattcctgcaggaaaaaataagttttattctaagtctgaaattatatggtttccaacagctttttccctcgttaaaataattatttttctacatgatgcttgataataagcatttgtttcttaacctaattagagaagcgattgcactcgagtccccacagctggcagtggtgttacagatggaaccagcctttggtggacagagttcagatgtttcaggggctcttgtgaaaatgctaagtattactgtttctaccttactgccctgcactttaccccatcatctcccctccttagaaaatgatttcataggaaaattggcatggagagcagatagtagagtgtagacctgaaatacatgaggcaaaggcagtcttccagcattctatggtcccaccaggtgggtaggtgactaggaattcaggccaggtcctagagagtagtgagaagttttccagtttgcagtttcctctgtgctgtatgtacagccatacagcctatggaacctgacattgcagtgggcagcaggacacggtcaaggctcctagctgcctctccatctatggaactatgaaatttcacacatattccctaggcagcattaaggcccaggtatattgagtagtccaaaccaaaaaactatattcgagtatcagtttaaattcttccaagccctaaaaattcttacgtagtttctcacctaaaactaatggcttgtgccaagaactgaaactaagctattgatttttttttaagaagtcttaatctatacataagaaattacatacctggccaggtgcagtagttcaggcctgtaatcctaacaaacactctgggaggccaaggtgggcagactgcttgagctcaggagttcattaccagtctgggcaacatgataaaaccgtgtctttacaaaaaaaaaaaattttaaattagccgggcatggtggtgtgaatctgtagtcccagctacttaggaggttgcgatgggagaatcacctgagcccagaggtccagtctgcagtgagccatgatcacaccacagcactccagctggggtgacagagtgagaccctatctcaaaaagaaaag

SEQ ID NO: 338408 - DNA, 3410 bp, Homo sapiens
cgctccctcccgaggggccgcgcgcacgggaggacggagaggcggaaaggatggcgctgtgacagccgggccggagccctcgcgtccccaccccgcgccctggccgctgggcccggcgagatggagtccacagcctaccctctcaatttgagcctgaaagaagaggaagaggaagaagagattcagagccgggaactagaggacggcccggcagacatgcagaaagtacgaatctgctctgagggcggatgggtaccggccctatttgatgaggtggccatatatttttccgatgaggaatgggaagttttgacggagcaacaaaaggccctctaccgggaagtcatgaggatgaattatgaaactgtcctgtccctggaattcccattccctaagccagacatgatcacccgtttggaaggggaggaggagtctcagaattctgacgagtggcagctccaaggaggcacctctgcagaaaatgaagaatctgacgtaaagcctccagactggccaaacccaatgaatgctacctcccagtttcctcagcctcagcactttgacagctttggcctccgtctgcctcgggatatcacagagctgcccgagtggagtgaggggtaccccttctacatggccatgggcttcccagggtatgacctctcggctgatgacatagctgggaagtttcagttcagccggggcatgcgccgcagttacgacgcagggttcaagctgatggtagtggaatatgctgagagtaccaacaactgccaggctgccaagcagtttggagtattggaaaaaaacgttcgagactggcgcaaagtgaagccacagcttcaaaacgcccacgccatgcggcgggcattccgaggccccaagaatgggaggtttgctctggtggaccagcgtgtggccgaatatgtcagatacatgcaggccaaaggggaccccatcacccgggaggcgatgcagctgaaagctctcgaaatcgcccaggaaatgaacattccagagaaagggttcaaggcaagcttgggttggtgtcgaagaatgatgagaaggtatgacctgtctctgaggcataaagtgcccgtgccccagcacctgccggaagacctgactgagaaactcgtcacttaccagcgcagtgtcctggctctgcgcagggcgcatgactatgaggtagctcagatggggaatgcagatgagacgcccatttgtttagaggtgccatcacgggtaactgttgataaccagggcgaaaagcctgtcttggtcaagacaccaggcagggaaaaactgaaaatcacagcaatgcttggtgtcttggctgatgggaggaagttaccaccgtacatcattttgaggggaacatatatccccccggggaagtttcccagtgggatggaaattcgctgccaccggtatgggtggatgactgaagacttgatgcaggactggttggaagtggtgtggagacggaggacaggagcagtgcccaagcagcgagggatgctgatcttgaatggcttccggggccatgccacagattccgtgaagaactccatggaaagcatgaacactgacatggtgatcatcccagggggtctgacctcacagcttcaggtgctggatgtcgtggtctacaagccactgaatgacagtgtgcgggcccagtactccaactggcttctggctgggaacctggcgctgagcccaaccgggaatgctaagaagccacccctgggcctctttctggagtgggtcatggtcgcgtggaatagcatctcaagtgagtccatcgtccaagggttcaagaagtgccatatctccagcaacttggaggaggaagacgatgtccatcaaaagaaacctgtaaatatgaaagaacaaaggttatttcctggagaaaagacaatttattcaacaccaacaagggactcatcatatgggcacaactctggtgtccttctatggagaaaacctcaagtaaagttttattctgcctttgaaaatgcttccaaaagtagaccctgtccccacacaggtcaagactacagagaaggctttgtagaaatgtgtcacctatgtacacctgctacttacacatttcctcttttggaaaaatgagatacttagaataacaagaaaattaagacatactggcctggtgccagcagatggcttttctatagacaaactaggttagtgtggaagatatagttttttagggtctcatttaatggccctgtttttttcattattatatttaatgatagggcaggatttcgtatgcaagctcttgtttctcaggctgcctgcagaagaagtcgctataaattatctgttgtctacatggtacaaggcccattgactcatctgatgcttgttttgttaatttctttaatatttttatcacggggcagtgggagggcttgggcttttagccacagctgttttaagacttctgatctcctgccctgcaggaataggtgggaagtcattgaatttttacactatagtaatttgcattcccacataagtttgagtgttacgaaaacattcctttaaagggatctgtgctacacaaaatatgccaggacctcacagacaaagccattgctagaaatgtcattccaatgatcagatctggaaacaggctgccataaccacttttccttcttgtagactcagctcacctgtatatttaaactgttcttggcatcttgaaacacctatttctactcaggtactcattgtcctgttactgattcacctttctgatccttttcaaccagttttcccccaaggggggaaattttacttaacctctagtatttgaacaactcaatatttgaattgttgccccatttgcttttacctgtactgtattcttggtcatctcaaatggcgtctaaacccagctactttgcattccagaagtttccattccctccaattccacctaatttttcatctgtcctagttactggctctttcttcatgtcttatttctcttgctttgggagcttaaaagattttacaagacctaattttgggttccttccttggagccatagttaccctgccaagaagagtagaaaatgggttcaactcctgtttcgctccaccaacacctctgtgagtctcatcatcagctgagcgatgatgccttacaggttgcatagcactggaactttcctagagtaacggctctgctgccagggtttctctgggctcattcttccactgacttaattatgatctatgcctaacagagccccagtacaactattttgcagaatggctgttaccctagaattactatagcacatattgagatatagttgtactccctagtagataggaactgaccccaacaataaactttgataataaagaca

SEQ ID NO: 338409 - DNA, 3034 bp, Homo sapiens
cgctccctcccgaggggccgcgcgcacgggaggacggagaggcggaaaggatggcgctgtgacagccgggccggagccctcgcgtccccaccccgcgccctggccgctgggcccggcgagatggagtccacagcctaccctctcaatttgagcctgaaagaagaggaagaggaagaagagattcagagccgggaactagaggacggcccggcagacatgcagaaagtacgaatctgctctgagggcggatgggtaccggccctatttgatgaggtggccatatatttttccgatgaggaatgggaagttttgacggagcaacaaaaggccctctaccgggaagtcatgaggatgaattatgaaactgtcctgtccctggaattcccattccctaagccagacatgatcacccgtttggaaggggaggaggagtctcagaattctgacgagtggcagctccaaggaggcacctctgcagaaaatgaagaatctgacgtaaagcctccagactggccaaacccaatgaatgctacctcccagtttcctcagcctcagcactttgacagctttggcctccgtctgcctcgggatatcacagagctgcccgagtggagtgaggggtaccccttctacatggccatgggcttcccagggtatgacctctcggctgatgacatagctgggaagtttcagttcagccggggcatgcgccgcagttacgacgcagggttcaagctgatggtagtggaatatgctgagagtaccaacaactgccaggctgccaagcagtttggagtattggaaaaaaacgttcgagactggcgcaaagtgaagccacagcttcaaaacgcccacgccatgcggcgggcattccgaggccccaagaatgggaggtttgctctggtggaccagcgtgtggccgaatatgtcagatacatgcaggccaaaggggaccccatcacccgggaggcgatgcagctgaaagctctcgaaatcgcccaggaaatgaacattccagagaaagggttcaaggcaagcttgggttggtgtcgaagaatgatgagaaggtatgacctgtctctgaggcataaagtgcccgtgccccagcacctgccggaagacctgactgagaaactcgtcacttaccagcgcagtgtcctggctctgcgcagggcgcatgactatgaggtagctcagatggggaatgcagatgagacgcccatttgtttagaggtgccatcacgggtaactgttgataaccagggcgaaaagcctgtcttggtcaagacaccaggcagggaaaaactgaaaatcacagcaatgcttggtgtcttggctgatgggaggaagttaccaccgtacatcattttgaggggaacatatatccccccggggaagtttcccagtgggatggaaattcgctgccaccggtatgggtggatgactgaagacttgatgcaggactggttggaagtggtgtggagacggaggacaggagcagtgcccaagcagcgagggatgctgatcttgaatggcttccggggccatgccacagattccgtgaagaactccatggaaagcatgaacactgacatggtgatcatcccagggggtctgacctcacagcttcaggtgctggatgtcgtggtctacaagccactgaatgacagtgtgcgggcccagtactccaactggcttctggctgggaacctggcgctgagcccaaccgggaatgctaagaagccacccctgggcctctttctggagtgggtcatggtcgcgtggaatagcatctcaagtgagtccatcgtccaagggttcaagaagtgccatatctccagcaacttggaggaggaagacgatgtcctgtgggaaatcgagagtgagttgccaggaggaggagaaccaccaaaagattgtgacaccgaaagcatggctgagagcaactgaagggaaagggaaaggtaaccactcaggagtagatactcagtgcctttgctgacatgtctgtgttctacaaacaccttctctccattatttttctgtttttaagttcccttagagcctacagtgcagtagtgtagatcaggggtccccaacccccaggtcacggaccatactggtccatggcctgtcaggaactgggctgcacagcaggaggtgagcggcaggtgagcaagcattaccacctgagctccgcccgctgtcacagcagcggcattagattctcataggagcacaaaccctgttgtgaactgcacatgtgagggatctaggttgcaggctcctcaatgcctgaggatctgaggcggaacagtttcatcccaaagccatcctaccacccactaccccgcacttcctgggtccctgcaaaaattgtcttccatgaaaccagtccctggtgccagaaaagttggggactgctggtatagataacagaccattagcattttctcctttatatgaaacatttattatttgatttatttgtgtctattttgctctgtggcttggacccagaaacacttgtataataggtgaaatgaacaaagaatgagctgccagaacatctgagagctgtaaagttaaaattatttggacccaaagaagcatagtctgacgttgttcagttcaccaacttttttctttcccttttaaattatgctgaacatttagggccagtatgtgtaactgacatgctgggacagttgtactcacttttgctggcctgtaggactgtgacatagggagaacactaagtgtgtcctccgggcctcgggtctcagtcctggagctatctacagtatgttaccagcgagtaagaataatagcttctacttgcttttccctacagagttcaggagttttaaaacgtcatcttagtctcattatgaccttcacatgggctatgacaataatttcctgtagtcagcagatgtctgaaggaagatattttttaactgaatctttacaccaaaaaaagaaaataaaacggtgcgtatctaggactctagtgagggctgaggacaatagg

SEQ ID NO: 338410 - DNA, 906 bp, Homo sapiens
cgctccctcccgaggggccgcgcgcacgggaggacggagaggcggaaaggatggcgctgtgacagccgggccggagccctcgcgtccccaccccgcgccctggccgctgggcccggcgagatggagtccacagcctaccctctcaatttgagcctgaaagaagaggaagaggaagaagagattcagagccgggaactagaggacggcccggcagacatgcagaaagtacgaatctgctctgagggcggatgggtaccggccctatttgatgaggtggccatatatttttccgatgaggaatgggaagttttgacggagcaacaaaaggccctctaccgggaagtcatgaggatgaattatgaaactgtcctgtccctggaattcccattccctaagccagacatgatcacccgtttggaaggggaggaggagtctcagaattctgacgagtggcagctccaaggaggcacctctgcaggtactacaagtaaagcagttcagcgtccatccagctgggaacattgtggagtgggattttcagtgtacattccacggggtatttaagaggtagaaggattatgggttttggagttttgaaatctccctctttgcagtgctaaatgtgtgacagtgtgtgacaggcaactgcttttacctcagagcttccattcttcctctatcagctctgagtaacaagacttgatgtatgaccttgtttgtggatgaagcaaaatgaggcttgtgcagcatttggtctagtgcaccttctggctgaacagggctccctcagtggcgtaccatgtgcctctgcaaactaagaatagtgagaggaagcacacttcctgagttacctggctccctgtccatctcatactggatagaaaaagcaatagcaatcatagcata

SEQ ID NO: 338411 - DNA, 876 bp, Homo sapiens
ccagtcacaccattccccagggtcccctcacaccccatcagcctggacaggagctagaaacaggtgggggaaggtggagacatcaccagggcctgagcaagatgggctgtgagaaagaggccttagcaagaacagctaaaagcctagcagaaaaatgggcccactgcccaaggtgagtccttggaaagatgccaacacattcaactgtgggtcgggaggatagggactgtcgtattcatcacctgtccttagaaactgagcttatctgggtgctgggagcatggtagacctccacaatgcatgctgaatcaaagcgcaggatcataagcctgctctacccaaggggcccatccaggcctagctctagaaccaggttgtcctctggggtcatggaaaaggaaagtcagtcagagggtccagcatgttgtgagaactaatgaatggcatgcagaattatattctgcatggcaaataaatatgcaattcaatgggctgcacaggcactctatggaatggcggcatggcatgctcgcacacactctcccaaactctggccagccaagaaactatcaccacatgcccttcagctaagccctgggaggagctgtaggcaggggctcagcgggcaggcagacaggcagtgggcaaagcagagcacgcagttagctgtgattacctcttgtgctttggggcagagaagagtggaagcaggtggggttaaagagacagaggaggccccagcctgagaagaccctgggaaaaggcccagagccttagtccccagccccatctctgaggactcggagatgagcagctcggcctacagagaggggacatggtgaggggctgcatccctcacacttggcccagttcccc

SEQ ID NO: 338412 - DNA, 1450 bp, Homo sapiens
ttggtaagcaatccagaaacctgagtttattcagagtaagtgaccaaatcaatgagtaaaagaacttggctcctacatcaaagccaagtctttgggcaatgctggcagtttctcctggaagtaatgagaaatgttgtgaaagaactcagcgcattggccagaaatgattgaaaaaccatcaaatttggggcagcaggaggtgtaaatacaagtgagaaaagggattctagagccacctatgaaataccacaatctccttgaggtggggaacattccttgatgttccaaaactgagaaaagcacacccagggccagtctttgtagagtttgttgctgttaagagcccacccaggcagatcacaaggtcaggagtttgagaccagcctgaccaacatggtgaaaccccatctctactaaaaatacaaaaacttgcccggtatggtggcatgtgcctataatcccagctactcaggaggctgaagcaggagaatcacttgaacccaggaggcagaggttgcagtgggccaagattgcaacactgcactccagcctgggcaagagcgagactccatctcaacaaaaaaagagcacacacatctcaacaaaaaaagaggctactggtgttgagggtagagcttgctgctaatgaaccaagaggcacatccttttccatggagaataggaagccccgagaatggggaggtgtgtgacagccatgctggactcagaggcaggtgtcataaactgccccaggctcctcattctcccttctccctcatggagaacagttgtgttccccttgtattatagatccagatttttgcctttggcctgcttactgtctgtttccttggtgacttggtagtcccttctaggacactggaatgcttttgtgccagcccctcactctcgtcacctaggctggagtgcagtggtacaatcatagcttgctgaagtctccactcctgcaccctcctacctcagcatcctaagtagccaggcacacacaccaccatacccagctagttttttggagaaaagtgtctggctatgttgcccaggctggtcttaattcctgacctcaaggaatgctcctgccacagcctcccaaagtgctgggattgaggcacaagccactgtatctgaaatagaatcctatccctaactcaggaggtccaggtagttagtcttttccacttaaggcagttctccaacctgaggtgacataaaagcactgatctagagacactggcaaaaactaatgtgcaaagaaatgagtcatataggggaaatcaatttctctgggctacaacttccaactccctttactccagtacccagaatcctctcccaggtggtgcttcaagctgctcaggagtgctttagggttcatcgcaaaacaaaagggagtgatgaacacaggctctataaagttcatcagaaggaacag

SEQ ID NO: 338413 - DNA, 265 bp, Homo sapiens
caacattaagttctgaaaatgtactacacattttgctgagttctctatataaataacagtgaatagttaccttctacatgtgtcaagtatttcacatgcattatatctaatcctcacaataatgaaagcaaacccttatgtgatgttttgtgcaaggcattgttctcagcgctttaccttgactaactcttttttttttttttcaatttttttatataatagatacggtttcgccacgttcttcaactcagatgcttctacggta

SEQ ID NO: 338414 - DNA, 378 bp, Homo sapiens
tggggaggcggaggttgcagtgagctgagatagcgccactgcactccagcctgggcgatagagcatgattccgtctcaaaaaaaaaaaagcctcaaatgaggaatatatattgaaagagttttatttatttattttggtttaatgaaaatttgatctgttgtatttttaattagaaattatttgcttcaaggtttttatacaggacatacaggaactaatttggatatttttaatattatagatctgtactgcgttctcagaaggctacaaaactctgtaagagaaaaataattatttggcctgcattgtttaaaaggagatcatatctagttgaggaaaactggtggcgttggagcatggctttgacagattttgat

SEQ ID NO: 338415 - DNA, 928 bp, Homo sapiens
gaaaaggagatgcataggggctatcgaccaagcagggcatgatggttagaactgagctgggttttgtaggattagtagaattggatagagaaaggccaagggaagggcaacagttttctaaatagttcttttatttctatatcattgtttactctctctgaactcagggttgaaatgtgtgtgtcttattcaccactgagtcccccgggtctagaattatgtctgggacatacgagatactcaataaacagtaattgaatacatgaacaaacacttgttgccagaatccttttcctaaaatacagatgacagctggggctaccactcgcaatgtatgcacgcctttatgcaaattagaaaaaggtgtcccattcccctaggttgatgcccttcttctctaggatttgtggctaggagaatcaatctggagttcacctcacccatgaccgaccccaaccctactgcctggccaatcttccttctgaggcccctgcccccaactgcatacagggctggcaatcaaagcccttctcaatctgaccccaactttcctgctccatcagaaccattttcaaccttgattccgtgcttatgctacagtagtcctcagcttcagtgtatgaattcccactactgccttcatcccaccaattcagcaactttacaccaaacacctaccatttaataaagaggagccatccccattctaatattgttctcagcgactctctagaagctccctcttgtcctcacatgctcccactcagactctctttcttcctgtctttgattaagaagatatactagcttttgactctcagctttcccttcatttgggccttggtcccctttggacaattttcctggactttaaaggaaacaggcagcctgcctccttagtcctcctcaggtggaatcaacaagcact

SEQ ID NO: 338416 - DNA, 319 bp, Homo sapiens
tttacaccaaacacctaccatttaataaagaggagccatccccattctaatattgttctcagcgactctctagaagctccctcttgtcctcacatgctcccactcagactctctttcttcctgtctttgattaagaagatatactagcttttgactctcagctttcccttcatttgggccttggtcccctttggacaattttcctggactttaaaggaaacaggcagcctgcctccttagtcctcctcaggtggaatcaacaagcactctttctccgaacttacccagcacattgtaaaacctttataaataaaacctt

SEQ ID NO: 338417 - DNA, 448 bp, Homo sapiens
agtaaacgtaccacttgaaaacttggaatgcttttcagctactctgaaattataatgcacagttagaggctatgaaatgctttgaagaatgccaccagtcctatttataacaggaagcactcccctttatttttagtccttttgattttcaaatttactgttgaagaaggaaaaaaaaaatctgtccagggaacatgatctgggaagcccattaaacctcatttagagttccattttatttctgtaaacagaaagaccagggctcatggctcttctaagttaataagtctaccctgcaataaacaaacctgctttgtcaatttgtgtccttaaattagatttaacttgactttacagtgggctgactggctggtaaggggggcctctgcagagtagccacagggcaaacggcattccagtgggggactgccccaggggcttctggaca

SEQ ID NO: 338418 - DNA, 517 bp, Homo sapiens
gatggatgaaatcacaggtaagcttagagatgatgactattgtgcccagcacaactgtgcttggagggaatctgggctgggctggggttggtagtggagagtgtcaccaactaaagggtagctctgaaaaaggggctgctttaggagcccggtgcctggagtggtgcacagggggctgtgattgcctggaaaccgagcaggactgagaaccaggagagggcagcgtggaggaggagcccctgccaaatgcaagcagccctgggaggctgcgtcagacagcaaaggcaggaggtgacctgcgccacagtccctgccccatcagtgccccacagcggcacttctgcccctagagctcttagatgccagttggtctgtgaaagggagatttggcggtgttagaggccaaaggttctacgctctctgctgaataagaggcgaggtcctccgatcagaacagaaggacccggggtgcacggccttgctgaagagttgtaaagattaacttagtgtttattaa

SEQ ID NO: 338419 - DNA, 363 bp, Homo sapiens
tataaactctgctcaaatccctgaccggcccctaaagtaggcatgaatggggtagactccaagcagcccaggtaaagttaaccaacaaaaaaagaagagagatttcagagtttggagttcagccaaattaattgcctaccaaaaccggatgaaaccaaaccaacactctttggaggaatataacagaatctacagtaatttcaacacaatgtccaggatacatttcaaaattgttagacatacaaagaaagaatatgcgacccatattcaagagaaaagataatagtgactgaccctgatgaccaaaatgttgaattagcagacaatgattttattttatttgagacacagtcttactctgtc

SEQ ID NO: 338420 - DNA, 428 bp, Homo sapiens
ctggagtttccttcctcccattcaactatcaggtgaactacaattaggtattaatccttaatgacagcttcctaatgaccttgtttagctatttcaagaggatccttccctaaagtattcagaatcgccttgaaacatgaagaccacttcaagtgctatgcaaagtgagggaaatttggagagtagattcttctgaagatttctctgctaaataagttgcactcaactgaaatccagatgtgccagcactgaagctccatcgcaggcaaggccgactcattgaccccaacttctgtccactcaagtgccccgagactgctggtgatttagcaagtgaactccttgccagttgtaagagctaattcaatctcatccccagggtggtataggtacattaagagttgcagctcttagagtagttaatccgg

SEQ ID NO: 338421 - DNA, 263 bp, Homo sapiens
tcccagtctttgtgctgctattgtcataaactttacttctatgtaagttacaaatgctacaatgtgtaattacctctaagacatatcttttaatgagactgaaacaaaaagaaaaaatatcttatgtatttatccacttagttaccctttgcattgtcttcatttatttttatagctccagttttcttttatttgtttgtttatttagacagagggtctcactctgtcacccaggctggaatgcagtggtgcgatcatagctc

SEQ ID NO: 338422 - DNA, 352 bp, Homo sapiens
tgagatggagtctcgctctgtcacccaggctggagtgcagtggtgtgatcctggctcactgcaacctccgcgtcccgggttcaagtgcttctcctgcctcagcctcccaagtagctgggactataggcatgcgccaccaagcctggctatttttttgtatttttagtagagacggggtttcaccatgttggccaggctggtctcaaattcctgacctcaagtgatccacccacctcggcctcacaaagtgctgggattacaggcctgagccactgcgcctggccaggagttttttcttgagtgacgtttgctagtataacatagttggggccagtgggtggggtgggaggct

SEQ ID NO: 338423 - DNA, 541 bp, Homo sapiens
gatcaagtacaaacttcatgtagatgtcatgtaggagatatcaagttgtacatatcaagtaaaatggatagatgtgagcctgtgcagttgagaagtgttttgtgtgtatcatcctgcaaatggaaattatgtagaatgcaggaataaataatagagtggtgttcttaactgtcttataccagcactgtgtgctgtaaggactagcagtagtttgtggctgaaccagcccagctgttaggactacctgttgatgccgggcaagggggctcacgcctgtagtcctagcactttgggagccaaggtgggtggattgcttgagcccaggagtttaaaaccagcctgggcaacatagcaaaatcctgactctacaaaaaaatacagaaaattagccgagcatggtggcgtgtgcctgtagtcctagctacttgggaggctgaggtgaaagaatcacctgagccctggaggttgaggctgcagtgaactgtgatcgtaccactgcactcccgcctggacattggagtgagaccctctcaaggggtag

SEQ ID NO: 338424 - DNA, 584 bp, Homo sapiens
ctcaagtgatccgtccacctcagcctcccaaagtctggggatcacaggcatgagcccccatgcctggccaacctagcagtatgcttttatggttcttactttttgtgtgtgtggctgcatagctgatttctttttattgctgaataatattcccttgaatgaatgtaccatggtttggttatccattcacttattgaagagcatcttggttgcttctattttttggcaattatgaataaagctgctataaacatttctgtgtaggcttttgtgtggacctaagttttcagctcatttgcgtaaatacgtaggagagtgattgctagattatgtggtacaagtatgtttagctttgtcagaaactgccaaactgtcttcagacgtggcaggaccattttgcattcccaccagcgtgaatgagtttctgttccacatccttaccagcatttggtgttgtcactgatttagattttagccattctaaggtatcttattgttttaatttgcaattccctaatgacatacaatgtcatcttttcatgtgcttatttgccatctgcatctttattgaggtatccagatct

SEQ ID NO: 338425 - DNA, 209 bp, Homo sapiens
ttgtgagaggtacagtaaatgagaacatgcctgcacataatgtactgagtaaatatcagttagtgtttatgcaatgagggagtcactgccttgcccaaaacttcattgcctcaattcattcaagaaaataacctccttactctggcatttaaagctttccgctattcactccctacctctccagcctttaaactgatgatcctttgcag

SEQ ID NO: 338426 - DNA, 7322 bp, Homo sapiens
  misc_feature (2731)..(2731): n is a, c, g, or t
gccagaggcgctcttaacggcgtttatgtcctttgctgtctgaggggcctcagctctgaccaatctggtcttcgtgtggtcattagcatgggcttcgtgagacagatacagcttttgctctggaagaactggaccctgcggaaaaggcaaaagattcgctttgtggtggaactcgtgtggcctttatctttatttctggtcttgatctggttaaggaatgccaacccgctctacagccatcatgaatgccatttccccaacaaggcgatgccctcagcaggaatgctgccgtggctccaggggatcttctgcaatgtgaacaatccctgttttcaaagccccaccccaggagaatctcctggaattgtgtcaaactataacaactccatcttggcaagggtatatcgagattttcaagaactcctcatgaatgcaccagagagccagcaccttggccgtatttggacagagctacacatcttgtcccaattcatggacaccctccggactcacccggagagaattgcaggaagaggaatacgaataagggatatcttgaaagatgaagaaacactgacactatttctcattaaaaacatcggcctgtctgactcagtggtctaccttctgatcaactctcaagtccgtccagagcagttcgctcatggagtcccggacctggcgctgaaggacatcgcctgcagcgaggccctcctggagcgcttcatcatcttcagccagagacgcggggcaaagacggtgcgctatgccctgtgctccctctcccagggcaccctacagtggatagaagacactctgtatgccaacgtggacttcttcaagctcttccgtgtgcttcccacactcctagacagccgttctcaaggtatcaatctgagatcttggggaggaatattatctgatatgtcaccaagaattcaagagtttatccatcggccgagtatgcaggacttgctgtgggtgaccaggcccctcatgcagaatggtggtccagagacctttacaaagctgatgggcatcctgtctgacctcctgtgtggctaccccgagggaggtggctctcgggtgctctccttcaactggtatgaagacaataactataaggcctttctggggattgactccacaaggaaggatcctatctattcttatgacagaagaacaacatccttttgtaatgcattgatccagagcctggagtcaaatcctttaaccaaaatcgcttggagggcggcaaagcctttgctgatgggaaaaatcctgtacactcctgattcacctgcagcacgaaggatactgaagaatgccaactcaacttttgaagaactggaacacgttaggaagttggtcaaagcctgggaagaagtagggccccagatctggtacttctttgacaacagcacacagatgaacatgatcagagataccctggggaacccaacagtaaaagactttttgaataggcagcttggtgaagaaggtattactgctgaagccatcctaaacttcctctacaagggccctcgggaaagccaggctgacgacatggccaacttcgactggagggacatatttaacatcactgatcgcaccctccgcctggtcaatcaatacctggagtgcttggtcctggataagtttgaaagctacaatgatgaaactcagctcacccaacgtgccctctctctactggaggaaaacatgttctgggccggagtggtattccctgacatgtatccctggaccagctctctaccaccccacgtgaagtataagatccgaatggacatagacgtggtggagaaaaccaataagattaaagacaggtattgggattctggtcccagagctgatcccgtggaagatttccggtacatctggggcgggtttgcctatctgcaggacatggttgaacaggggatcacaaggagccaggtgcaggcggaggctccagttggaatctacctccagcagatgccctacccctgcttcgtggacgattctttcatgatcatcctgaaccgctgtttccctatcttcatggtgctggcatggatctactctgtctccatgactgtgaagagcatcgtcttggagaaggagttgcgactgaaggagaccttgaaaaatcagggtgtctccaatgcagtgatttggtgtacctggttcctggacagcttctccatcatgtcgatgagcatcttcctcctgacgatattcatcatgcatggaagaatcctacattacagcgacccattcatcctcttcctgttcttgttggctttctccactgccaccatcatgctgtgctttctgctcagcaccttcttctccaaggccagtctggcagcagcctgtagtggtgtcatctatttcaccctctacctgccacacatcctgtgcttcgcctggcaggaccgcatgaccgctgagctgaagaaggctgtgagcttactgtctccggtggcatttggatttggcactgagtacctggttcgctttgaagagcaaggcctggggctgcagtggagcaacatcgggaacagtcccacggaaggggacgaattcagcttcctgctgtccatgcagatgatgctccttgatgctgctgtctatggcttactcgcttggtaccttgatcaggtgtttccaggagactatggaaccccacttccttggtactttcttctacaagagtcgtattggcttngcggtgaagggtgttcaaccagagaagaaagagccctggaaaagaccgagcccctaacagaggaaacggaggatccagagcacccagaaggaatacacgactccttctttgaacgtgagcatccagggtgggttcctggggtatgcgtgaagaatctggtaaagatttttgagccctgtggccggccagctgtggaccgtctgaacatcaccttctacgagaaccagatcaccgcattcctgggccacaatggagctgggaaaaccaccaccttgtccatcctgacgggtctgttgccaccaacctctgggactgtgctcgttgggggaagggacattgaaaccagcctggatgcagtccggcagagccttggcatgtgtccacagcacaacatcctgttccaccacctcacggtggctgagcacatgctgttctatgcccagctgaaaggaaagtcccaggaggaggcccagctggagatggaagccatgttggaggacacaggcctccaccacaagcggaatgaagaggctcaggacctatcaggtggcatgcagagaaagctgtcggttgccattgcctttgtgggagatgccaaggtggtgattctggacgaacccacctctggggtggacccttactcgagacgctcaatctgggatctgctcctgaagtatcgctcaggcagaaccatcatcatgtccactcaccacatggacgaggccgacctccttggggaccgcattgccatcattgcccagggaaggctctactgctcaggcaccccactcttcctgaagaactgctttggcacaggcttgtacttaaccttggtgcgcaagatgaaaaacatccagagccaaaggaaaggcagtgaggggacctgcagctgctcgtctaagggtttctccaccacgtgtccagcccacgtcgatgacctaactccagaacaagtcctggatggggatgtaaatgagctgatggatgtagttctccaccatgttccagaggcaaagctggtggagtgcattggtcaagaacttatcttccttcttccaaataagaacttcaagcacagagcatatgccagccttttcagagagctggaggagacgctggctgaccttggtctcagcagttttggaatttctgacactcccctggaagagatttttctgaaggtcacggaggattctgattcaggacctctgtttgcgggtggcgctcagcagaaaagagaaaacgtcaacccccgacacccctgcttgggtcccagagagaaggctggacagacaccccaggactccaatgtctgctccccaggggcgccggctgctcacccagagggccagcctcccccagagccagagtgcccaggcccgcagctcaacacggggacacagctggtcctccagcatgtgcaggcgctgctggtcaagagattccaacacaccatccgcagccacaaggacttcctggcgcagatcgtgctcccggctacctttgtgtttttggctctgatgctttctattgttatccctccttttggcgaataccccgctttgacccttcacccctggatatatgggcagcagtacaccttcttcagcatggatgaaccaggcagtgagcagttcacggtacttgcagacgtcctcctgaataagccaggctttggcaaccgctgcctgaaggaagggtggcttccggagtacccctgtggcaactcaacaccctggaagactccttctgtgtccccaaacatcacccagctgttccagaagcagaaatggacacaggtcaacccttcaccatcctgcaggtgcagcaccagggagaagctcaccatgctgccagagtgccccgagggtgccgggggcctcccgcccccccagagaacacagcgcagcacggaaattctacaagacctgacggacaggaacatctccgacttcttggtaaaaacgtatcctgctcttataagaagcagcttaaagagcaaattctgggtcaatgaacagaggtatggaggaatttccattggaggaaagctcccagtcgtccccatcacgggggaagcacttgttgggtttttaagcgaccttggccggatcatgaatgtgagcgggggccctatcactagagaggcctctaaagaaatacctgatttccttaaacatctagaaactgaagacaacattaaggtgtggtttaataacaaaggctggcatgccctggtcagctttctcaatgtggcccacaacgccatcttacgggccagcctgcctaaggacaggagccccgaggagtatggaatcaccgtcattagccaacccctgaacctgaccaaggagcagctctcagagattacagtgctgaccacttcagtggatgctgtggttgccatctgcgtgattttctccatgtccttcgtcccagccagctttgtcctttatttgatccaggagcgggtgaacaaatccaagcacctccagtttatcagtggagtgagccccaccacctactgggtgaccaacttcctctgggacatcatgaattattccgtgagtgctgggctggtggtgggcatcttcatcgggtttcagaagaaagcctacacttctccagaaaaccttcctgcccttgtggcactgctcctgctgtatggatgggcggtcattcccatgatgtacccagcatccttcctgtttgatgtccccagcacagcctatgtggctttatcttgtgctaatctgttcatcggcatcaacagcagtgctattaccttcatcttggaattatttgagaataaccggacgctgctcaggttcaacgccgtgctgaggaagctgctcattgtcttcccccacttctgcctgggccggggcctcattgaccttgcactgagccaggctgtgacagatgtctatgcccggtttggtgaggagcactctgcaaatccgttccactgggacctgattgggaagaacctgtttgccatggtggtggaaggggtggtgtacttcctcctgaccctgctggtccagcgccacttcttcctctcccaatggattgccgagcccactaaggagcccattgttgatgaagatgatgatgtggctgaagaaagacaaagaattattactggtggaaataaaactgacatcttaaggctacatgaactaaccaagatttatccaggcacctccagcccagcagtggacaggctgtgtgtcggagttcgccctggagagtgctttggcctcctgggagtgaatggtgccggcaaaacaaccacattcaagatgctcactggggacaccacagtgacctcaggggatgccaccgtagcaggcaagagtattttaaccaatatttctgaagtccatcaaaatatgggctactgtcctcagtttgatgcaatcgatgagctgctcacaggacgagaacatctttacctttatgcccggcttcgaggtgtaccagcagaagaaatcgaaaaggttgcaaactggagtattaagagcctgggcctgactgtctacgccgactgcctggctggcacgtacagtgggggcaacaagcggaaactctccacagccatcgcactcattggctgcccaccgctggtgctgctggatgagcccaccacagggatggacccccaggcacgccgcatgctgtggaacgtcatcgtgagcatcatcagagaagggagggctgtggtcctcacatcccacagcatggaagaatgtgaggcactgtgtacccggctggccatcatggtaaagggcgcctttcgatgtatgggcaccattcagcatctcaagtccaaatttggagatggctatatcgtcacaatgaagatcaaatccccgaaggacgacctgcttcctgacctgaaccctgtggagcagttcttccaggggaacttcccaggcagtgtgcagagggagaggcactacaacatgctccagttccaggtctcctcctcctccctggcgaggatcttccagctcctcctctcccacaaggacagcctgctcatcgaggagtactcagtcacacagaccacactggaccaggtgtttgtaaattttgctaaacagcagactgaaagtcatgacctccctctgcaccctcgagctgctggagccagtcgacaagcccaggactgatctttcacaccgctcgttcctgcagccagaaaggaactctgggcagctggaggcgcaggagcctgtgcccatatggtcatccaaatggactggccagcgtaaatgaccccactgcagcagaaaacaaacacacgaggagcatgcagcgaattcagaaagaggtctttcagaaggaaaccgaaactgacttgctcacctggaacacctgatggtgaaaccaaacaaatacaaaatccttctccagaccccagaactagaaaccccgggccatcccactagcagctttggcctccatattgctctcatttcaagcagatctgcttttctgcatgtttgtctgtgtgtctgcgttgtgtgtgattttcatggaaaaataaaatgcaaatgcactcatcacaaactaaaaaaattca

SEQ ID NO: 338427 - DNA, 5672 bp, Homo sapiens
  misc_feature (2731)..(2731): n is a, c, g, or t
gccagaggcgctcttaacggcgtttatgtcctttgctgtctgaggggcctcagctctgaccaatctggtcttcgtgtggtcattagcatgggcttcgtgagacagatacagcttttgctctggaagaactggaccctgcggaaaaggcaaaagattcgctttgtggtggaactcgtgtggcctttatctttatttctggtcttgatctggttaaggaatgccaacccgctctacagccatcatgaatgccatttccccaacaaggcgatgccctcagcaggaatgctgccgtggctccaggggatcttctgcaatgtgaacaatccctgttttcaaagccccaccccaggagaatctcctggaattgtgtcaaactataacaactccatcttggcaagggtatatcgagattttcaagaactcctcatgaatgcaccagagagccagcaccttggccgtatttggacagagctacacatcttgtcccaattcatggacaccctccggactcacccggagagaattgcaggaagaggaatacgaataagggatatcttgaaagatgaagaaacactgacactatttctcattaaaaacatcggcctgtctgactcagtggtctaccttctgatcaactctcaagtccgtccagagcagttcgctcatggagtcccggacctggcgctgaaggacatcgcctgcagcgaggccctcctggagcgcttcatcatcttcagccagagacgcggggcaaagacggtgcgctatgccctgtgctccctctcccagggcaccctacagtggatagaagacactctgtatgccaacgtggacttcttcaagctcttccgtgtgcttcccacactcctagacagccgttctcaaggtatcaatctgagatcttggggaggaatattatctgatatgtcaccaagaattcaagagtttatccatcggccgagtatgcaggacttgctgtgggtgaccaggcccctcatgcagaatggtggtccagagacctttacaaagctgatgggcatcctgtctgacctcctgtgtggctaccccgagggaggtggctctcgggtgctctccttcaactggtatgaagacaataactataaggcctttctggggattgactccacaaggaaggatcctatctattcttatgacagaagaacaacatccttttgtaatgcattgatccagagcctggagtcaaatcctttaaccaaaatcgcttggagggcggcaaagcctttgctgatgggaaaaatcctgtacactcctgattcacctgcagcacgaaggatactgaagaatgccaactcaacttttgaagaactggaacacgttaggaagttggtcaaagcctgggaagaagtagggccccagatctggtacttctttgacaacagcacacagatgaacatgatcagagataccctggggaacccaacagtaaaagactttttgaataggcagcttggtgaagaaggtattactgctgaagccatcctaaacttcctctacaagggccctcgggaaagccaggctgacgacatggccaacttcgactggagggacatatttaacatcactgatcgcaccctccgcctggtcaatcaatacctggagtgcttggtcctggataagtttgaaagctacaatgatgaaactcagctcacccaacgtgccctctctctactggaggaaaacatgttctgggccggagtggtattccctgacatgtatccctggaccagctctctaccaccccacgtgaagtataagatccgaatggacatagacgtggtggagaaaaccaataagattaaagacaggtattgggattctggtcccagagctgatcccgtggaagatttccggtacatctggggcgggtttgcctatctgcaggacatggttgaacaggggatcacaaggagccaggtgcaggcggaggctccagttggaatctacctccagcagatgccctacccctgcttcgtggacgattctttcatgatcatcctgaaccgctgtttccctatcttcatggtgctggcatggatctactctgtctccatgactgtgaagagcatcgtcttggagaaggagttgcgactgaaggagaccttgaaaaatcagggtgtctccaatgcagtgatttggtgtacctggttcctggacagcttctccatcatgtcgatgagcatcttcctcctgacgatattcatcatgcatggaagaatcctacattacagcgacccattcatcctcttcctgttcttgttggctttctccactgccaccatcatgctgtgctttctgctcagcaccttcttctccaaggccagtctggcagcagcctgtagtggtgtcatctatttcaccctctacctgccacacatcctgtgcttcgcctggcaggaccgcatgaccgctgagctgaagaaggctgtgagcttactgtctccggtggcatttggatttggcactgagtacctggttcgctttgaagagcaaggcctggggctgcagtggagcaacatcgggaacagtcccacggaaggggacgaattcagcttcctgctgtccatgcagatgatgctccttgatgctgctgtctatggcttactcgcttggtaccttgatcaggtgtttccaggagactatggaaccccacttccttggtactttcttctacaagagtcgtattggcttngcggtgaagggtgttcaaccagagaagaaagagccctggaaaagaccgagcccctaacagaggaaacggaggatccagagcacccagaaggaatacacgactccttctttgaacgtgagcatccagggtgggttcctggggtatgcgtgaagaatctggtaaagatttttgagccctgtggccggccagctgtggaccgtctgaacatcaccttctacgagaaccagatcaccgcattcctgggccacaatggagctgggaaaaccaccaccttgtccatcctgacgggtctgttgccaccaacctctgggactacgtatcctgctcttataagaagcagcttaaagagcaaattctgggtcaatgaacagaggtatggaggaatttccattggaggaaagctcccagtcgtccccatcacgggggaagcacttgttgggtttttaagcgaccttggccggatcatgaatgtgagcgggggccctatcactagagaggcctctaaagaaatacctgatttccttaaacatctagaaactgaagacaacattaaggtgtggtttaataacaaaggctggcatgccctggtcagctttctcaatgtggcccacaacgccatcttacgggccagcctgcctaaggacaggagccccgaggagtatggaatcaccgtcattagccaacccctgaacctgaccaaggagcagctctcagagattacagtgctgaccacttcagtggatgctgtggttgccatctgcgtgattttctccatgtccttcgtcccagccagctttgtcctttatttgatccaggagcgggtgaacaaatccaagcacctccagtttatcagtggagtgagccccaccacctactgggtgaccaacttcctctgggacatcatgaattattccgtgagtgctgggctggtggtgggcatcttcatcgggtttcagaagaaagcctacacttctccagaaaaccttcctgcccttgtggcactgctcctgctgtatggatgggcggtcattcccatgatgtacccagcatccttcctgtttgatgtccccagcacagcctatgtggctttatcttgtgctaatctgttcatcggcatcaacagcagtgctattaccttcatcttggaattatttgagaataaccggacgctgctcaggttcaacgccgtgctgaggaagctgctcattgtcttcccccacttctgcctgggccggggcctcattgaccttgcactgagccaggctgtgacagatgtctatgcccggtttggtgaggagcactctgcaaatccgttccactgggacctgattgggaagaacctgtttgccatggtggtggaaggggtggtgtacttcctcctgaccctgctggtccagcgccacttcttcctctcccaatggattgccgagcccactaaggagcccattgttgatgaagatgatgatgtggctgaagaaagacaaagaattattactggtggaaataaaactgacatcttaaggctacatgaactaaccaagatttatccaggcacctccagcccagcagtggacaggctgtgtgtcggagttcgccctggagagtgctttggcctcctgggagtgaatggtgccggcaaaacaaccacattcaagatgctcactggggacaccacagtgacctcaggggatgccaccgtagcaggcaagagtattttaaccaatatttctgaagtccatcaaaatatgggctactgtcctcagtttgatgcaatcgatgagctgctcacaggacgagaacatctttacctttatgcccggcttcgaggtgtaccagcagaagaaatcgaaaaggttgcaaactggagtattaagagcctgggcctgactgtctacgccgactgcctggctggcacgtacagtgggggcaacaagcggaaactctccacagccatcgcactcattggctgcccaccgctggtgctgctggatgagcccaccacagggatggacccccaggcacgccgcatgctgtggaacgtcatcgtgagcatcatcagagaagggagggctgtggtcctcacatcccacagcatggaagaatgtgaggcactgtgtacccggctggccatcatggtaaagggcgcctttcgatgtatgggcaccattcagcatctcaagtccaaatttggagatggctatatcgtcacaatgaagatcaaatccccgaaggacgacctgcttcctgacctgaaccctgtggagcagttcttccaggggaacttcccaggcagtgtgcagagggagaggcactacaacatgctccagttccaggtctcctcctcctccctggcgaggatcttccagctcctcctctcccacaaggacagcctgctcatcgaggagtactcagtcacacagaccacactggaccaggtgtttgtaaattttgctaaacagcagactgaaagtcatgacctccctctgcaccctcgagctgctggagccagtcgacaagcccaggactgatctttcacaccgctcgttcctgcagccagaaaggaactctgggcagctggaggcgcaggagcctgtgcccatatggtcatccaaatggactggccagcgtaaatgaccccactgcagcagaaaacaaacacacgaggagcatgcagcgaattcagaaagaggtctttcagaaggaaaccgaaactgacttgctcacctggaacacctgatggtgaaaccaaacaaatacaaaatccttctccagaccccagaactagaaaccccgggccatcccactagcagctttggcctccatattgctctcatttcaagcagatctgcttttctgcatgtttgtctgtgtgtctgcgttgtgtgtgattttcatggaaaaataaaatgcaaatgcactcatcacaaactaaaaaaattca

SEQ ID NO: 338428 - DNA, 2729 bp, Homo sapiens
gctcgccgagagacagggaggggagtgtggcagagaacacagcgcagcacggaaattctacaagacctgacggacaggaacatctccgacttcttggtaaaaacgtatcctgctcttataagaagcagcttaaagagcaaattctgggtcaatgaacagaggtatggaggaatttccattggaggaaagctcccagtcgtccccatcacgggggaagcacttgttgggtttttaagcgaccttggccggatcatgaatgtgagcgggggccctatcactagagaggcctctaaagaaatacctgatttccttaaacatctagaaactgaagacaacattaaggtgtggtttaataacaaaggctggcatgccctggtcagctttctcaatgtggcccacaacgccatcttacgggccagcctgcctaaggacaggagccccgaggagtatggaatcaccgtcattagccaacccctgaacctgaccaaggagcagctctcagagattacagtgctgaccacttcagtggatgctgtggttgccatctgcgtgattttctccatgtccttcgtcccagccagctttgtcctttatttgatccaggagcgggtgaacaaatccaagcacctccagtttatcagtggagtgagccccaccacctactgggtgaccaacttcctctgggacatcatgaattattccgtgagtgctgggctggtggtgggcatcttcatcgggtttcagaagaaagcctacacttctccagaaaaccttcctgcccttgtggcactgctcctgctgtatggatgggcggtcattcccatgatgtacccagcatccttcctgtttgatgtccccagcacagcctatgtggctttatcttgtgctaatctgttcatcggcatcaacagcagtgctattaccttcatcttggaattatttgagaataaccggacgctgctcaggttcaacgccgtgctgaggaagctgctcattgtcttcccccacttctgcctgggccggggcctcattgaccttgcactgagccaggctgtgacagatgtctatgcccggtttggtgaggagcactctgcaaatccgttccactgggacctgattgggaagaacctgtttgccatggtggtggaaggggtggtgtacttcctcctgaccctgctggtccagcgccacttcttcctctcccaatggattgccgagcccactaaggagcccattgttgatgaagatgatgatgtggctgaagaaagacaaagaattattactggtggaaataaaactgacatcttaaggctacatgaactaaccaagatttatccaggcacctccagcccagcagtggacaggctgtgtgtcggagttcgccctggagagtgctttggcctcctgggagtgaatggtgccggcaaaacaaccacattcaagatgctcactggggacaccacagtgacctcaggggatgccaccgtagcaggcaagagtattttaaccaatatttctgaagtccatcaaaatatgggctactgtcctcagtttgatgcaatcgatgagctgctcacaggacgagaacatctttacctttatgcccggcttcgaggtgtaccagcagaagaaatcgaaaaggttgcaaactggagtattaagagcctgggcctgactgtctacgccgactgcctggctggcacgtacagtgggggcaacaagcggaaactctccacagccatcgcactcattggctgcccaccgctggtgctgctggatgagcccaccacagggatggacccccaggcacgccgcatgctgtggaacgtcatcgtgagcatcatcagagaagggagggctgtggtcctcacatcccacagcatggaagaatgtgaggcactgtgtacccggctggccatcatggtaaagggcgcctttcgatgtatgggcaccattcagcatctcaagtccaaatttggagatggctatatcgtcacaatgaagatcaaatccccgaaggacgacctgcttcctgacctgaaccctgtggagcagttcttccaggggaacttcccaggcagtgtgcagagggagaggcactacaacatgctccagttccaggtctcctcctcctccctggcgaggatcttccagctcctcctctcccacaaggacagcctgctcatcgaggagtactcagtcacacagaccacactggaccaggtgtttgtaaattttgctaaacagcagactgaaagtcatgacctccctctgcaccctcgagctgctggagccagtcgacaagcccaggactgatctttcacaccgctcgttcctgcagccagaaaggaactctgggcagctggaggcgcaggagcctgtgcccatatggtcatccaaatggactggccagcgtaaatgaccccactgcagcagaaaacaaacacacgaggagcatgcagcgaattcagaaagaggtctttcagaaggaaaccgaaactgacttgctcacctggaacacctgatggtgaaaccaaacaaatacaaaatccttctccagaccccagaactagaaaccccgggccatcccactagcagctttggcctccatattgctctcatttcaagcagatctgcttttctgcatgtttgtctgtgtgtctgcgttgtgtgtgattttcatggaaaaataaaatgcaaatgcactcatcacaaactaaaaaaattca

SEQ ID NO: 338429 - DNA, 5069 bp, Homo sapiens
  misc_feature (2731)..(2731): n is a, c, g, or t
gccagaggcgctcttaacggcgtttatgtcctttgctgtctgaggggcctcagctctgaccaatctggtcttcgtgtggtcattagcatgggcttcgtgagacagatacagcttttgctctggaagaactggaccctgcggaaaaggcaaaagattcgctttgtggtggaactcgtgtggcctttatctttatttctggtcttgatctggttaaggaatgccaacccgctctacagccatcatgaatgccatttccccaacaaggcgatgccctcagcaggaatgctgccgtggctccaggggatcttctgcaatgtgaacaatccctgttttcaaagccccaccccaggagaatctcctggaattgtgtcaaactataacaactccatcttggcaagggtatatcgagattttcaagaactcctcatgaatgcaccagagagccagcaccttggccgtatttggacagagctacacatcttgtcccaattcatggacaccctccggactcacccggagagaattgcaggaagaggaatacgaataagggatatcttgaaagatgaagaaacactgacactatttctcattaaaaacatcggcctgtctgactcagtggtctaccttctgatcaactctcaagtccgtccagagcagttcgctcatggagtcccggacctggcgctgaaggacatcgcctgcagcgaggccctcctggagcgcttcatcatcttcagccagagacgcggggcaaagacggtgcgctatgccctgtgctccctctcccagggcaccctacagtggatagaagacactctgtatgccaacgtggacttcttcaagctcttccgtgtgcttcccacactcctagacagccgttctcaaggtatcaatctgagatcttggggaggaatattatctgatatgtcaccaagaattcaagagtttatccatcggccgagtatgcaggacttgctgtgggtgaccaggcccctcatgcagaatggtggtccagagacctttacaaagctgatgggcatcctgtctgacctcctgtgtggctaccccgagggaggtggctctcgggtgctctccttcaactggtatgaagacaataactataaggcctttctggggattgactccacaaggaaggatcctatctattcttatgacagaagaacaacatccttttgtaatgcattgatccagagcctggagtcaaatcctttaaccaaaatcgcttggagggcggcaaagcctttgctgatgggaaaaatcctgtacactcctgattcacctgcagcacgaaggatactgaagaatgccaactcaacttttgaagaactggaacacgttaggaagttggtcaaagcctgggaagaagtagggccccagatctggtacttctttgacaacagcacacagatgaacatgatcagagataccctggggaacccaacagtaaaagactttttgaataggcagcttggtgaagaaggtattactgctgaagccatcctaaacttcctctacaagggccctcgggaaagccaggctgacgacatggccaacttcgactggagggacatatttaacatcactgatcgcaccctccgcctggtcaatcaatacctggagtgcttggtcctggataagtttgaaagctacaatgatgaaactcagctcacccaacgtgccctctctctactggaggaaaacatgttctgggccggagtggtattccctgacatgtatccctggaccagctctctaccaccccacgtgaagtataagatccgaatggacatagacgtggtggagaaaaccaataagattaaagacaggtattgggattctggtcccagagctgatcccgtggaagatttccggtacatctggggcgggtttgcctatctgcaggacatggttgaacaggggatcacaaggagccaggtgcaggcggaggctccagttggaatctacctccagcagatgccctacccctgcttcgtggacgattctttcatgatcatcctgaaccgctgtttccctatcttcatggtgctggcatggatctactctgtctccatgactgtgaagagcatcgtcttggagaaggagttgcgactgaaggagaccttgaaaaatcagggtgtctccaatgcagtgatttggtgtacctggttcctggacagcttctccatcatgtcgatgagcatcttcctcctgacgatattcatcatgcatggaagaatcctacattacagcgacccattcatcctcttcctgttcttgttggctttctccactgccaccatcatgctgtgctttctgctcagcaccttcttctccaaggccagtctggcagcagcctgtagtggtgtcatctatttcaccctctacctgccacacatcctgtgcttcgcctggcaggaccgcatgaccgctgagctgaagaaggctgtgagcttactgtctccggtggcatttggatttggcactgagtacctggttcgctttgaagagcaaggcctggggctgcagtggagcaacatcgggaacagtcccacggaaggggacgaattcagcttcctgctgtccatgcagatgatgctccttgatgctgctgtctatggcttactcgcttggtaccttgatcaggtgtttccaggagactatggaaccccacttccttggtactttcttctacaagagtcgtattggcttngcggtgaagggtgttcaaccagagaagaaagagccctggaaaagaccgagcccctaacagaggaaacggaggatccagagcacccagaaggaatacacgactccttctttgaacgtgagcatccagggtgggttcctggggtatgcgtgaagaatctggtaaagatttttgagccctgtggccggccagctgtggaccgtctgaacatcaccttctacgagaaccagatcaccgcattcctgggccacaatggagctgggaaaaccaccaccttgtccatcctgacgggtctgttgccaccaacctctgggactacgtatcctgctcttataagaagcagcttaaagagcaaattctgggtcaatgaacagaggtatggaggaatttccattggaggaaagctcccagtcgtccccatcacgggggaagcacttgttgggtttttaagcgaccttggccggatcatgaatgtgagcgggggccctatcactagagaggcctctaaagaaatacctgatttccttaaacatctagaaactgaagacaacattaaggtgtggtttaataacaaaggctggcatgccctggtcagctttctcaatgtggcccacaacgccatcttacgggccagcctgcctaaggacaggagccccgaggagtatggaatcaccgtcattagccaacccctgaacctgaccaaggagcagctctcagagattacagtgctgaccacttcagtggatgctgtggttgccatctgcgtgattttctccatgtccttcgtcccagccagctttgtcctttatttgatccaggagcgggtgaacaaatccaagcacctccagtttatcagtggagtgagccccaccacctactgggtgaccaacttcctctgggacatcatgaattattccgtgagtgctgggctggtggtgggcatcttcatcgggtttcagaagaaagcctacacttctccagaaaaccttcctgcccttgtggcactgctcctgctgtatggatgggcggtcattcccatgatgtacccagcatccttcctgtttgatgtccccagcacagcctatgtggctttatcttgtgctaatctgttcatcggcatcaacagcagtgctattaccttcatcttggaattatttgagaataaccggacgctgctcaggttcaacgccgtgctgaggaagctgctcattgtcttcccccacttctgcctgggccggggcctcattgaccttgcactgagccaggctgtgacagatgtctatgcccggtttggtgaggagcactctgcaaatccgttccactgggacctgattgggaagaacctgtttgccatggtggtggaaggggtggtgtacttcctcctgaccctgctggtccagcgccacttcttcctctcccaatggattgccgagcccactaaggagcccattgttgatgaagatgatgatgtggctgaagaaagacaaagaattattactggtggaaataaaactgacatcttaaggctacatgaactaaccaagatttatccaggcacctccagcccagcagtggacaggctgtgtgtcggagttcgccctggagagtgctttggcctcctgggagtgaatggtgccggcaaaacaaccacattcaagatgctcactggggacaccacagtgacctcaggggatgccaccgtagcaggcaagagtattttaaccaatatttctgaagtccatcaaaatatgggctactgtcctcagtttgatgcaatcgatgagctgctcacaggacgagaacatctttacctttatgcccggcttcgaggtgtaccagcagaagaaatcgaaaaggttgcaaactggagtattaagagcctgggcctgactgtctacgccgactgcctggctggcacgtacagtgggggcaacaagcggaaactctccacagccatcgcactcattggctgcccaccgctggtgctgctggtaactgcgggcttgggcccaccaagggcttaaaccaagtgctgggtctcttgggttggggaaataggttctgggtcggcagatttagaaactgcagcagtttggctttagtctggactgtttcctgtgttgctcattttgagcgatcagcccagtgtttggttcacacagctccggagaaaaacaagtcacggcacagccttgacttgggactgcgcacatcctgcgttcccaggatgtctcctgtggggccatcggctcacagccgggaaagttcagcccactctgcggcctgtcggtgtctggtccccatacaggagcactgagctgggtcaaaggctcctgagctg

SEQ ID NO: 338430 - DNA, 4872 bp, Homo sapiens
  misc_feature (2731)..(2731): n is a, c, g, or t
  misc_feature (4759)..(4759): n is a, c, g, or t
  misc_feature (4770)..(4770): n is a, c, g, or t
  misc_feature (4783)..(4783): n is a, c, g, or t
  misc_feature (4791)..(4792): n is a, c, g, or t
  misc_feature (4794)..(4794): n is a, c, g, or t
  misc_feature (4813)..(4813): n is a, c, g, or t
  misc_feature (4821)..(4821): n is a, c, g, or t
  misc_feature (4823)..(4823): n is a, c, g, or t
  misc_feature (4838)..(4838): n is a, c, g, or t
gccagaggcgctcttaacggcgtttatgtcctttgctgtctgaggggcctcagctctgaccaatctggtcttcgtgtggtcattagcatgggcttcgtgagacagatacagcttttgctctggaagaactggaccctgcggaaaaggcaaaagattcgctttgtggtggaactcgtgtggcctttatctttatttctggtcttgatctggttaaggaatgccaacccgctctacagccatcatgaatgccatttccccaacaaggcgatgccctcagcaggaatgctgccgtggctccaggggatcttctgcaatgtgaacaatccctgttttcaaagccccaccccaggagaatctcctggaattgtgtcaaactataacaactccatcttggcaagggtatatcgagattttcaagaactcctcatgaatgcaccagagagccagcaccttggccgtatttggacagagctacacatcttgtcccaattcatggacaccctccggactcacccggagagaattgcaggaagaggaatacgaataagggatatcttgaaagatgaagaaacactgacactatttctcattaaaaacatcggcctgtctgactcagtggtctaccttctgatcaactctcaagtccgtccagagcagttcgctcatggagtcccggacctggcgctgaaggacatcgcctgcagcgaggccctcctggagcgcttcatcatcttcagccagagacgcggggcaaagacggtgcgctatgccctgtgctccctctcccagggcaccctacagtggatagaagacactctgtatgccaacgtggacttcttcaagctcttccgtgtgcttcccacactcctagacagccgttctcaaggtatcaatctgagatcttggggaggaatattatctgatatgtcaccaagaattcaagagtttatccatcggccgagtatgcaggacttgctgtgggtgaccaggcccctcatgcagaatggtggtccagagacctttacaaagctgatgggcatcctgtctgacctcctgtgtggctaccccgagggaggtggctctcgggtgctctccttcaactggtatgaagacaataactataaggcctttctggggattgactccacaaggaaggatcctatctattcttatgacagaagaacaacatccttttgtaatgcattgatccagagcctggagtcaaatcctttaaccaaaatcgcttggagggcggcaaagcctttgctgatgggaaaaatcctgtacactcctgattcacctgcagcacgaaggatactgaagaatgccaactcaacttttgaagaactggaacacgttaggaagttggtcaaagcctgggaagaagtagggccccagatctggtacttctttgacaacagcacacagatgaacatgatcagagataccctggggaacccaacagtaaaagactttttgaataggcagcttggtgaagaaggtattactgctgaagccatcctaaacttcctctacaagggccctcgggaaagccaggctgacgacatggccaacttcgactggagggacatatttaacatcactgatcgcaccctccgcctggtcaatcaatacctggagtgcttggtcctggataagtttgaaagctacaatgatgaaactcagctcacccaacgtgccctctctctactggaggaaaacatgttctgggccggagtggtattccctgacatgtatccctggaccagctctctaccaccccacgtgaagtataagatccgaatggacatagacgtggtggagaaaaccaataagattaaagacaggtattgggattctggtcccagagctgatcccgtggaagatttccggtacatctggggcgggtttgcctatctgcaggacatggttgaacaggggatcacaaggagccaggtgcaggcggaggctccagttggaatctacctccagcagatgccctacccctgcttcgtggacgattctttcatgatcatcctgaaccgctgtttccctatcttcatggtgctggcatggatctactctgtctccatgactgtgaagagcatcgtcttggagaaggagttgcgactgaaggagaccttgaaaaatcagggtgtctccaatgcagtgatttggtgtacctggttcctggacagcttctccatcatgtcgatgagcatcttcctcctgacgatattcatcatgcatggaagaatcctacattacagcgacccattcatcctcttcctgttcttgttggctttctccactgccaccatcatgctgtgctttctgctcagcaccttcttctccaaggccagtctggcagcagcctgtagtggtgtcatctatttcaccctctacctgccacacatcctgtgcttcgcctggcaggaccgcatgaccgctgagctgaagaaggctgtgagcttactgtctccggtggcatttggatttggcactgagtacctggttcgctttgaagagcaaggcctggggctgcagtggagcaacatcgggaacagtcccacggaaggggacgaattcagcttcctgctgtccatgcagatgatgctccttgatgctgctgtctatggcttactcgcttggtaccttgatcaggtgtttccaggagactatggaaccccacttccttggtactttcttctacaagagtcgtattggcttngcggtgaagggtgttcaaccagagaagaaagagccctggaaaagaccgagcccctaacagaggaaacggaggatccagagcacccagaaggaatacacgactccttctttgaacgtgagcatccagggtgggttcctggggtatgcgtgaagaatctggtaaagatttttgagccctgtggccggccagctgtggaccgtctgaacatcaccttctacgagaaccagatcaccgcattcctgggccacaatggagctgggaaaaccaccaccttgtccatcctgacgggtctgttgccaccaacctctgggactacgtatcctgctcttataagaagcagcttaaagagcaaattctgggtcaatgaacagaggtatggaggaatttccattggaggaaagctcccagtcgtccccatcacgggggaagcacttgttgggtttttaagcgaccttggccggatcatgaatgtgagcgggggccctatcactagagaggcctctaaagaaatacctgatttccttaaacatctagaaactgaagacaacattaaggtgtggtttaataacaaaggctggcatgccctggtcagctttctcaatgtggcccacaacgccatcttacgggccagcctgcctaaggacaggagccccgaggagtatggaatcaccgtcattagccaacccctgaacctgaccaaggagcagctctcagagattacagtgctgaccacttcagtggatgctgtggttgccatctgcgtgattttctccatgtccttcgtcccagccagctttgtcctttatttgatccaggagcgggtgaacaaatccaagcacctccagtttatcagtggagtgagccccaccacctactgggtgaccaacttcctctgggacatcatgaattattccgtgagtgctgggctggtggtgggcatcttcatcgggtttcagaagaaagcctacacttctccagaaaaccttcctgcccttgtggcactgctcctgctgtatggatgggcggtcattcccatgatgtacccagcatccttcctgtttgatgtccccagcacagcctatgtggctttatcttgtgctaatctgttcatcggcatcaacagcagtgctattaccttcatcttggaattatttgagaataaccggacgctgctcaggttcaacgccgtgctgaggaagctgctcattgtcttcccccacttctgcctgggccggggcctcattgaccttgcactgagccaggctgtgacagatgtctatgcccggtttggtgaggagcactctgcaaatccgttccactgggacctgattgggaagaacctgtttgccatggtggtggaaggggtggtgtacttcctcctgaccctgctggtccagcgccacttcttcctctcccaatggattgccgagcccactaaggagcccattgttgatgaagatgatgatgtggctgaagaaagacaaagaattattactggtggaaataaaactgacatcttaaggctacatgaactaaccaagatttatccaggcacctccagcccagcagtggacaggctgtgtgtcggagttcgccctggagagtgctttggcctcctgggagtgaatggtgccggcaaaacaaccacattcaagatgctcactggggacaccacagtgacctcaggggatgccaccgtagcaggcaagagtattttaaccaatatttctgaagtccatcaaaatatgggctactgtcctcagtttgatgcaatcgatgagctgctcacaggacgagaacatctttacctttatgcccggcttcgaggtgtaccagcagaagaaatcgaaaaggttgcaaactggagtattaagagcctgggcctgactgtctacgccgactgcctggctggcacgtacagtgggggcaacaagcggaaactctccacagccatcgcactcattggctgcccaccgctggtgctgctggtgagccaccaaagggttggccccaggaacgcgattttgnggacgcatcgnaaaatcacagggnggggggtnngncccaatcccaggatggagntttaggantntcccgttgcacaggnaagggcctcggttttgaacacaaattaagcaatt

SEQ ID NO: 338431 - DNA, 3649 bp, Homo sapiens
  misc_feature (2731)..(2731): n is a, c, g, or t
gccagaggcgctcttaacggcgtttatgtcctttgctgtctgaggggcctcagctctgaccaatctggtcttcgtgtggtcattagcatgggcttcgtgagacagatacagcttttgctctggaagaactggaccctgcggaaaaggcaaaagattcgctttgtggtggaactcgtgtggcctttatctttatttctggtcttgatctggttaaggaatgccaacccgctctacagccatcatgaatgccatttccccaacaaggcgatgccctcagcaggaatgctgccgtggctccaggggatcttctgcaatgtgaacaatccctgttttcaaagccccaccccaggagaatctcctggaattgtgtcaaactataacaactccatcttggcaagggtatatcgagattttcaagaactcctcatgaatgcaccagagagccagcaccttggccgtatttggacagagctacacatcttgtcccaattcatggacaccctccggactcacccggagagaattgcaggaagaggaatacgaataagggatatcttgaaagatgaagaaacactgacactatttctcattaaaaacatcggcctgtctgactcagtggtctaccttctgatcaactctcaagtccgtccagagcagttcgctcatggagtcccggacctggcgctgaaggacatcgcctgcagcgaggccctcctggagcgcttcatcatcttcagccagagacgcggggcaaagacggtgcgctatgccctgtgctccctctcccagggcaccctacagtggatagaagacactctgtatgccaacgtggacttcttcaagctcttccgtgtgcttcccacactcctagacagccgttctcaaggtatcaatctgagatcttggggaggaatattatctgatatgtcaccaagaattcaagagtttatccatcggccgagtatgcaggacttgctgtgggtgaccaggcccctcatgcagaatggtggtccagagacctttacaaagctgatgggcatcctgtctgacctcctgtgtggctaccccgagggaggtggctctcgggtgctctccttcaactggtatgaagacaataactataaggcctttctggggattgactccacaaggaaggatcctatctattcttatgacagaagaacaacatccttttgtaatgcattgatccagagcctggagtcaaatcctttaaccaaaatcgcttggagggcggcaaagcctttgctgatgggaaaaatcctgtacactcctgattcacctgcagcacgaaggatactgaagaatgccaactcaacttttgaagaactggaacacgttaggaagttggtcaaagcctgggaagaagtagggccccagatctggtacttctttgacaacagcacacagatgaacatgatcagagataccctggggaacccaacagtaaaagactttttgaataggcagcttggtgaagaaggtattactgctgaagccatcctaaacttcctctacaagggccctcgggaaagccaggctgacgacatggccaacttcgactggagggacatatttaacatcactgatcgcaccctccgcctggtcaatcaatacctggagtgcttggtcctggataagtttgaaagctacaatgatgaaactcagctcacccaacgtgccctctctctactggaggaaaacatgttctgggccggagtggtattccctgacatgtatccctggaccagctctctaccaccccacgtgaagtataagatccgaatggacatagacgtggtggagaaaaccaataagattaaagacaggtattgggattctggtcccagagctgatcccgtggaagatttccggtacatctggggcgggtttgcctatctgcaggacatggttgaacaggggatcacaaggagccaggtgcaggcggaggctccagttggaatctacctccagcagatgccctacccctgcttcgtggacgattctttcatgatcatcctgaaccgctgtttccctatcttcatggtgctggcatggatctactctgtctccatgactgtgaagagcatcgtcttggagaaggagttgcgactgaaggagaccttgaaaaatcagggtgtctccaatgcagtgatttggtgtacctggttcctggacagcttctccatcatgtcgatgagcatcttcctcctgacgatattcatcatgcatggaagaatcctacattacagcgacccattcatcctcttcctgttcttgttggctttctccactgccaccatcatgctgtgctttctgctcagcaccttcttctccaaggccagtctggcagcagcctgtagtggtgtcatctatttcaccctctacctgccacacatcctgtgcttcgcctggcaggaccgcatgaccgctgagctgaagaaggctgtgagcttactgtctccggtggcatttggatttggcactgagtacctggttcgctttgaagagcaaggcctggggctgcagtggagcaacatcgggaacagtcccacggaaggggacgaattcagcttcctgctgtccatgcagatgatgctccttgatgctgctgtctatggcttactcgcttggtaccttgatcaggtgtttccaggagactatggaaccccacttccttggtactttcttctacaagagtcgtattggcttngcggtgaagggtgttcaaccagagaagaaagagccctggaaaagaccgagcccctaacagaggaaacggaggatccagagcacccagaaggaatacacgactccttctttgaacgtgagcatccagggtgggttcctggggtatgcgtgaagaatctggtaaagatttttgagccctgtggccggccagctgtggaccgtctgaacatcaccttctacgagaaccagatcaccgcattcctgggccacaatggagctgggaaaaccaccaccttgtccatcctgacgggtctgttgccaccaacctctgggactacgtatcctgctcttataagaagcagcttaaagagcaaattctgggtcaatgaacagaggtatggaggaatttccattggaggaaagctcccagtcgtccccatcacgggggaagcacttgttgggtttttaagcgaccttggccggatcatgaatgtgagcgggggccctatcactagagaggcctctaaagaaatacctgatttccttaaacatctagaaactgaagacaacattaaggtgtggtttaataacaaaggctggcatgccctggtcagctttctcaatgtggcccacaacgccatcttacgggccagcctgcctaaggacaggagccccgaggagtatggaatcaccgtcattagccaacccctgaacctgaccaaggagcagctctcagagattacagtgctgaccacttcagtggatgctgtggttgccatctgcgtgattttctccatgtccttcgtcccagccagctttgtcctttatttgatccaggagcgggtgaacaaatccaagcacctccagtttatcagtggagtgagccccaccacctactgggtgaccaacttcctctgggacatcgtaagtgtcagtttac

SEQ ID NO: 338432 - DNA, 286 bp, Homo sapiens
tatatccagacgtattgtaggtggaatggaatgtggaactccatcactctgagttgtctcatttcacacagatgggcggtcattcccatgatgtacccagcatccttcctgtttgatgtccccagcacagcctatgtggctttatcttgtgctaatctgttcatcggcatcaacagcagtgctattaccttcatcttggaattatttgagaataaccgggtgagcataactttcttggcttttttgtttgattagtaggatagtagagtatgtgttggtcgagcag

SEQ ID NO: 338433 - DNA, 383 bp, Homo sapiens
tcccagaagtgcatgctttacgaacatatgcttctctccctagggccaccttgagtgaaaccctcccatgctggaattgggccctttcagtgacaacacacaacagttttcaatagataataatcccaagggctttactagcacatgaaacacagggaaaacgtgtaaagttcacaagaaagtcgttccagtgtatcaaatctatcctgtttgccaggtggatataccagggtctcctccacctgtgcatggctggtggtgggtccagtggctgttggataactgatgtattgatggatcattcgccttctgaaagtgccaaactgattagttattttgtgtgtctttttgtgtaactagggtttgaccttccagggcagact

SEQ ID NO: 338434 - DNA, 479 bp, Homo sapiens
acgtgtaaagttcacaagaaagtcgttccagtgtatcaaatctatcctgtttgccagtttcatgatcatcctgaaccgctgtttccctatcttcatggtgctggcatggatctactctgtctccatgactgtgaagagcatcgtcttggagaaggagttgcgactgaaggagaccttgaaaaatcagggtgtctccaatgcagtgatttggtgtacctggttcctggacagcttctccatcatgtcgatgagcatcttcctcctgacgatattcatcatggaagtgctgtaccacactaggcagtgtgtgtagtgaccacagactggctgagtgtctcccatcccatgctggcccatatctggtacccacctgatccacaaatgttccatcagatcctgttcaaacaacacatctccagttaagccaaatcttgccctttctccttacggtaaaatgtactaaatctgaaggttttgtc

SEQ ID NO: 338435 - DNA, 5231 bp, Homo sapiens
  misc_feature (2731)..(2731): n is a, c, g, or t
gccagaggcgctcttaacggcgtttatgtcctttgctgtctgaggggcctcagctctgaccaatctggtcttcgtgtggtcattagcatgggcttcgtgagacagatacagcttttgctctggaagaactggaccctgcggaaaaggcaaaagattcgctttgtggtggaactcgtgtggcctttatctttatttctggtcttgatctggttaaggaatgccaacccgctctacagccatcatgaatgccatttccccaacaaggcgatgccctcagcaggaatgctgccgtggctccaggggatcttctgcaatgtgaacaatccctgttttcaaagccccaccccaggagaatctcctggaattgtgtcaaactataacaactccatcttggcaagggtatatcgagattttcaagaactcctcatgaatgcaccagagagccagcaccttggccgtatttggacagagctacacatcttgtcccaattcatggacaccctccggactcacccggagagaattgcaggaagaggaatacgaataagggatatcttgaaagatgaagaaacactgacactatttctcattaaaaacatcggcctgtctgactcagtggtctaccttctgatcaactctcaagtccgtccagagcagttcgctcatggagtcccggacctggcgctgaaggacatcgcctgcagcgaggccctcctggagcgcttcatcatcttcagccagagacgcggggcaaagacggtgcgctatgccctgtgctccctctcccagggcaccctacagtggatagaagacactctgtatgccaacgtggacttcttcaagctcttccgtgtgcttcccacactcctagacagccgttctcaaggtatcaatctgagatcttggggaggaatattatctgatatgtcaccaagaattcaagagtttatccatcggccgagtatgcaggacttgctgtgggtgaccaggcccctcatgcagaatggtggtccagagacctttacaaagctgatgggcatcctgtctgacctcctgtgtggctaccccgagggaggtggctctcgggtgctctccttcaactggtatgaagacaataactataaggcctttctggggattgactccacaaggaaggatcctatctattcttatgacagaagaacaacatccttttgtaatgcattgatccagagcctggagtcaaatcctttaaccaaaatcgcttggagggcggcaaagcctttgctgatgggaaaaatcctgtacactcctgattcacctgcagcacgaaggatactgaagaatgccaactcaacttttgaagaactggaacacgttaggaagttggtcaaagcctgggaagaagtagggccccagatctggtacttctttgacaacagcacacagatgaacatgatcagagataccctggggaacccaacagtaaaagactttttgaataggcagcttggtgaagaaggtattactgctgaagccatcctaaacttcctctacaagggccctcgggaaagccaggctgacgacatggccaacttcgactggagggacatatttaacatcactgatcgcaccctccgcctggtcaatcaatacctggagtgcttggtcctggataagtttgaaagctacaatgatgaaactcagctcacccaacgtgccctctctctactggaggaaaacatgttctgggccggagtggtattccctgacatgtatccctggaccagctctctaccaccccacgtgaagtataagatccgaatggacatagacgtggtggagaaaaccaataagattaaagacaggtattgggattctggtcccagagctgatcccgtggaagatttccggtacatctggggcgggtttgcctatctgcaggacatggttgaacaggggatcacaaggagccaggtgcaggcggaggctccagttggaatctacctccagcagatgccctacccctgcttcgtggacgattctttcatgatcatcctgaaccgctgtttccctatcttcatggtgctggcatggatctactctgtctccatgactgtgaagagcatcgtcttggagaaggagttgcgactgaaggagaccttgaaaaatcagggtgtctccaatgcagtgatttggtgtacctggttcctggacagcttctccatcatgtcgatgagcatcttcctcctgacgatattcatcatgcatggaagaatcctacattacagcgacccattcatcctcttcctgttcttgttggctttctccactgccaccatcatgctgtgctttctgctcagcaccttcttctccaaggccagtctggcagcagcctgtagtggtgtcatctatttcaccctctacctgccacacatcctgtgcttcgcctggcaggaccgcatgaccgctgagctgaagaaggctgtgagcttactgtctccggtggcatttggatttggcactgagtacctggttcgctttgaagagcaaggcctggggctgcagtggagcaacatcgggaacagtcccacggaaggggacgaattcagcttcctgctgtccatgcagatgatgctccttgatgctgctgtctatggcttactcgcttggtaccttgatcaggtgtttccaggagactatggaaccccacttccttggtactttcttctacaagagtcgtattggcttngcggtgaagggtgttcaaccagagaagaaagagccctggaaaagaccgagcccctaacagaggaaacggaggatccagagcacccagaaggaatacacgactccttctttgaacgtgagcatccagggtgggttcctggggtatgcgtgaagaatctggtaaagatttttgagccctgtggccggccagctgtggaccgtctgaacatcaccttctacgagaaccagatcaccgcattcctgggccacaatggagctgggaaaaccaccaccttgtccatcctgacgggtctgttgccaccaacctctgggactacgtatcctgctcttataagaagcagcttaaagagcaaattctgggtcaatgaacagaggtatggaggaatttccattggaggaaagctcccagtcgtccccatcacgggggaagcacttgttgggtttttaagcgaccttggccggatcatgaatgtgagcgggggccctatcactagagaggcctctaaagaaatacctgatttccttaaacatctagaaactgaagacaacattaaggtgtggtttaataacaaaggctggcatgccctggtcagctttctcaatgtggcccacaacgccatcttacgggccagcctgcctaaggacaggagccccgaggagtatggaatcaccgtcattagccaacccctgaacctgaccaaggagcagctctcagagattacagtgctgaccacttcagtggatgctgtggttgccatctgcgtgattttctccatgtccttcgtcccagccagctttgtcctttatttgatccaggagcgggtgaacaaatccaagcacctccagtttatcagtggagtgagccccaccacctactgggtgaccaacttcctctgggacatcatgaattattccgtgagtgctgggctggtggtgggcatcttcatcgggtttcagaagaaagcctacacttctccagaaaaccttcctgcccttgtggcactgctcctgctgtatggatgggcggtcattcccatgatgtacccagcatccttcctgtttgatgtccccagcacagcctatgtggctttatcttgtgctaatctgttcatcggcatcaacagcagtgctattaccttcatcttggaattatttgagaataaccggacgctgctcaggttcaacgccgtgctgaggaagctgctcattgtcttcccccacttctgcctgggccggggcctcattgaccttgcactgagccaggctgtgacagatgtctatgcccggtttggtgaggagcactctgcaaatccgttccactgggacctgattgggaagaacctgtttgccatggtggtggaaggggtggtgtacttcctcctgaccctgctggtccagcgccacttcttcctctcccaatggattgccgagcccactaaggagcccattgttgatgaagatgatgatgtggctgaagaaagacaaagaattattactggtggaaataaaactgacatcttaaggctacatgaactaaccaagatttatccaggcacctccagcccagcagtggacaggctgtgtgtcggagttcgccctggagagtgctttggcctcctgggagtgaatggtgccggcaaaacaaccacattcaagatgctcactggggacaccacagtgacctcaggggatgccaccgtagcaggcaagagtattttaaccaatatttctgaagtccatcaaaatatgggctactgtcctcagtttgatgcaatcgatgagctgctcacaggacgagaacatctttacctttatgcccggcttcgaggtgtaccagcagaagaaatcgaaaaggttgcaaactggagtattaagagcctgggcctgactgtctacgccgactgcctggctggcacgtacagtgggggcaacaagcggaaactctccacagccatcgcactcattggctgcccaccgctggtgctgctggatgagcccaccacagggatggacccccaggcacgccgcatgctgtggaacgtcatcgtgagcatcatcagagaagggagggctgtggtcctcacatcccacagcatggaagaatgtgaggcactgtgtacccggctggccatcatggtaaagggcgcctttcgatgtatgggcaccatccaaatggactggccagcgtaaatgaccccactgcagcagaaaacaaacacacgaggagcatgcagcgaattcagaaagaggtctttcagaaggaaaccgaaactgacttgctcacctggaacacctgatggtgaaaccaaacaaatacaaaatccttctccagaccccagaactagaaaccccgggccatcccactagcagctttggcctccatattgctctcatttcaagcagatctgcttttctgcatgtttgtctgtgtgtctgcgttgtgtgtgattttcatggaaaaataaaatgcaaatgcactcatcacaaactaaaaaaattca

SEQ ID NO: 338436 - DNA, 2607 bp, Homo sapiens
  misc_feature (121)..(121): n is a, c, g, or t
  misc_feature (131)..(131): n is a, c, g, or t
  misc_feature (177)..(177): n is a, c, g, or t
aattagagaatataataaaaagaaaggttgtctagaaatattcacatgaaatagaaaggcaacccgcaaatacccatttaaccttggtccatatggattaagacagtttagtggagtaggnaaccaaaggnccccccgttgggaagcttaagggagatgacgcgttgcgttggggcnttgcgcgagggaggggagggagggggacgggggggagggagggggggggggagggggggaagggggggggggggggggggggggagggaggggaataaggagaggtcaggctgggcgggtgtaaggccttcccaaagcctgactttgtatcttctcctccttctgctcttccctcttcatcgccctctccctgtgtctctggccctgctgcaggctgaccacttcagtggatgctgtggttgccatctgcgtgattttctccatgtccttcgtcccagccagctttgtcctttatttgatccaggagcgggtgaacaaatccaagcacctccagtttatcagtggagtgagccccaccacctactgggtgaccaacttcctctgggacatcatgaattattccgtgagtgctgggctggtggtgggcatcttcatcgggtttcagaagaaagcctacacttctccagaaaaccttcctgcccttgtggcactgctcctgctgtatggatgggcggtcattcccatgatgtacccagcatccttcctgtttgatgtccccagcacagcctatgtggctttatcttgtgctaatctgttcatcggcatcaacagcagtgctattaccttcatcttggaattatttgagaataaccggacgctgctcaggttcaacgccgtgctgaggaagctgctcattgtcttcccccacttctgcctgggccggggcctcattgaccttgcactgagccaggctgtgacagatgtctatgcccggtttggtgaggagcactctgcaaatccgttccactgggacctgattgggaagaacctgtttgccatggtggtggaaggggtggtgtacttcctcctgaccctgctggtccagcgccacttcttcctctcccaatggattgccgagcccactaaggagcccattgttgatgaagatgatgatgtggctgaagaaagacaaagaattattactggtggaaataaaactgacatcttaaggctacatgaactaaccaagatttatccaggcacctccagcccagcagtggacaggctgtgtgtcggagttcgccctggagagtgctttggcctcctgggagtgaatggtgccggcaaaacaaccacattcaagatgctcactggggacaccacagtgacctcaggggatgccaccgtagcaggcaagagtattttaaccaatatttctgaagtccatcaaaatatgggctactgtcctcagtttgatgcaatcgatgagctgctcacaggacgagaacatctttacctttatgcccggcttcgaggtgtaccagcagaagaaatcgaaaaggttgcaaactggagtattaagagcctgggcctgactgtctacgccgactgcctggctggcacgtacagtgggggcaacaagcggaaactctccacagccatcgcactcattggctgcccaccgctggtgctgctggatgagcccaccacagggatggacccccaggcacgccgcatgctgtggaacgtcatcgtgagcatcatcagagaagggagggctgtggtcctcacatcccacagcatggaagaatgtgaggcactgtgtacccggctggccatcatggtaaagggcgcctttcgatgtatgggcaccattcagcatctcaagtccaaatttggagatggctatatcgtcacaatgaagatcaaatccccgaaggacgacctgcttcctgacctgaaccctgtggagcagttcttccaggggaacttcccaggcagtgtgcagagggagaggcactacaacatgctccagttccaggtctcctcctcctccctggcgaggatcttccagctcctcctctcccacaaggacagcctgctcatcgaggagtactcagtcacacagaccacactggaccaggtgtttgtaaattttgctaaacagcagactgaaagtcatgacctccctctgcaccctcgagctgctggagccagtcgacaagcccaggactgatctttcacaccgctcgttcctgcagccagaaaggaactctgggcagctggaggcgcaggagcctgtgcccatatggtcatccaaatggactggccagcgtaaatgaccccactgcagcagaaaacaaacacacgaggagcatgcagcgaattcagaaagaggtctttcagaaggaaaccgaaactgacttgctcacctggaacacctgatggtgaaaccaaacaaatacaaaatccttctccagaccccagaactagaaaccccgggccatcccactagcagctttggcctccatattgctctcatttcaagcagatctgcttttctgcatgtttgtctgtgtgtctgcgttgtgtgtgattttcatggaaaaataaaatgcaaatgcactcatcacaaactaaaaaaattca

SEQ ID NO: 338437 - DNA, 4981 bp, Homo sapiens
  misc_feature (2731)..(2731): n is a, c, g, or t
gccagaggcgctcttaacggcgtttatgtcctttgctgtctgaggggcctcagctctgaccaatctggtcttcgtgtggtcattagcatgggcttcgtgagacagatacagcttttgctctggaagaactggaccctgcggaaaaggcaaaagattcgctttgtggtggaactcgtgtggcctttatctttatttctggtcttgatctggttaaggaatgccaacccgctctacagccatcatgaatgccatttccccaacaaggcgatgccctcagcaggaatgctgccgtggctccaggggatcttctgcaatgtgaacaatccctgttttcaaagccccaccccaggagaatctcctggaattgtgtcaaactataacaactccatcttggcaagggtatatcgagattttcaagaactcctcatgaatgcaccagagagccagcaccttggccgtatttggacagagctacacatcttgtcccaattcatggacaccctccggactcacccggagagaattgcaggaagaggaatacgaataagggatatcttgaaagatgaagaaacactgacactatttctcattaaaaacatcggcctgtctgactcagtggtctaccttctgatcaactctcaagtccgtccagagcagttcgctcatggagtcccggacctggcgctgaaggacatcgcctgcagcgaggccctcctggagcgcttcatcatcttcagccagagacgcggggcaaagacggtgcgctatgccctgtgctccctctcccagggcaccctacagtggatagaagacactctgtatgccaacgtggacttcttcaagctcttccgtgtgcttcccacactcctagacagccgttctcaaggtatcaatctgagatcttggggaggaatattatctgatatgtcaccaagaattcaagagtttatccatcggccgagtatgcaggacttgctgtgggtgaccaggcccctcatgcagaatggtggtccagagacctttacaaagctgatgggcatcctgtctgacctcctgtgtggctaccccgagggaggtggctctcgggtgctctccttcaactggtatgaagacaataactataaggcctttctggggattgactccacaaggaaggatcctatctattcttatgacagaagaacaacatccttttgtaatgcattgatccagagcctggagtcaaatcctttaaccaaaatcgcttggagggcggcaaagcctttgctgatgggaaaaatcctgtacactcctgattcacctgcagcacgaaggatactgaagaatgccaactcaacttttgaagaactggaacacgttaggaagttggtcaaagcctgggaagaagtagggccccagatctggtacttctttgacaacagcacacagatgaacatgatcagagataccctggggaacccaacagtaaaagactttttgaataggcagcttggtgaagaaggtattactgctgaagccatcctaaacttcctctacaagggccctcgggaaagccaggctgacgacatggccaacttcgactggagggacatatttaacatcactgatcgcaccctccgcctggtcaatcaatacctggagtgcttggtcctggataagtttgaaagctacaatgatgaaactcagctcacccaacgtgccctctctctactggaggaaaacatgttctgggccggagtggtattccctgacatgtatccctggaccagctctctaccaccccacgtgaagtataagatccgaatggacatagacgtggtggagaaaaccaataagattaaagacaggtattgggattctggtcccagagctgatcccgtggaagatttccggtacatctggggcgggtttgcctatctgcaggacatggttgaacaggggatcacaaggagccaggtgcaggcggaggctccagttggaatctacctccagcagatgccctacccctgcttcgtggacgattctttcatgatcatcctgaaccgctgtttccctatcttcatggtgctggcatggatctactctgtctccatgactgtgaagagcatcgtcttggagaaggagttgcgactgaaggagaccttgaaaaatcagggtgtctccaatgcagtgatttggtgtacctggttcctggacagcttctccatcatgtcgatgagcatcttcctcctgacgatattcatcatgcatggaagaatcctacattacagcgacccattcatcctcttcctgttcttgttggctttctccactgccaccatcatgctgtgctttctgctcagcaccttcttctccaaggccagtctggcagcagcctgtagtggtgtcatctatttcaccctctacctgccacacatcctgtgcttcgcctggcaggaccgcatgaccgctgagctgaagaaggctgtgagcttactgtctccggtggcatttggatttggcactgagtacctggttcgctttgaagagcaaggcctggggctgcagtggagcaacatcgggaacagtcccacggaaggggacgaattcagcttcctgctgtccatgcagatgatgctccttgatgctgctgtctatggcttactcgcttggtaccttgatcaggtgtttccaggagactatggaaccccacttccttggtactttcttctacaagagtcgtattggcttngcggtgaagggtgttcaaccagagaagaaagagccctggaaaagaccgagcccctaacagaggaaacggaggatccagagcacccagaaggaatacacgactccttctttgaacgtgagcatccagggtgggttcctggggtatgcgtgaagaatctggtaaagatttttgagccctgtggccggccagctgtggaccgtctgaacatcaccttctacgagaaccagatcaccgcattcctgggccacaatggagctgggaaaaccaccaccttgtccatcctgacgggtctgttgccaccaacctctgggactacgtatcctgctcttataagaagcagcttaaagagcaaattctgggtcaatgaacagaggtatggaggaatttccattggaggaaagctcccagtcgtccccatcacgggggaagcacttgttgggtttttaagcgaccttggccggatcatgaatgtgagcgggggccctatcactagagaggcctctaaagaaatacctgatttccttaaacatctagaaactgaagacaacattaaggtgtggtttaataacaaaggctggcatgccctggtcagctttctcaatgtggcccacaacgccatcttacgggccagcctgcctaaggacaggagccccgaggagtatggaatcaccgtcattagccaacccctgaacctgaccaaggagcagctctcagagattacagtgctgaccacttcagtggatgctgtggttgccatctgcgtgattttctccatgtccttcgtcccagccagctttgtcctttatttgatccaggagcgggtgaacaaatccaagcacctccagtttatcagtggagtgagccccaccacctactgggtgaccaacttcctctgggacatcatgaattattccgtgagtgctgggctggtggtgggcatcttcatcgggtttcagaagaaagcctacacttctccagaaaaccttcctgcccttgtggcactgctcctgctgtatggatgggcggtcattcccatgatgtacccagcatccttcctgtttgatgtccccagcacagcctatgtggctttatcttgtgctaatctgttcatcggcatcaacagcagtgctattaccttcatcttggaattatttgagaataaccggacgctgctcaggttcaacgccgtgctgaggaagctgctcattgtcttcccccacttctgcctgggccggggcctcattgaccttgcactgagccaggctgtgacagatgtctatgcccggtttggtgaggagcactctgcaaatccgttccactgggacctgattgggaagaacctgtttgccatggtggtggaaggggtggtgtacttcctcctgaccctgctggtccagcgccacttcttcctctcccaatggattgccgagcccactaaggagcccattgttgatgaagatgatgatgtggctgaagaaagacaaagaattattactggtggaaataaaactgacatcttaaggctacatgaactaaccaagatttatccaggcacctccagcccagcagtggacaggctgtgtgtcggagttcgccctggagagtgctttggcctcctgggagtgaatggtgccggcaaaacaaccacattcaagatgctcactggggacaccacagtgacctcaggggatgccaccgtagcaggcaagagtattttaaccaatatttctgaagtccatcaaaatatgggctactgtcctcagtttgatgcaatcgatgagctgctcacaggacgagaacatctttacctttatgcccggcttcgaggtgtaccagcagaagaaatcgaaaaggtgaaaaatgttttgttgtggccacataggagtctggttaattacaagcctgtttcatgagagtgcattctcttggagatgagaaactgaagcgtgctattcattcattcattccaacaaatgtttactatgtgtctactgtgtgccaagtactgttctagaaaccaggagtatagcagtgaacaagacagacaaaaaaaaatccccactctcatatctaacaaaatgttgtatgcatttatcctctgactcagcaatcacacgtctaagagtttatcctgaagatgcatctcccacagtgcaaaatgaatatgtataaggtgatccattgcatttgtaattgcaaaatgctggaagttacctaaatgtttagtcattgtagattggctgaataatt

SEQ ID NO: 338438 - DNA, 442 bp, Homo sapiens
agagcttctaagggtgggaacacctctgtgaagttacaccaaaaatctaagagcagcccccagatcattttccctgcagagcactgtctcacagcagcctgggttttatttgtcctgagattgatgtgcttgaacagtcttcaaagggtctgatccgaggaggtgagggttgccctttctgcatttacaaagcctgaacagtattagggctttgaacgctataaacatctaagaggcagcaccaaaccactgctgggttaaggtacccccacaatgccacttgccctgggcctttctcttcctcaccctccacagccccttaactctcccgtccttcttgtgcctccaggtggcatgcagagaaagctgtcggttgccattgcctttgtgggagatgccaaggtggtgattctggacgaacccacctctggggtggaccctt

SEQ ID NO: 338439 - DNA, 437 bp, Homo sapiens
aacatatataccagtcatgtctggtgagaacaaactgtcatggactgtgaaggatctcataccaaatggtgaatacttcttccgtgttaaagcagtcaacaaggttggtggaggagaatatattgaactgaaaaatccagtcattgctcaagatccaaagcaaccccctgatccacctgtagatgtagaggttcataatcctacagcggaggcaatgactattacatggaagccacctttgtatgatggagggagcaagataatgggctacatcatagagaagattgctaagggtgaagaaaggtggaagagatgcaatgaacacctggtaccaatcctgacctatacagcaaaaggacttgaagaggggaaagagtaccaattccgtgtgcgagcagagaacgccgcgggtattagtgaaccttctcgggctactc

SEQ ID NO: 338440 - DNA, 98 bp, Homo sapiens
gattcaatgcaatccaaaatattgattatggaaaggaagcagctgggaggtggaaagacctggagaagagaggtagggaaaacggagaccatgaaaga

SEQ ID NO: 338441 - DNA, 291 bp, Homo sapiens
tctcacacatttctctattcacattgtccccggcactccaattgtgttactaaaaaagccttctctaatagtaaccatttaaagttattcaaatgttgttaaggcttacctcacatttcttcaagggttgtaatgtagatttaaactctcttttatttggttctccttttctaaaacaacacacaaaaaattcagcttatcttctatctaaatggatgctagttctcccaaggagagataaaatatcctaacttatcctccaatagttctaaactcactgctgaaagaatt

SEQ ID NO: 338442 - DNA, 467 bp, Homo sapiens
agctaacttttaaaaactacaactcattaaaaatatgtatcatttttaaaagtaaaggcaatccttatagcacagacttagtcttccttaccagcgttatggataacacaatactttcattggattttaaacctttcaaccacctgcttcagataagacatgtcttccttcctccatccctccctctctcctccccacttttcctttccttttttttctttccttctttttcttctccttgtgcaaggcccaaggtatggcaatcaaatgccaaacaactaggacaaacatcctgagtggtctaaagtactcattaaaaaacatttatttaaaaaatgactacaaataatctatcttattatcagattgattacctcttattggtatgcagaaatataattggggcaacaaagactttctaaaaattgcaaactgcctacgaagtgtggctccctagttatggcctc

SEQ ID NO: 338443 - DNA, 358 bp, Homo sapiens
taacaaaaacaatccatttacctttggatgaacgggttagcttttgtttgttcattcagttatcagacatgtaatgattaatgccttgggtgtgccttgaacattatttatttataaagagcttgctgagaaatggtctatattagcaacaacagtaatgataattaatacttaattagcagtacaggccctgttctaatagttatatactttacatctgtcaactgctataggttcctccttatttttctactataaaatttatactaagcaccctttggcttgcctctttgtttctttagtagcaaaagaaagtatggaaaaaactgctctgaagagtagaacgtgcatcctgtca

SEQ ID NO: 338444 - DNA, 529 bp, Homo sapiens
ggaagagaccatgtgaagacagaggcagagatgggaatgatgctgccataaggcaagggacacctggggcttccagaagctggaaggggcaggaaggcctcctttcttagaggctttggagggagcacagccctgaggacactttgattttagaccactagcctccagaactgtgagagaataagtcattcccaatgctttaagccacccattttgtggtactttgttacagcagccctaggagactaacacaggcacgggtgatgcaaagacagaaaggttatccaggtaggactgatagaatgacacaagcccttcaagcagagagctttgtctggctggtggcagaggagaagtcaaagggaatcaaatcctgacaaggatctaacatgccactgccaatttgaagatggagagccacacgggaagggaagaatgcaggtgacttttaggagcagagagcatcccctagctaatagtcagcaaagaaagcaggtgatatggtttggatctgtgtccccacgaaatc

SEQ ID NO: 338445 - DNA, 303 bp, Homo sapiens
taaacgagacacctgaaacagagttttaagtctataaactcactgaaactaaaatagcagcacttttaggtgatgggctatatcttccactagaggtgagaaagaagtagaagaatatggttcatccatggataatggcagacgagagttgctgcgcaaaaatgcacagccgtgatctttgcaggctcatgagatatgttgcttccaggacatgaaatatcatgccttgagtcaacaagctcccagcatatggtgaggtgaaggccgagggagactgtactcgaaccagccaagaggaacggg

SEQ ID NO: 338446 - DNA, 155 bp, Homo sapiens
cttccaatccctgcatagcccaaactctgtgcgatgtgaaccagccacttcccctctgtgcagttggcctggggacatttgggggtcctggggtggtcagaagagagaataggctccaggagtggcatggggtcccctcttctccagagtggtct

SEQ ID NO: 338447 - DNA, 445 bp, Homo sapiens
agacatgcagtttcagcttagtgtgaagggtcctttcagtcctgcttcttggctccacagactcctccagcttctcggatccaccagcccagccctcattctttcatggtcagcaaccccatagccaggtctgtccagctgggacacaagcggatagtaataaggttgggcaaagtgccccaggagtggggagggggcagagagctggaactggggagactgggagggtcctctcttattggggagtaaagacagagagctgtggttcttctcttttgagactctggactgcttgtaaggtcagaaatggtctatctgccacttggtaccagaccgctgatctagaccattttcatacctgcctcctgtctcttgtttctacttagattttcaattctcctcatcccatctctcctaacttctttaccctctaccccttcttaac

SEQ ID NO: 338448 - DNA, 253 bp, Homo sapiens
ccagatatttgattgtccacttgacttctccacttgaatgcctaatagccataacaaacttaacatacttaaaattcttgacttccacctctaactgctccttccccagtactggtctcagtaaatggtatcaccaatcatccagtacctaagcataggatttatcattatatcaacaatttccatcagctttactttcaaaatatatttggcatccaggtactttctgccaccttcacgactaccacaccag

SEQ ID NO: 338449 - DNA, 669 bp, Homo sapiens
aaacaaaaaaccagcaacaccttttctaggaatatgctcaaagaaacttatacatgagcacttgattcatgaaatggtgtaccttgttcacaaaacattgcaacttgtttcaccattcattggataatgtgatagatttacaacagaaaatatttggctgggcacagtttctcacgcctgtaatcccagcattttgggaggcagaggcgggtggattaactgaggtcaggagtttaagaccagcctgaccaacatggtgaaaccctgtctttactaaaaatacaaaaattagttgggcgtggtggcaggtgcctgtaatgccggctacttggaaggctgaggcaggagaattgctgaaacccgggagacagaggttgcagtgagctgagatctagccaacaagtgaaactcaatctcaaaaaaaaacaaaaagaaagaaagaaagaaaaagaaaatatttgtacagcagtgaaaatggatgaactatagctgcaggcaacaacatggagaaatctccaaaatctaatgttatatgaagaaagtacatcccataagactacatacagtataatactatttctataaaacaaagcctagtaagataaagcagaatatcattaagtatacatttatctgtgatattgcaggttttgtttttttgtttgtttg

SEQ ID NO: 338450 - DNA, 818 bp, Homo sapiens
ttgggaaataaaatttttaataattctcagttcttttcaaggcttgaattgttttctgtccttcagggttcacatattttgtgtatggtatagctcactggcttttgcagggccccttaaagtccagtaacaattgccatcagtaaatgcttaccatgaggcagaccaagcacttgaatagtccagtgaggtacaggtacaactgctatagtttacaattgaagaggctcagaggtaaagtggttcaggtagccagtgagtggcagagtagggattcagacccagaacattcataatatttatttgtgtgcataacaagtagttgtaatgtcagttaaaagtttgtattcccattttggttttctatgtctagagtggcacctagggctgaaggtgattgacactagaggtacttaactacttccagagaatttctacattagcttattttaagtgcatgaattctagggaaaaatattttaccctttgcagatgccacccctaagagatgcaccaacaaatagatgacatgaaattaagcattagtgaatgctgttgatacgaaatatgatcttcaaacataaaggaatcaaatgaacaaactttgtttacaggggaggaggtggtgagggaaaggtttgaaatactcaggtgagtaggattcctacagctgcatagtgagatttgtaaggttctggtaagtttctgcagctgaaggacttctgcattcacctcttttgtaaatattatggaattttaaaaggaaggatggttgcctctggggaagggaactgggaactgaggttattttggagggg

SEQ ID NO: 338451 - DNA, 640 bp, Homo sapiens
aatgggtcaaaaccacaatcatgcgctccaggctcacatctggtgaccaggggccaccactaggatccagggtctctgctcctcgtatagagcagacagccccatagcatcactatcaactcctgcctgctgcaatcacgtcttccctggatggaaggaacatttcatgtctcctaaagactgcgttaatatgttgggttgctgaaggacatcaacactcaggccttaagaatttcctggggtgaacacagaataataaaacctccccgggtgctaattcaacaatcatagtccagttttcttcttccaggtttcaatttttgacaccaatcattgtgatgtttgagaatgtccccgtgactgcaggatctccatggtaaccttgttattttctttctttctttttttttgaagatggaatctcgctctgttgcccaggctggagtgcagtagcacgatctcggctcactgcaacctccactttccgggttcaagcaattctctgcctcagcctcttgagtagctgggatcacaggcatgcaccactacacccggctaattttttgtattttagcagagacggaatttcaccacgttgcccaggctggtcttgaactcctgagttcaggcaatctgcctg

SEQ ID NO: 338452 - DNA, 393 bp, Homo sapiens
tgccccagtctcaaggctggcaaggaccagagcctttccattcttagaaaccttctagagttcctttctggagcttttatggagcctgactatttttcctgttttttttttttctttaaacctcatatgtcctgagaatgcacaaaaactggttttcatcactgactaagtccatttatttgtttattcccaacatggcctcctaccttttacttgtaacaggacactatcatactagaggatttgttctccctcttcatgagcatatccacactacagacagatgggtgcttaaagtcttaatctataaacttgatatttcttataatttttattgaattaaaattcttcctaatgaataggaatttcctattccttacttaattctatata

SEQ ID NO: 338453 - DNA, 519 bp, Homo sapiens
acctcctccctcatgcccctccaggcaagttttcactgacacttgcagaaaccctacaacaaccgtctttcttgctcatctcctcagagacgaccttctggagcaactgctgctcaccagaatggctgtctgatttttatactccaagatcaaaggtcttagatgtctagttcacagaatctagaagaaggagaagacttcaaacatcattctagactaacctccttcattcacaaatgggactcacaaaggatgtatgatatgtggctaattagtcctagaaccaatctagatttttgtgagcgaaatgttctttgtattctaacacgttgctttttaggtctcaatattggaaaagataagatctctaaaattaatatttgaggcatttgctacaggttaatagcacacatatttgagggcagtttgtctttctgacatctcacaactcataccccttagccaaccagctaccctgcccatccatagggtaagtccacttccaacaggctcttcatg

SEQ ID NO: 338454 - DNA, 158 bp, Homo sapiens
tggtggtccacggtgtagcatggctcgggggacccaagaactcgatggcaaagctgcttcaaattctcctgcatgcttgctcttttctttttgccctttttcttctttcttccccttccttcctctccttcttcctctccttctttctctccttcttc

SEQ ID NO: 338455 - DNA, 360 bp, Homo sapiens
gatggacaggaaaagtcacaaaggtgcaggcaagctgggcctgccgcacaggaacttggccaaggaaaggcacagctggcctgcagctgctgggggtgccagcgcaagaagtcatgtagccaaccccatggcgaccaacaagggccactgtccctcaaaggcggccccaccagcacaaaagatggaaagtggaagctggctgggggggcttcacctggggaggacctgtccagcaaagagctgcgagtcactgatgagcatacgcacaagctctcccaacttcctgcagcaacccctcatcctgcccagtccctgcggccccgcccacccagctctcctggactcacccccaggaatacg

SEQ ID NO: 338456 - DNA, 290 bp, Homo sapiens
caaaagttaccttctcaggaaaacatcccatgatcatcctatttaaaaatggaggctgaggcgggcagatcacgtggtcaggagatcgagaccaccctggctaacatggtgaaatcccgtctctactaaaaatacaaaaaattagccgggcatggtggcaggtgcctgtagtcccagctactcgggaggctgaggaaggagaatggcgtgaacccgggaggcagagcttgcagtgagctgagatcgctccactgcactccaacctgggcaacagagcaagactctgtctc

SEQ ID NO: 338457 - DNA, 370 bp, Homo sapiens
aatggtgatagtgggccggaagagagagagtgcattcgaaagacactgaggagattgcatcagtaggacttggtgacacattagatgcagaggaagagggacagaaatgcttcaaggaggacttttaggcatctgtcttgggtaactagatgatgccaatggctgagatggggaattcttgggtagatgaggtttggtgggatggtgattgttataactttgactttgaacgtgctgagttcaggtgacattgtgataccccaaaggaggtgcagagtaggtagctggagacacaggcccgaagatgatgagaggtctggcctagaaacatggatgcaggagtcatggatccatcaaggcactgtgagtt

SEQ ID NO: 338458 - DNA, 390 bp, Homo sapiens
atccagcaaatttgaagatatcaattaagcaattcggtctgaagtctcagaagaaaaacaaatgaagaaaaataaacagagcctaggtgtggagcaccataaagcatactaacataggtatagtgagagtccttgaagaaaatgagaaaaaaaaaaaaaagaaaatttgaagacataatatctgaaaacttctcaaatttgatgaaagacataaatctatacatccaggaagctcaacacattccaaatagaaaaaactcagagacatctacatagagacacattataatcaaactgtgaaaatacaaagacagtaagagaatcttgaaagcatcagatgaaaagcaaatcatcacatacaaggggatcctcaaaattaacagttcattt

SEQ ID NO: 338459 - DNA, 550 bp, Homo sapiens
tttcaatagtggatggaacatccagacagatgatcaaaaggaaacagtgaacttgaacaacactatagatcaaatggacctaacagaaacatagaacattccacccaaagcaacaaaatatacattcttttcaagtacacacagaacattctccagaatagatcacatgctaggtcacaaaacaaactgaagaagattgaaatcataccatgtatattttctgaccacaatggaatgaaactagaaatcaatatcagaaaaaaaactggcaaattcaaaaatatgtggaaattaaacaatacactcctaaataaccaatgggtgaaacaaaaaaatcaaaagggaaattagaaaatattttgagataaatgaaaaacaaaatagaatgtacaaaaccgatggaatgcagcaaaatcagtaccaagaggaaaattatagtgacaaatgcctacattaaaaaagaaaaatctcaaataacccaactttacacctcaagaaactagaaaaataaggaaaaaaagctaatcccaaagttacttgaaggaaagaa

SEQ ID NO: 338460 - DNA, 409 bp, Homo sapiens
gctagcatgaggcccatgttcatgcagaagtgagctctggctcatgcagacaggagggagagagggctggagagaggagggatggagaagtaagtgaggagacagaagagaggatagtgagaaatggggaaggagaaggagaaacagatggaaaccagagaacaacagaagagggagaggaaaagacagaggagagaaggaagaaggtgggaaagatttggaaggaatagcacatgaagaaggagtgaaaagaaactgatgctcaaaagtgggccaaagagctggaaagggagaagggggaaggagagccacccaccagagagggaggaagattggagccggcggagaggagggggcgggaagctgccactgtgtccgatgtcctgcagcctggcgttgtacgctgccc

SEQ ID NO: 338461 - DNA, 309 bp, Homo sapiens
tacatttatccaaagaacatataaggatgatagcgaaataggggtaccgattgcgatttagtatatcgggtcgtagcgtgaaaagacagaggagagaaggaagaaggtgggaaagatttggaaggaatagcacatgaagaaggagtgaaaagaaactgatgctcaaaagtgggccaaagagctggaaagggagaagggggaaggagagccacccaccagagagggaggaagattggagccggcggagaggagggggcgggaagctgccactgtgtccgatgtcctgcagcctggcgttgtacgctgccc

SEQ ID NO: 338462 - DNA, 661 bp, Homo sapiens
ctttgaggcctagtttcctcatctgtaaaatgaggatgataatactttcgttaaaggatgattgagtagatgcaaagaaatgaagtatgtaatgtgtccaagtcatttacttttctttttatatttccttaaagttgtatactcttgtcagtagagagatttaagcagaatatcagccagggtggagtggattcttgttctcctccataggagatgggacaggatgatctactggtccttttcagttagtcctgaggggctgggatttaagcatccatgggtatctgatgagaagggacagtctctgattctgatggggaggagtttggtgggccctgggctgtctgctctccatggccctatgagagagttctagagaaaactatggagcaaccacacttttcttacatgattactaagggagaagatgcaggcagctaccggaaggggagctgactcttggaagaagggaaaggcttagggtgaatttctcattttctacagcttttctcttgagtacagccttcagtctgtgccatgtgggaagatagataacttgatagaaaatatgtatcttggttggcttggataaccagagactagagttcaggacaaccttagctgctggaaggagtggggtctctgaaaggagtgagccaca

SEQ ID NO: 338463 - DNA, 483 bp, Homo sapiens
aattgtaatccccctcccaataggggcaatttgggtcccgggccccccctcgtgcttggaactgggtgttggtgtccatggaacttcctctctgtatctcaggtcagtaggcgcagaaacgcctcatgatgaagattcttgagccccatttccaagacccctcacatccaatcctgtcctgtaacatccatcaaggatttccataggggtgactggtgcccacccaagactgcaccagtgcctgctcattgaggagagtaactgctggccaggcagaaagaatatgggctctgcaatgagacagacctggaggggactctcccgttgagcactagcagctggaggagttgggagttcatggctatcatggttgtgttaatcgattgtggggatgaaatgtcattgtgtatggaaggcggggctcatggctgattggcaataaaatggcggctgccgttgtcattgtctccaaaaaaggatctc

SEQ ID NO: 338464 - DNA, 406 bp, Homo sapiens
gcttccccagtaggatccagtctgtggggctcatttgagggagaatgagcacggggcttttggaggctgcagcctagggccaagggatggaggctcacctgagtgcaggttaggcaggtgaagtgtctccccggaaaccaagctagagtgccccacctgctcggccctgccttctcggatcggatccagcacatccaggcttctcgtgagttcccccattgtcccccaacgccccaccgcccccatgttctcccactcgcttctcccctgagaacctccaccccgcccccagcctgacacccgttgtctcagcacacctgtgcaagcattttcagaccaacgaagtcacagcccaggggaatgctgggactgactccacggccacgcccacctcccccacttcctt

SEQ ID NO: 338465 - DNA, 1798 bp, Homo sapiens
gcttccccagtaggatccagtctgtggggctcatttgagggagaatgagcacggggcttttggaggctgcagcctagggccaagggatggaggctcacctgagtgcaggttaggcaggtgaagtgtctccccggaaaccaagctagagtgccccacctgctcggccctgccttctcggatcggatccagcacatccaggcttctcctcctcccgaggaaccagtggtgacagctgaggccatgtgagtaggatcctgaatgaggctttatctctggctgttcgtcccatcgtccaccgtggcaccagctccctcagccagccgggatgggaccagcgactgagagagccagaggcagagaggtgagggtgaccatatcctggactgtgagaggaatgggactctgggcctgtagctgccaagcaggtggcaggtgctccaggctgtgatctgcaccctctgacccctgacattgacctcctaccctgacccctgcctgaccaagccatgtctgaacaggaggctcaagccccagggggccgggggctgcccccggacatgctggcagagcaggtggagctgtggtggtcccagcagccgcggcgctcggcgctctgcttcgtcgtggccgtgggcctcgtggcaggctgtggcgcgggcggcgtggcactgctgtcaaccaccagcagccgctcaggtgaatggcggctagcaacgggcactgtgctctgtttgctggctctgctggttctggtgaaacagctgatgagctcggctgtgcaggacatgaactgcatccgccaggcccaccatgtggccctgctgcgcagtggtggaggggccgacgccctcgtggtgctgctcagtggcctcgtgctgctggtcaccggcctgaccctggccgggctggccgccgcccctgcccctgctcggccgctggccgccatgctgtctgtgggcattgctctggctgccttgggctcgcttttgctgctgggcctgctgctgtatcaagtgggtgtgagcggacactgcccctccatctgtatggccactccctccacccacagtggccatggcggccatggcagcatcttcagcatctcaggacagttgtctgctggccggcgtcacgagaccacatccagcattgccagcctcatctgacggagccagagccgtccttcttctcacagcggcctcagcgtccccagagccgagccagggtgtgagtgcatgtgaacgttgagtacacatgagtgcgtgtatgcccccaggctgggtcagctcttctgtggattgcatggcgtgtgattaaaagcccatgtgttcccacacatccacatcatgggaaggttaatgtgtgcctccttggaactgggtgttggtgtccatggaacttcctctctgtatctcaggtcagtaggcgcagaaacgcctcatgatgaagattcttgagccccatttccaagacccctcacatccaatcctgtcctgtaacatccatcaaggatttccataggggtgactggtgcccacccaagactgcaccagtgcctgctcattgaggagagtaactgctggccaggcagaaagaatatgggctctgcaatgagacagacctggaggggactctcccgttgagcactagcagctggaggagttgggagttcatggctatcatggttgtgttaatcgattgtggggatgaaatgtcattgtgtatggaaggcggggctcatggctgattggcaataaaatggcggctgccgttgtcattgtctccaaaaaaggatctc

SEQ ID NO: 338466 - DNA, 1772 bp, Homo sapiens
gccacgtcagccaatcggctcaggccctgccctggaaacgacacctgttcatcctcctcccggcaggctcacctgagtgcaggttaggcaggtgaagtgtctccccggaaaccaagctagagtgccccacctgctcggccctgccttctcggatcggatccagcacatccaggcttctcctcctcccgaggaaccagtggtgacagctgaggccatgtgagtaggatcctgaatgaggctttatctctggctgttcgtcccatcgtccaccgtggcaccagctccctcagccagccgggatgggaccagcgactgagagagccagaggcagagaggtgagggtgaccatatcctggactgtgagaggaatgggactctgggcctgtagctgccaagcaggtggcaggtgctccaggctgtgatctgcaccctctgacccctgacattgacctcctaccctgacccctgcctgaccaagccatgtctgaacaggaggctcaagccccagggggccgggggctgcccccggacatgctggcagagcaggtggagctgtggtggtcccagcagccgcggcgctcggcgctctgcttcgtcgtggccgtgggcctcgtggcaggctgtggcgcgggcggcgtggcactgctgtcaaccaccagcagccgctcaggtgaatggcggctagcaacgggcactgtgctctgtttgctggctctgctggttctggtgaaacagctgatgagctcggctgtgcaggacatgaactgcatccgccaggcccaccatgtggccctgctgcgcagtggtggaggggccgacgccctcgtggtgctgctcagtggcctcgtgctgctggtcaccggcctgaccctggccgggctggccgccgcccctgcccctgctcggccgctggccgccatgctgtctgtgggcattgctctggctgccttgggctcgcttttgctgctgggcctgctgctgtatcaagtgggtgtgagcggacactgcccctccatctgtatggccactccctccacccacagtggccatggcggccatggcagcatcttcagcatctcaggacagttgtctgctggccggcgtcacgagaccacatccagcattgccagcctcatctgacggagccagagccgtccttcttctcacagcggcctcagcgtccccagagccgagccagggtgtgagtgcatgtgaacgttgagtacacatgagtgcgtgtatgcccccaggctgggtcagctcttctgtggattgcatggcgtgtgattaaaagcccatgtgttcccacacatccacatcatgggaaggttaatgtgtgcctccttggaactgggtgttggtgtccatggaacttcctctctgtatctcaggtcagtaggcgcagaaacgcctcatgatgaagattcttgagccccatttccaagacccctcacatccaatcctgtcctgtaacatccatcaaggatttccataggggtgactggtgcccacccaagactgcaccagtgcctgctcattgaggagagtaactgctggccaggcagaaagaatatgggctctgcaatgagacagacctggaggggactctcccgttgagcactagcagctggaggagttgggagttcatggctatcatggttgtgttaatcgattgtggggatgaaatgtcattgtgtatggaaggcggggctcatggctgattggcaataaaatggcggctgccgttgtcattgtctccaaaaaaggatctc

SEQ ID NO: 338467 - DNA, 1623 bp, Homo sapiens
gccgggctctccccggtctagaatgtaacactcctcccgaggaaccagtggtgacagctgaggccatgtgagtaggatcctgaatgaggctttatctctggctgttcgtcccatcgtccaccgtggcaccagctccctcagccagccgggatgggaccagcgactgagagagccagaggcagagaggtgagggtgaccatatcctggactgtgagaggaatgggactctgggcctgtagctgccaagcaggtggcaggtgctccaggctgtgatctgcaccctctgacccctgacattgacctcctaccctgacccctgcctgaccaagccatgtctgaacaggaggctcaagccccagggggccgggggctgcccccggacatgctggcagagcaggtggagctgtggtggtcccagcagccgcggcgctcggcgctctgcttcgtcgtggccgtgggcctcgtggcaggctgtggcgcgggcggcgtggcactgctgtcaaccaccagcagccgctcaggtgaatggcggctagcaacgggcactgtgctctgtttgctggctctgctggttctggtgaaacagctgatgagctcggctgtgcaggacatgaactgcatccgccaggcccaccatgtggccctgctgcgcagtggtggaggggccgacgccctcgtggtgctgctcagtggcctcgtgctgctggtcaccggcctgaccctggccgggctggccgccgcccctgcccctgctcggccgctggccgccatgctgtctgtgggcattgctctggctgccttgggctcgcttttgctgctgggcctgctgctgtatcaagtgggtgtgagcggacactgcccctccatctgtatggccactccctccacccacagtggccatggcggccatggcagcatcttcagcatctcaggacagttgtctgctggccggcgtcacgagaccacatccagcattgccagcctcatctgacggagccagagccgtccttcttctcacagcggcctcagcgtccccagagccgagccagggtgtgagtgcatgtgaacgttgagtacacatgagtgcgtgtatgcccccaggctgggtcagctcttctgtggattgcatggcgtgtgattaaaagcccatgtgttcccacacatccacatcatgggaaggttaatgtgtgcctccttggaactgggtgttggtgtccatggaacttcctctctgtatctcaggtcagtaggcgcagaaacgcctcatgatgaagattcttgagccccatttccaagacccctcacatccaatcctgtcctgtaacatccatcaaggatttccataggggtgactggtgcccacccaagactgcaccagtgcctgctcattgaggagagtaactgctggccaggcagaaagaatatgggctctgcaatgagacagacctggaggggactctcccgttgagcactagcagctggaggagttgggagttcatggctatcatggttgtgttaatcgattgtggggatgaaatgtcattgtgtatggaaggcggggctcatggctgattggcaataaaatggcggctgccgttgtcattgtctccaaaaaaggatctc

SEQ ID NO: 338468 - DNA, 1739 bp, Homo sapiens
gcttccccagtaggatccagtctgtggggctcatttgagggagaatgagcacggggcttttggaggctgcagcctagggccaagggatggaggctcacctgagtgcaggttaggcaggtgaagtgtctccccggaaaccaagctagagtgccccacctgctcggccctgccttctcggatcggatccagcacatccaggcttctcctcctcccgaggaaccagtggtgacagctgaggccatgtgagtaggatcctgaatgaggctttatctctggctgttcgtcccatcgtccaccgtggcaccagctccctcagccagccgggatgggaccagcgactgagagagccagaggcagagaggtgagggtgaccatatcctggactgtgagaggaatgggactctgggcctgtagctgccaagcaggtggcaggtgctccaggctgtgatctgcaccctctgacccctgacattgacctcctaccctgacccctgcctgaccaagccatgtctgaacaggaggctcaagccccagggggccgggggctgcccccggacatgctggcagagcaggtggagctgtggtggtcccagcagccgcggcgctcggcgctctgcttcgtcgtggccgtgggcctcgtggcaggctgtggcgcgggcggcgtggcactgctgtcaaccaccagcagccgctcaggtgaatggcggctagcaacgggcactgtgctctgtttgctggctctgctggttctggtgaaacagctgatgagctcggctgtgcaggacatgaactgcatccgccaggcccaccatgtggccctgctgcgcagtggtggaggggccgacgccctcgtggtgctgctcagtggcctcgtgctgctggtcaccggcctgaccctggccgggctggccgccgcccctgcccctgctcggccgctggccgccatgctgtctgtgggcattgctctggctgccttgggctcgcttttgctgctgggcctgctgctgtatcaagtgggtgtgagcggacactgcccctccatctgtatggccactccctccacccacagtggccatggcggccatggcagcatcttcagcatctcaggacagttgtctgctggccggcgtcacgagaccacatccagcattgccagcctcatctgacggagccagagccgtccttcttctcacagcggcctcagcgtccccagagccgagccagggtgtgagtgcatgtgaacgttgagtacacatgagtgcgtgtatgcccccaggctgggtcagctcttctgtggattgcatggcgtgtgattaaaagcccatgtgttcccacacatccacatcatgggaaggttaatgtgtgcctccttggaactgggtgttggtgtccatggaacttcctctctgtatctcaggtcagtaggcgcagaaacgcctcatgatgaagattcttgagccccatttccaagacccctcacatccactgcaccagtgcctgctcattgaggagagtaactgctggccaggcagaaagaatatgggctctgcaatgagacagacctggaggggactctcccgttgagcactagcagctggaggagttgggagttcatggctatcatggttgtgttaatcgattgtggggatgaaatgtcattgtgtatggaaggcggggctcatggctgattggcaataaaatggcggctgccgttgtcattgtctccaaaaaaggatctc

SEQ ID NO: 338469 - DNA, 1628 bp, Homo sapiens
gctggacagcaggctgggcccagataagatgtcagctcctcccgaggaaccagtggtgacagctgaggccatgtgagtaggatcctgaatgaggctttatctctggctgttcgtcccatcgtccaccgtggcaccagctccctcagccagccgggatgggaccagcgactgagagagccagaggcagagaggtgagggtgaccatatcctggactgtgagaggaatgggactctgggcctgtagctgccaagcaggtggcaggtgctccaggctgtgatctgcaccctctgacccctgacattgacctcctaccctgacccctgcctgaccaagccatgtctgaacaggaggctcaagccccagggggccgggggctgcccccggacatgctggcagagcaggtggagctgtggtggtcccagcagccgcggcgctcggcgctctgcttcgtcgtggccgtgggcctcgtggcaggctgtggcgcgggcggcgtggcactgctgtcaaccaccagcagccgctcaggtgaatggcggctagcaacgggcactgtgctctgtttgctggctctgctggttctggtgaaacagctgatgagctcggctgtgcaggacatgaactgcatccgccaggcccaccatgtggccctgctgcgcagtggtggaggggccgacgccctcgtggtgctgctcagtggcctcgtgctgctggtcaccggcctgaccctggccgggctggccgccgcccctgcccctgctcggccgctggccgccatgctgtctgtgggcattgctctggctgccttgggctcgcttttgctgctgggcctgctgctgtatcaagtgggtgtgagcggacactgcccctccatctgtatggccactccctccacccacagtggccatggcggccatggcagcatcttcagcatctcaggacagttgtctgctggccggcgtcacgagaccacatccagcattgccagcctcatctgacggagccagagccgtccttcttctcacagcggcctcagcgtccccagagccgagccagggtgtgagtgcatgtgaacgttgagtacacatgagtgcgtgtatgcccccaggctgggtcagctcttctgtggattgcatggcgtgtgattaaaagcccatgtgttcccacacatccacatcatgggaaggttaatgtgtgcctccttggaactgggtgttggtgtccatggaacttcctctctgtatctcaggtcagtaggcgcagaaacgcctcatgatgaagattcttgagccccatttccaagacccctcacatccaatcctgtcctgtaacatccatcaaggatttccataggggtgactggtgcccacccaagactgcaccagtgcctgctcattgaggagagtaactgctggccaggcagaaagaatatgggctctgcaatgagacagacctggaggggactctcccgttgagcactagcagctggaggagttgggagttcatggctatcatggttgtgttaatcgattgtggggatgaaatgtcattgtgtatggaaggcggggctcatggctgattggcaataaaatggcggctgccgttgtcattgtctccaaaaaaggatctc

SEQ ID NO: 338470 - DNA, 1744 bp, Homo sapiens
gcttccccagtaggatccagtctgtggggctcatttgagggagaatgagcacggggcttttggaggctgcagcctagggccaagggatggaggctcacctgagtgcaggttaggcaggtgaagtgtctccccggaaaccaagctagagtgccccacctgctcggccctgccttctcggatcggatccagcacatccaggcttctcctcctcccgaggaaccagtggtgacagctgaggccatgtgagtaggatcctgaatgaggctttatctctggctgttcgtcccatcgtccaccgtggcaccagctccctcagccagccgggatgggaccagcgactgagagagccagaggcagagaggtgagggtgaccatatcctggactgtgagaggaatgggactctgggcctgtagctgccaagcaggtggcaggtgctccaggctgtgatctgcaccctctgacccctgacattgacctcctaccctgacccctgcctgaccaagccatgtctgaacaggaggctcaagccccagggggccgggggctgcccccggacatgctggcagagcaggtggagctgtggtggtcccagcagccgcggcgctcggcgctctgcttcgtcgtggccgtgggcctcgtggcaggctgtggcgcgggcggcgtggcactgctgtcaaccaccagcagccgctcaggtgaatggcggctagcaacgggcactgtgctctgtttgctggctctgctggttctggtgaaacagctgatgagctcggctgtgcaggacatgaactgcatccgccaggcccaccatgtggccctgctgcgcagtggtggaggggccgacgccctcgtggtgctgctcagtggcctcgtgctgctggtcaccggcctgaccctggccgggctggccgccgcccctgcccctgctcggccgctggccgccatgctgtctgtgggcattgctctggctgccttgggctcgcttttgctgctgggcctgctgctgtatcaagtgggtgtgagcggacactgcccctccatctgtatggccactccctccacccacagtggccatggcggccatggcagcatcttcagcatctcaggacagttgtctgctggccggcgtcacgagaccacatccagcattgccagcctcatctgacggagccagagccgtccttcttctcacagcggcctcagcgtccccagagccgagccagggtgtgagtgcatgtgaacgttgagtacacatgagtgcgtgtatgcccccaggctgggtcagctcttctgtggattgcatggcgtgtgattcttggaactgggtgttggtgtccatggaacttcctctctgtatctcaggtcagtaggcgcagaaacgcctcatgatgaagattcttgagccccatttccaagacccctcacatccaatcctgtcctgtaacatccatcaaggatttccataggggtgactggtgcccacccaagactgcaccagtgcctgctcattgaggagagtaactgctggccaggcagaaagaatatgggctctgcaatgagacagacctggaggggactctcccgttgagcactagcagctggaggagttgggagttcatggctatcatggttgtgttaatcgattgtggggatgaaatgtcattgtgtatggaaggcggggctcatggctgattggcaataaaatggcggctgccgttgtcattgtctccaaaaaaggatctc

SEQ ID NO: 338471 - DNA, 1028 bp, Homo sapiens
gcttccccagtaggatccagtctgtggggctcatttgagggagaatgagcacggggcttttggaggctgcagcctagggccaagggatggaggctcacctgagtgcaggttaggcaggtgaagtgtctccccggaaaccaagctagagtgccccacctgctcggccctgccttctcggatcggatccagcacatccaggcttctcctcctcccgaggaaccagtggtgacagctgaggccatgtgagtaggatcctgaatgaggctttatctctggctgttcgtcccatcgtccaccgtggcaccagctccctcagccagccgggatgggaccagcgactgagagagccagaggcagagaggtgagggtgaccatatcctggactgtgagaggaatgggactctgggcctgtagctgccaagcaggtggcaggtgctccaggctgtgatctgcaccctctgacccctgacattgacctcctaccctgacccctgcctgaccaagccatgtctgaacaggaggctcaagccccagggggccgggggctgcccccggacatgctggcagagcaggtggagctgtggtggtcccagcagccgcggcgctcggcgctctgcttcgtcgtggccgtgggcctcgtggcaggctgtggcgcgggcggcgtggcactgctgtcaaccaccagcagccgctcaggtgaatggcggctagcaacgggcactgtgctctgtttgctggctctgctggttctggtgaaacagctgatgagctcggctgtgcaggacatgaactgcatccgccaggcccaccatgtggccctgctgcgcagtggtggaggggccgacgccctcgtggtgctgctcagtggcctcgtgcgtgtcacggcttgactggcggtggcgcgccctgcctgtcggcgtgcgcatgtgttgggctgtctgctgctggtcgtggtgtggcgcgcgtaggggtgcggagcctcctctgtgatctcccaggcggggcggcttcctcgaattgtgggggaa

SEQ ID NO: 338472 - DNA, 307 bp, Homo sapiens
attttaatagcattaacaatttttccccaatgaagcaaataaatccaatttgtacttaccatttactgggcactacagtgccaaaacactatgctatttacaacaggacctcacttaatccttaccatgtcccgtggaatacagataacttcattttatacatgaggaaacaggcttttaagcaatattcccaagatcacacagatagtatattagaaagtaaagtgttcagctgcaaatacaaatagtggtttctttctccccctgtcccctccctgccactgctattgaaacttctaaaactagg

SEQ ID NO: 338473 - DNA, 421 bp, Homo sapiens
gctttttctcttgggctcttaagtttatgcagaaagactcctctagcctcatgactagggaaagcagaatttgactctagtatccagcactgtgtgacagaagcagaaaaagtgctgggagcagcgagaggcctcgctggtgagcatgtggactttccctcattccctctggtatagaactgcatttcacacatgcccctcttagcctggcctgctgtgcctgatcttaatcgggtcttaaaactgagcatgttcctggaaagagccttaaaggaaatactaatttaccaggaagaaaaaaaaacaaacacaaacattttacaggcatagatttataaatagcctcacatcagtccaaatcaggttttgccaccaaatgggttaagaataaagcttgactttcacaaatttttggacttga

SEQ ID NO: 338474 - DNA, 315 bp, Homo sapiens
atgcatgagctactgtgcccagccttggtttttcttttgagacagtgttttgctctgtcacccaggctggagtgcagtggtgtagtcatagctcactgcagcctcaaagtcctgagttcaagcaatcctcttgcctcagcctcccaacgtgctgggatctcaggcaggagccactgcacctggcccgaaaccaagctttcttatcccaagcgctgacctttatcaagttgacctaatcctttatcatctcctaagtgtccctcatgagtgatcacttcacattcctcccacatggagagctcacccactggggca

SEQ ID NO: 338475 - DNA, 338 bp, Homo sapiens
aatggattttcagtagcctcacttttgttggagctgctgcattagttcaagtcctgctccgttctgtctggcttttcctttactgattgtgcttggagaggccgtgttctgacttgcccactgtgcctagtatcaaaggactcaagttctaaatccagctcattgttcttttgcggggtctggtagagaagctgctcaggcttttggtttgctgttggcataaggagtctctcctctgttcgcatgcagaagagattagagatgtgcaaagcccactcatccggagtccaaggcctaagtgattcctcactctccagtcggttgggaaaaacctttag

SEQ ID NO: 338476 - DNA, 374 bp, Homo sapiens
tgctgagtcctcacagggatggagcccagtgcctgggtcctaacagggcagaggtggggtgtctcttgttacaaagatcccttccttcctgccacagctttcttgccacctgacatcccccaccttctgagtcatttcttggggttcaaaagtggttttccattgcaaagcaaatacttttggaattcttgaattccgaaattcaagaactccgaaagtatttcagagcaggagaacaaatggatgtgatctggctgctgtgtactgaatgtttgtctctccccaaattagcatgctgaagccttcaccctcagtgtcatggtatttggagatagagcttttaggaggtaattaaggttaggtgaggtcatagg

SEQ ID NO: 338477 - DNA, 396 bp, Homo sapiens
agctttccttaagcccaattaacctgacacaaccttttctcactctttcaagctcatctatttaaaaaatagtactacctaaaatatctgcacaccctatttcacaatcttttgataaactaggaaataaaagaacatcttgttactataaacgtgtaatcctcccttctaagaaaaaacacttgtaccaagtccagctaacatgatccattaagaacaactagttctttcttacaggctaacactgactagacatggagaacttgaactttaaaaataaatactcaacaatattcccaacatctagatgttcaaactgctcactaaattatgcattcctaagcacgcatccatctctctgtggacacaccaggaaaacgtctctctaaattataa

SEQ ID NO: 338478 - DNA, 715 bp, Homo sapiens
ctggatcagtgtcctttggacactttgctcttggttttgaacatgtcacctattctgaaatttaaatgagttctgaaatttataaggaccttcactgtagtgttccctttttggggacggccaggttttctaagcccagaggaagaccaccacccatggagcacagaagagactgaatacctgccctctcagtccactcctgcaaccactaccaatgaagacaccaaaatgacacacacgccttgaagggcagagagaaaagggaggaagaccttggatgtgatgattgaccaggcagagaaaactggaccgcctgggacccaagggatgaagctgggactgcctagggcagcaatgtccaatcttggctaccctgggccacaatggaagaagaattgtcttggaccacacacaaaatatactaacacaacagctggtgaaccaaaccaaaacaaaaacccccaaaatctcaatgttttattagaaatttgtgttgggtcgggttcaaagccatcctgggccacatgcggcctaagggttggacaagcttggtctaggggagcagctgcagcagggcttaggcctgcgctgagccatgacaacacacttgagccatgaaattccagaataattcctgagagttctatatgccccagcagatccacacacaagcaactggagctccgcccacccccaccccccaccaagagacagg

SEQ ID NO: 338479 - DNA, 86 bp, Homo sapiens
tgctggaaggtctgtgtggacaattctgtgagctgaaaattcaggaggcactctgatagggggcccccacaatcttgcaatattta

SEQ ID NO: 338480 - DNA, 1019 bp, Homo sapiens
gaagggagctgagctacttgtcaaaggcagaagagcatgtggtgaccggttggacagacggggtgggcactaagtataagatttcagtcttgcaatgtgctgggcagtgatgcctttacctgagacagcacaggaggggaagctggcatgtgcttcttggatgtcttacagacatctgaaactcatggtccctctcttccctgctctcaaataaggtcccctttcagggtccagtagaataagctgggaacttcaaggtcattcttgtcactttcctctcccttgcctgacatatccattccatcaccaagcttagtaggtcttattttctaaatctctcctcaattcccctccaccccatcactactcctgttccagctgcagctatatctcacctgggctcctgccattgcttcctgaatagcctcacacatctaccccacttcactcctccacatctcttctccatgcacagaggtgtttgtgcaaactacaactctagtctgtcaccctagtatgcctaggaatgcaaaactctgaaatgaggcccatgggccctgccaggcatagtccttcccttggctgcccctgctgcatcatctccatctcatggcctcctttcagtccacactcttaccgggattattccatgcacatagctgctctccattcccgagacattcttccctccctcctttgcctgattaatttctgtgtatctttcccttctcagctcacatctcagttctcagggaagcctgccctgatctctgggactaaatcaaacttcctcaatataggcttggctataaggtatcaccttttcaaagttgcagtttacatttgtttgtggggtttcttttacatttgtttacatttgtttgtggggtttctgtctctctcttctgctagctacaagcttcatgaggtcagggccttatctgtgttcaccattatatccctgacacttaaaatgcataccttcaaagaacacccttggatggatgaaaggtggatct

SEQ ID NO: 338481 - DNA, 765 bp, Homo sapiens
gaagggagctgagctacttgtcaaaggcagaagagcatgtggtgaccggttggacagacggggtgggcactaagtataagatttcagtcttgcaatgtgctgggcagtgatgcctttacctgagacagcacaggaggggaagctggcatgtgcttcttggatgtcttacagacatctgaaactcatggtccctctcttccctgctctcaaataaggtcccctttcagggtccagtagaataagctgggaacttcaaggtcattcttgtcactttcctctcccttgcctgacatatccattccatcaccaagcttagtaggtcttattttctaaatctctcctcaattcccctccaccccatcactactcctgttccagctgcagctatatctcacctgggctcctgccattgcttcctgaatagcctcacacatctaccccacttcactcctccacatctcttctccatgcacagaggtgtttgtgcaaactacaactctagtctgtcaccctagtatgcctaggaatgcaaaactctgaaatgaggcccatgggccctgccaggcatagtccttcccttggctgcccctgctgcatcatctccatctcatggcctcctttcagtccacactcttaccgggattattccatgcacatagctgctctccattcccgagacattcttccctccctcctttgcctgattaatttcttagtggcttccggtgcaataaaatctaacttccctcagcaggcagcattcag

SEQ ID NO: 338482 - DNA, 720 bp, Homo sapiens
agatatattaataaatgtcatacattcagtagaaggtctgattaaaaaaagataaaggacaattgatagacataaaacttcagtacctttttaataacatttctgaataatttaatatgtcctctgaacttacatatactaagtttttccatagggcatatagtaagtgttatactctgagattctgataccaatttctagttcttcctcattaagaaacattaaaagcccgttatttatttcaattaaaaaaattttttattattatactttaagttctggggtacatgtgcagaacctgcaggtttgttacataggtatacatgtgccatggtggtttgctgcacccatcaacctgtcatgcacattaggtatttcttctaatgctgtcccttccctagccccctacccactgacaggccccggtgtgtgatgttcccctccctgtgtccatgtgctctcattattcaactcccacttatgagtgagaaaatgtggtgtttggttttctgtcctgtgttagtttgctgagaatgatggtttccagcttcatccatgttcctgcaaaggacatgaactcatcgtttttgatggctgtttagtattccatggtgtatatgtgccacattttctttatccaatctatcattgatgggcatttgggttggttccaggtctttgctattgtgaatagtgcctcagtaaacatacgtgtgcatg

SEQ ID NO: 338483 - DNA, 130 bp, Homo sapiens
ctttcatcctctagccaagcctctggagccgcgtcagtcccactggccagctgtgctcctgcagtcttgttgatctctgtcacacccacactgcccaggctggagggctcctttctcctcaggaagtcat

SEQ ID NO: 338484 - DNA, 511 bp, Homo sapiens
cctatccatatttttatagcaatgtcccattcctcaaaaccaaatttctgtgttaggctgttattgcattgctataaagaaatatctgagactgggtaatgtgtaaagaaaagaggtttaattgactcacagttctgcaggctgtacatgaagcatggtgtcagcatctgcttggcttcttgtgaggagttgggcttcttacaatcatggcaaaaagcaaagcaggggtaggcacatcacatgtgaaagcaggagcaaagggtggggaaggtgccacacacttttccttttttttttttttttgtggaaatggagttccactcttttggcccaggttgaagggcagtggcgcattcttggctcatggcaacctctgcctccggggttcaagtgattctccgtgcccaagcctcccgagtagctgggaccacgggcttgcaccaccacgccgggctaattttgtattcttagtagagacagggtttctccatgttggtcaggctggtctcaa

SEQ ID NO: 338485 - DNA, 436 bp, Homo sapiens
ttattttaagtaagatgttacttttgttttaaagaatatatgaaagagaaatattaattagatttttcataaatgcttttgaagtttataagttttgaattacaaattagtaatctaaaattaaccagaacttttattggagcctcaaaaaaagctttcaaagtagaactggaagaaaattataatttatgatcttgttcatctttcttctttgctgttctcgtgtagtgatagacgtgttaatgaaaagttttatgcataggaaattgactatcttgaatcatgattatccattgactttcactgtaatttcttatatttcttgttaaaagggaggatggggaatcagattttagaattttctttaaaggagttctgtcattctcctaaataacatacttttttcttctgtgtctgatatatttccatttaattg

SEQ ID NO: 338486 - DNA, 711 bp, Homo sapiens
ggtgatgggccgcacagcgaggcagtcaaggccagctccctgggagaagcactgggtcaggtgaggtctgaggacagcaggccttccctaggggaaggagctgggagtgccaaggccccaggtgcacaggaggcgtggctgctgagaggctgcagggtggaggggcctcggcctcagagtcatgtgccctgtgaccactgaagggtgtcagcagagcacacggcatgaggacagagggaggggcacggggagtgaaggagggggccctggggcaaggctcgggggtcaggagctcagcgtccgctactcagcccagccaaaaccctcccagacgtctcctctcctgcctgggcaaagtccagcttggcaccccgtctggggcctgcctgtggtcagggccaagtgttccctcctccaggaaagcctttaccctcctcatgccctgtagtcaggaggccgcctgctgtaaccctccgtgtcgcctcgggtgcgaaatcagacccacctgacaccatcacgcggaggcccagcagcacctgcacccacttccagctgctctggccaaaatctccgctcggccaggccccgtggctcacacctgtaatcctagcacattgggaggccaaggcaggcacatcacctgagttcaggagttcaagaccagcctggccaacatggtgaaatcccgtctctactaaaaacagaaaatta

SEQ ID NO: 338487 - DNA, 667 bp, Homo sapiens
aggggcaagtgtaggctgccaaaaaatgtctaattagctctccctccaggcctgggtcattagagcagtgaagaaaaccaacaggcagaagccagggacagctgagggctggctgtgccaacctagtccatcctgccccacctaacagagcccagatctattaggctctgctgacagccaggcagggaaccccaaggaaccagcaccatgctcccgtgccctcacagatcccgtgttccttcaccctcatatttccatgacaggtttttagcagaaggtcagtgtatttcttcatgaaaataattgcaaaaaaagtgccatagtgttttgttttgttttgctttgttttttgaaaccaatgtagtgaggccaggctggtctcgaactcctacctcacgtgatccgcccacctctgcctcccaaagtggtgggattacaggcatgagccaccgcgcccagccatgaaatggtttctaatgacacatttcccagagtgcccagtggttcttactgccctaggtaagctgcctctcagactcctcaaagcagctttacctgcttcctagacctgtatcctaacactcatccccatagatactaagctgtaaagggattaactgctaatgtggaacttcatccaagaaatgattagggatattacagatgt

SEQ ID NO: 338488 - DNA, 528 bp, Homo sapiens
aggggcaagtgtaggctgccaaaaaatgtctaattagctctccctccaggcctgggtcattagagcagtgaagaaaaccaacaggcagaagccagggacagctgagggctggctgtgccaacctagtccatcctgccccacctaacagagcccagatctattaggctctgctgacagccaggcagggaaccccaaggaaccagcaccatgctcccgtgccctcacagatcccgtgttccttcaccctcatatttccatgacaggtttttagcagaaggtcagtgtatttcttcatgaaaataattgcaaaaaaagtgccatagtgttttgttttgttttgctttgttttttggagacaaggtttttctctgtcacctgggctggaatgcagtggcatgatctcagctcactgcaacctctgcctcccaggttcaagtgattcttgtttctcagcctcccaggtagctgggattacaggcgtgtgccaccacatccagctaatttttgtatttttaggagagagggagt

SEQ ID NO: 338489 - DNA, 771 bp, Homo sapiens
caactcaggaggctggggcaggagaatggcttgaacctaggagacagaggttgcggtgagccgagatgacaccactgcactccagcctgacaacagagtgaggctctgatacaaaaaaaagaagaaataacactctttgtatctattagaaatagacttttaaattccacctctctcatttcaacttagacaaagaagtagcaagcacttataagagagtattttcactatgcaattatatgataacatgtacagggattatttttgaactttaagtggtgaattcaaatctggttatattttatctctgagtgagcgcctttataaaaactttttagaattatataatgtttaacctggaaagaactttgaataggaaactagggcccggaaaacatgaatgatttgctgtatcagttagtagctaagctgggacttagcttcagaatgtaaacatttgtcaaacttaattgcaggagttgtcataagccgaccaggatgtgactcatagagtattgtgcaaattaagctctttgtactgtatatgaaaaatggttttttgttttttaaggaagctaactttggtattggttggacatgatctccagagaggtatctatctgtgttagagtgttctggtttggtgtttccaaaagtatttttctgaaataatactataatcatgtgacttgcactgacagtattgatggttgtttattaatgtatattatctggtcctacaaatgtgctttttctttttaatccctatgt

SEQ ID NO: 338490 - DNA, 335 bp, Homo sapiens
gtgtgtgtgtgaccgtccgtgtgtgaccgtccgtgtgagcttccgtgtgaccgtccgtgtgagcttccgtgtgaccgtccgtgtgagcatctgtgtgaccgttcgtgtgagtgaccgtccgtgtgagcttccgtgtgaccgtccgtgtgagcatctgtgtgaccgtgtgtgtgtgaccgtccgtgtgtgaccgtccatgtgagcgtgtcaccgtccgtgtgagcatccgtgtgaccatccgtgtgagcgtgtgagcatccgtgtgacccgtgtgcacacgctgctgcccacaccctctaacacctgtctccttatcgtcacatggccactcaata

SEQ ID NO: 338491 - DNA, 399 bp, Homo sapiens
tagacaatcagagagccaaatcatgaatgaactcccaatcacatggccactcaataccggtattgagtgtccgtgtgagcctgtgagcatccgtgtgaccgtccgtgtgagcatccctgtgaccgtccgtgtgagcgtgtgactgtccgtgtgagcttccgtgtgaccgtccgtgtgagcatctgtgtgaccgttcgtgtgagtgttgtccgcataaccgtatgagcatccgtgtgatcatccgtaaccgtgtaggcgtccttgtgagcctccgtgtgagcgtgcaaccgtctgtgtgaccgtccgtgtaagcgtgtgaccttccgtgtgagcgtgtgcacacgctgctgcccacaccctctaacacctgtctccttatcgtcacatggccactcaata

SEQ ID NO: 338492 - DNA, 822 bp, Homo sapiens
gtgtgtgtgtgaccgtccgtgtgtgaccgtccgtgtgagcttccgtgtgaccgtccgtgtgagcttccgtgtgaccgtccgtgtgagcatctgtgtgaccgttcgtgtgagtgaccgtccgtgtgagcttccgtgtgaccgtccgtgtgagcatctgtgtgaccgtgtgtgtgtgaccgtccgtgtgtgaccgtccatgtgagcgtgtcaccgtccgtgtgagcatccgtgtgaccatccgtgtgagcgtgtgagcatccgtgtgaccgtccgtgtgagcatccgtgtgaccgtgtgagcctgtgagcatccgtgtgaccgtccgtgtgagcatccctgtgaccgtccgtgtgagcttccgtgtgactgtccgtgtgagcatccgtgtgtgaccgtccgtgtgagcgtgtgaccgtccgtgtgagcatccgtgtgaccatccgtgtgagcgtgtgagcatccgtgtgaccgtccgtgtgagcatccgtgtgactgtccgtgtgagcctgtgagcatccgtgtgaccgtccgtgtgagcatccctgtgaccgtccgtgtgagcttccgtgtgaccgtccgtgtgagcatctgtgtgaccgttcgtgtgagtgtgtgaccgtccgtgtgagtgtccgcataaccgtatgagcatccgtgtgatcatccgtaaccgtgtaggcgtccttgtgagcctccgtgtgagcgtgcaaccgtctgtgtgaccgtccgtgtaagcgtgtgaccttccgtgtgagcgtgtgcacacgctgctgcccacaccctctaacacctgtctccttatcgtcacatggccactcaata

SEQ ID NO: 338493 - DNA, 391 bp, Homo sapiens
tgtgaccgtccgtgtgagcatccctgtgaccgtccgtgtgagcgtgtgactgtccgtgtgagcttccgtgtgaccgtccgtgtgagcatctgtgtgaccgttcgtgtgagtgtgtgaccgtccgtgtgagcttccgtgtgaccgtccgtgtgagcatctgtgtgaccgttcgtgtgagtgtgtgaccgtccgtgtgagtgtccgcataaccgtatgagcatccgtgtgatcatccgtaaccgtgtaggcgtccttgtgagcctccgtgtgagcgtgcaaccgtctgtgtgaccgtccgtgtaagcgtgtgaccttccgtgtgagcgtgtgcacacgctgctgcccacaccctctaacacctgtctccttatcgtcacatggccactcaata

SEQ ID NO: 338494 - DNA, 222 bp, Homo sapiens
ttcaactccattacccattttgatattattctgaaacattattacccagaaatgagacttgtgaggctttgacaggatgtggtgcatttaaaaatttacctaaataggatagttttgatagggctattaaatgactcataataaaagctaaacacagaaagagtatatcaactcccaggttgacattcagtttctgtctctcccctcttggctttatcgtaa

SEQ ID NO: 338495 - DNA, 246 bp, Homo sapiens
tccataatgtaagttttttttttaatgaaataccccaattggtattttctttccgtttttgtaactcacagataaataagatgctggttgactcaatagtacttcaaacacatttcaataatctttagagagcagagtttccaggttttatgttaagtatgtagaagattcagttactgaataaaggacaaactgtaagataacctgctacacctaaaacccccaatctgttaggatgaaatttgg

SEQ ID NO: 338496 - DNA, 615 bp, Homo sapiens
gcaagggcaagcctttccatgtcaatagcatataaagcataagggtgggaatcaaggactataaaggggtagttgggggcccagccatgaaaagccaagtatactctatgaaggcttagagcatatgcttctagctgatggggaactgttgaaaaattttaagcaggggtgtaaatggccagattttcctggtttgctatggcagctcattgagtcatagatttgtggctggatagcaggaaccgatcatgataggctcaatgtgagatgatgaatatgtgtaagaaagcagtgaaagtcagggctggagaggagaagatgggtttgagaagtacacaagatttggagttgatacaattttgatcaactggctacggggagtggatgagatggaagagaccagaatgacacttgaagttctggtggccattttgaacctggggaatataggaggaagaatgggtatgtaggggccaaggtaatatactgattttaaaaagtgtccatctggcaattgaatgtgagtctgacgctctgggaagatggcgtctggagatgggaatctgggagccatcacctagaggtggtagttagagccatgtgagtaggttggtg

SEQ ID NO: 338497 - DNA, 181 bp, Homo sapiens
caggctggtctccaactcctggcctcaagcaatcctcccatttcagcttcccaaagtcctgggattacaggtgtgagccaccatgcccggccaactatgggctattttttagtttgccttttgtactgcttttagagttttttgatgaatttcctttatacttgctcttggattttttatt

SEQ ID NO: 338498 - DNA, 228 bp, Homo sapiens
gggcacagaacagcattgctgcctgtttgagcttttgccctagtgggtagggggcacccagtaaacatggggtgccatgtcaggttgtgataaatgctgtgaagaggtgcaaagccaagtagagggatggagagtcatgtttcgctaagtctccaggcctctccgagcaggtgacagttagaggaagagcgttccaggcagggggaatcacaccctggggtgagagag

SEQ ID NO: 338499 - DNA, 385 bp, Homo sapiens
tctagagtccctgctgtcctgccgctctcacagtcagtgcacactgacaaggctgcctataaagtttcaatgaaaatatgagacacacagtaaaagtctgccacaataaaaaaaaaacctatacaataggaatagttcattaatgataatgtacatgctatcttatattataatttacattgcatttttgtgactttccgtttttatttctttttaatgcatcttttgtctctaaactgacataattctagtatttattttttcagttaattttctgaacacagtacttaaaagccaaattgccagtttaaagccagatatctgacaacaccatcattagagattacatttgttctacaaacactcaacaaactctcaagggatg

SEQ ID NO: 338500 - DNA, 464 bp, Homo sapiens
ctgtgtataacctcataaagtaggaagaagcccagtgttgaactctacagccttttacattcaaaatggttttgaaaaatgcccattcagaggaacaggaaagcaccaaacctaaaaggtctgaggacctttccatgctttctgtctcctaatctcagagctgtaccaatctgttatttaaaaattagtcattatttatccaaggcaggaggggacaaatgtaactgttagttcagtaaatgatttcattcttttttttttcctgtgtcctttctactgttaaagtgacgaaaatgacaccacggtttgatatgtggggttggtttcagtttgaataatctcatccttagctgcatgtgaactcatgtcttctcacactctattagataaaagcctaaaacaggaaggccagaaacaactgtttttaaaaagctcatgctaccctggcaacttaagttggaaga

SEQ ID NO: 338501 - DNA, 1425 bp, Homo sapiens
tcctggcctgatctgagtagagaaaggtgggtaggagttaaccaggaaagcaaggatgaaagcgtgttgcgtttagataaaggataggcttcaaggtcagggaacgttgctgggtggtgagatggaaccctgatgtggaggctcagcaggaagaagcaggaaggacactgggcccctggtggttttagttccagaaacaaatgtgggccccagggctctgcaatggtaaggctggaactactcaacataagagctccacctttaactgtgccccctaagagtacctgatgatccccctatctccttgtcaatgttgctgttcttctccagaatctatttcaacccttctctgatttcaaaccaccagtccctttacctctcagagaaaacagcaaccacaaaagcctctccacttcctactatcttaatattgacaacttccagatcagggagctgagatatctcaagctcaggtttctcttctgagcttcagacgcttttatccacttggatttcactggcacaaaactttccatgttagaatcaaacccccctcctcccagacctgcttctcccacacacttccctatctgaatgaaagacacctccactctccacccagttgccaaatcagaaatctgtctttgttttctttgtctcacattttcctatgtctaatcagttaagttttatcaatactacctgtttatttctttaatctattcacatatctttatcctcaatcttcagcatccccttcccatcctcagtctgctggttactgtatttcctattttactaagaatctaaaagagatcagaagaaaacttccacatcccccaacacccaaccaccaaatctgctaacccagttgcattggtgcttttatagccttccttcctccctcttactaagaatgaaccaacactattcctatcaaagcccaaccctctagctttacattgactcctagtgtcttttttctggattgtcaatttttttcctgaccaattattctattagcaatacaaatatgctgtaaaatctcttaaacttttttctctgcatctttgaactgctgttctcttttccttctccccttcatagcagaactcctcaaaagagttgctacctctaattcttcccttccagttctctcatgaaccagctacaattaagtattcacccccaccactccatggaaactgctcttgtcaaaatcatcaatagcctttgtgtggtgaatccaatagccagttttcattcttcttactaagcttctcatcagtattcctagactatttccttcactggcttcgacaaatgctttcttggttttcctccaatttctcgactttgttcctgctgaatctacctttttctaatccgtaagtgttggggtgtcccagggcttactccttggac

SEQ ID NO: 338502 - DNA, 780 bp, Homo sapiens
tttttttgtatttttagtagagacgtggtttcaccgtgttagccaggatggtctcgatctcctgacctcatgatctacccgcctcggcctcccaaagtgctgggattacaggcgtgagccatggcgcccagcccaattttgtatttttagtagagacagggtttctccgtgttgggcgaaaacttccacatcccccaacacccaaccaccaaatctgctaacccagttgcattggtgcttttatagccttccttcctccctcttactaagaatgaaccaacactattcctatcaaagcccaaccctctagctttacattgactcctagtgtcttttttctggattgtcaatttttttcctgaccaattattctattagcaatacaaatatgctgtaaaatctcttaaacttttttctctgcatctttgaactgctgttctcttttccttctccccttcatagcagaactcctcaaaagagttgctacctctaattcttcccttccagttctctcatgaaccagctacaattaagtattcacccccaccactccatggaaactgctcttgtcaaaatcatcaatagcctttgtgtggtgaatccaatagccagttttcattcttcttactaagcttctcatcagtattcctagactatttccttcactggcttcgacaaatgctttcttggttttcctccaatttctcgactttgttcctgctgaatctacctttttctaatccgtaagtgttggggtgtcccagggcttactccttggac

SEQ ID NO: 338503 - DNA, 290 bp, Homo sapiens
cctcgaggggccctggccctggattttagatggggtcagagggtgggcttcgggaggcctgtgtgcaaagcagccatgctctgagttttactgaagggctcttgaaatcctcacccaaggtcacagtttgacttgtggtctgtttatgccttggatgtacccctggccctctttgtgggattgtggctactttttggggatggaggaagatgtggccattagtgtgagccaccctcattagacgggcacagatcggtgaggtttggaggagtggggtggtcacagcagcg

SEQ ID NO: 338504 - DNA, 4176 bp, Homo sapiens
  misc_feature (1)..(2): n is a, c, g, or t
  misc_feature (4)..(4): n is a, c, g, or t
nnantggcagagagttgagagtgatccaggaaagtgaagcaggagatgcgggactgccccgggtggaagtgatcctcgactgctctgacaggcagaagacagaagggtgcaggcttcaggcaggaaaggagtgtgtggattctccagtggaaggagggcagtcagaagcacctccttctctggtatcctttgccgtctcatcagaaggcacagagcagggagaagatccacgctcggaaaaagatcacagcagacctcacaagcaccgagcgcggcatgcacggctcaggaggagtgaaagcctgtcagaaaaacaagtgaaggaagcaaaatctaaatgcaaaagcattgcccttcttctaacggatgctcccaaccccaactccaagggggtgttgatgtttaagaagcgacgtcggagggccaggaaatacaccctagttagctacggtactggcgagcttgagcgagaggcggacgaggaggaagaaggtgacaaggaggatacatgtgaagtagcatttcttggtgcaagcgaatcagaggtggatgaagagttattgtctgacgttgacgacaacacacaagttgtgaactttgactgggattctggactggtggacattgaaaagaaactgaacagaggggacaagatggagatgttaccagacaccacaggcaagggagccctcatgtttgccaagaggagggagagaatggatcagatcacagcccaaaaagaagaggacaaggtaggtggaacgccaagcagagaacaagatgctgcccagaccgatggcctgagaaccacgacttcttaccaaagaaaggaggaagagtcggtaagaacgcagagctctgtgagcaaaagctacatcgaggtgagtcatggtcttggccatgttccccaacagaatggcttcagtggggcatctgagacagcaaacatccagaggatggtccccatgaatagaacggccaaacccttcccagggtctgtgaatcagccagctacccccttctcgccaacccgaaacatgacgagtcccattgctgactttcctgcacctccaccttactctgcagtcactcctccccctgacgccttctccagaggggtttcaagtccgattgctggcccagcacagccccctccatggccccagcctgccccgtggtcccagccagccttttacgattcgtctgagcgaatagcttcccgagatgagaggatctcagtgccagcaaaaagaacaggaatattgcaggaggccaaaaggagaagcacgacaaaacccatgtttacttttaaagagcccaaagtaagcccaaatcctgaactcttgtcactccttcaaaattcagaaggcaaacggggcactggagctggaggtgattccggaccggaagaagactacctcagcttgggggcagaggcttgtaatttcatgcaaagctcctctgccaaacaaaagacccctcctcctgctgctccaaaacctgcagtcaagtcctcatcctcccaaccagtaactccagtttccccagtctggtctccaggagtggctcccacccaacctcctgccttccccacatccaacccatcaaagggcaccgttgtctcctccatcaaaatagcccagccttcttaccctcctgcccggcctgcaagtactttgaacgtggctggtcccttcaaaggaccacaagcagcagtagccagtcagaattacacacccaaaccaacagtttccacaccaacagtcaatgctgttcagcctggtgcagtgggaccatccaatgagcttccaggaatgagtgggagaggagctcagctctttgctaaaaggcagtcgagaatggagaagtatgtggtcgattcagacacggtgcaggcccacgctgctcgagctcagtctcccactccatctctcccggccagttggaagtactcctccaatgtccgagcacctcctcctgtggcctataatcctatccactcgccgtcttacccactggctgctctcaagtctcagccatcagctgcacagccctccaaaatgggcaagaaaaagggaaagaaacccctcaatgcattagatgtcatgaagcaccaaccgtatcagctcaatgcatccttgtttactttccaacctccagatgcaaaggatggcctcccccagaagtcatcagtcaaggtcaattcagccctggccatgaagcaagctcttcctccccggccagtgaatgctgcctcacctacgaatgtgcaggcttcgtcagtgtactcggtaccagcctatacctctcctccttccttctttgcagaggcctcctcaccagtcagtgcatccccagtgcctgtgggcattcccacctcgccaaagcaagaatcagcctcatcatcttattttgtggcaccaaggccaaagttctcagccaagaaaagtggtgtcacaattcaggtgtggaaaccatctgttgtggaagagtaatcttgtagctgaagctgagtgtccactttgcttgaaatgaattgtttgcagtgtttcttgagtccctgagaatgcctagcaaagtcctcaacttacttaatttcagatatgtcacctcctaatctgggtccaaggagtataatatttttaatgagtcaaaaatccaactcagattgacctaaaatatatttatcttctttgcacacttaaaaaatccaggagcaccccaaaatagacatgtaccgttatattaagtaagcaggagacttaggatttgtgctgtagccacaagaaagacagtgatcagtgatatcaaacatcaggaatcagcctttatgtaacataacagctgtcctcctatggtgaaaggttcaaatgtagtgaaggtataacctatattgactgagatttcccttttaggtagtgccttatctctattactagtgttaaaggaataaggaatctatgaaggacagggagcagctctggtctgtcaatctcagccacctgtttgatatcacagagaagatactcggaggattgttggaatgtatatagtttagtaagaagtgggtaagaaagagggtcttaattactgagcacttattatgtattaggttctttgccagatgtttttacatatataaactcatttcagaaaacttatttaaagtaaatggggccgggtatggtggttcatgcctggaatcctagcactttgggaggctgaggtaggaggactgcttgaggccgggagttggagaccagcctgagcaacatagtgagaccctgtctcaataataataataataataataatagtaataatgaagtaaatgggataaggaaagaaggataattatctttaaaggttgattcccaccctccctccccagttacttaaggaactaagtgagtacatctccagttgcccatgaaagcataagtttgttttcctcagctgaggcaagtggtagagtatacaggataacgaagtaacatgtaaaaggcaggacgcacataaaggtgtacatggctattgtttcacctggagaaaccacatgattgggacctgaaggtttactgactgactacaggggctgattgtgaagcacgaggaaccccatgtgtgtggagactgtagggtgagagcacacaattattagcatcatttctgagtgatctcacagattttttttcttgtgtttgttttgctttttgacaactgcttctcccacgttccttgcaattctattctctcaccttcactttactatttgtattcgatggaccaggataattcaggcaaggttaccttgtaaacttgaattggccacacaccatgttgtcacccagctggctatgaagtgaataatggtactgaaagtaaacctgaagacctttctcagatctattttaagtctgagtctgaccaaccatggaaaatattcgacatgaattaatgtagagaactataaagcatttatgacagctccaagaaaaatcatctactctatgcaggagatatgtttagagacctctcagaaaaacttgcctggtttgagggtacacagtaccattttaatcttctgaaaatatctgtattcctgctctttttctgctgtcactgtcaatctgctatatttttcactatcctattaaaatattactgtctccttta

SEQ ID NO: 338505 - DNA, 634 bp, Homo sapiens
ttgcagtgcttggtaatggtgctaggaatactttggagtaacaatcagcacaaaccaaaatgaatgagatatattaatattttcattgtttttaggagagtgggcgctccctttctcttcctggaagatcagtcccaccccccatttctacatctccttgggtataccagcctacttatagttactctagtaaaccaaccgatggactagagaaagcaaacaagagaccaactccttgggaagcagcagcaaagtctcctctcggtctagtggatgatgctttccaacccagaaacatccaggaatccattgtggcaaatgtggtttcagcagctcggaggaaggtgcttccagggcctccagaggattggaatgaaagactgtcctatattcctcaaacccagaaggcctatatgggctcatgtggaaggcaagagtataatgtcacagccaataataatatgtccaccacctcccaatatggttcacagttgccatatgcatattataggcaggcttcaagaaatgattctgcaatcatgtccatggaaaccaggtctgattactgtcttccagtagctgattacaactacaacccacacccaaggggatggagacgccaaacatgaaagtt

SEQ ID NO: 338506 - DNA, 424 bp, Homo sapiens
  misc_feature (1)..(2): n is a, c, g, or t
  misc_feature (4)..(4): n is a, c, g, or t
nnantggcagagagttgagagtgatccaggaaagtgaagcaggagatgcgggactgccccgggtggaagtgatcctcgactgctctgacaggcagaagacagaagggtgcaggcttcaggcaggacaccggtaatatgtaacctttgaggacaggactcagcctgcagggcccctggtatttatagggtccaagaggaggcacctgcttttcaactgcaccctcagtgctgcctctttttggcccctaaacgtttccctttgaggttgtgatgctgggaatcacagacttcactctctgcctgcacccttccccgaggtctcatcttttctgggtcccacaatctttgtaataatgtgaaaaagcacaatttgtctgatcaccccccaggtggttccccaccttattatcactacctgatccga

SEQ ID NO: 338507 - DNA, 8967 bp, Homo sapiens
  misc_feature (1)..(2): n is a, c, g, or t
  misc_feature (4)..(4): n is a, c, g, or t
  misc_feature (4946)..(4946): n is a, c, g, or t
nnantggcagagagttgagagtgatccaggaaagtgaagcaggagatgcgggactgccccgggtggaagtgatcctcgactgctctgacaggcagaagacagaagggtgcaggcttcaggcaggaaaggagtgtgtggattctccagtggaaggagggcagtcagaagcacctccttctctggtatcctttgccgtctcatcagaaggcacagagcagggagaagatccacgctcggaaaaagatcacagcagacctcacaagcaccgagcgcggcatgcacggctcaggaggagtgaaagcctgtcagaaaaacaagtgaaggaagcaaaatctaaatgcaaaagcattgcccttcttctaacggatgctcccaaccccaactccaagggggtgttgatgtttaagaagcgacgtcggagggccaggaaatacaccctagttagctacggtactggcgagcttgagcgagaggcggacgaggaggaagaaggtgacaaggaggatacatgtgaagtagcatttcttggtgcaagcgaatcagaggtggatgaagagttattgtctgacgttgacgacaacacacaagttgtgaactttgactgggattctggactggtggacattgaaaagaaactgaacagaggggacaagatggagatgttaccagacaccacaggcaagggagccctcatgtttgccaagaggagggagagaatggatcagatcacagcccaaaaagaagaggacaaggtaggtggaacgccaagcagagaacaagatgctgcccagaccgatggcctgagaaccacgacttcttaccaaagaaaggaggaagagtcggtaagaacgcagagctctgtgagcaaaagctacatcgaggtgagtcatggtcttggccatgttccccaacagaatggcttcagtggggcatctgagacagcaaacatccagaggatggtccccatgaatagaacggccaaacccttcccagggtctgtgaatcagccagctacccccttctcgccaacccgaaacatgacgagtcccattgctgactttcctgcacctccaccttactctgcagtcactcctccccctgacgccttctccagaggggtttcaagtccgattgctggcccagcacagccccctccatggccccagcctgccccgtggtcccagccagccttttacgattcgtctgagcgaatagcttcccgagatgagaggatctcagtgccagcaaaaagaacaggaatattgcaggaggccaaaaggagaagcacgacaaaacccatgtttacttttaaagagcccaaagtaagcccaaatcctgaactcttgtcactccttcaaaattcagaaggcaaacggggcactggagctggaggtgattccggaccggaagaagactacctcagcttgggggcagaggcttgtaatttcatgcaaagctcctctgccaaacaaaagacccctcctcctgctgctccaaaacctgcagtcaagtcctcatcctcccaaccagtaactccagtttccccagtctggtctccaggagtggctcccacccaacctcctgccttccccacatccaacccatcaaagggcaccgttgtctcctccatcaaaatagcccagccttcttaccctcctgcccggcctgcaagtactttgaacgtggctggtcccttcaaaggaccacaagcagcagtagccagtcagaattacacacccaaaccaacagtttccacaccaacagtcaatgctgttcagcctggtgcagtgggaccatccaatgagcttccaggaatgagtgggagaggagctcagctctttgctaaaaggcagtcgagaatggagaagtatgtggtcgattcagacacggtgcaggcccacgctgctcgagctcagtctcccactccatctctcccggccagttggaagtactcctccaatgtccgagcacctcctcctgtggcctataatcctatccactcgccgtcttacccactggctgctctcaagtctcagccatcagctgcacagccctccaaaatgggcaagaaaaagggaaagaaacccctcaatgcattagatgtcatgaagcaccaaccgtatcagctcaatgcatccttgtttactttccaacctccagatgcaaaggatggcctcccccagaagtcatcagtcaaggtcaattcagccctggccatgaagcaagctcttcctccccggccagtgaatgctgcctcacctacgaatgtgcaggcttcgtcagtgtactcggtaccagcctatacctctcctccttccttctttgcagaggcctcctcaccagtcagtgcatccccagtgcctgtgggcattcccacctcgccaaagcaagaatcagcctcatcatcttattttgtggcaccaaggccaaagttctcagccaagaaaagtggtgtcacaattcaggtgtggaaaccatctgttgtggaagagtaatcttgtagctgaagctgagtgtccactttgcttgaaatgaattgtttgcagtgtttcttgagtccctgagaatgcctagcaaagtcctcaacttacttaatttcagatatgtcacctcctaatctgggtccaaggagtataatatttttaatgagtcaaaaatccaactcagattgacctaaaatatatttatcttctttgcacacttaaaaaatccaggagcaccccaaaatagacatgtaccgttatattaagtaagcaggagacttaggatttgtgctgtagccacaagaaagacagtgatcagtgatatcaaacatcaggaatcagcctttatgtaacataacagctgtcctcctatggtgaaaggttcaaatgtagtgaaggtataacctatattgactgagatttcccttttaggtagtgccttatctctattactagtgttaaaggaataaggaatctatgaaggacagggagcagctctggtctgtcaatctcagccacctgtttgatatcacagagaagatactcggaggattgttggaatgtatatagtttagtaagaagtgggtaagaaagagggtcttaattactgagcacttattatgtattaggttctttgccagatgtttttacatatataaactcatttcagaaaacttatttaaagtaaatggggccgggtatggtggttcatgcctggaatcctagcactttgggaggctgaggtaggaggactgcttgaggccgggagttggagaccagcctgagcaacatagtgagaccctgtctcaataataataataataataataatagtaataatgaagtaaatgggataaggaaagaaggataattatctttaaaggttgattcccaccctccctccccagttacttaaggaactaagtgagtacatctccagttgcccatgaaagcataagtttgttttcctcagctgaggcaagtggtagagtatacaggataacgaagtaacatgtaaaaggcaggacgcacataaaggtgtacatggctattgtttcacctggagaaaccacatgattgggacctgaaggtttactgactgactacaggggctgattgtgaagcacgaggaaccccatgtgtgtggagactgtagggtgagagcacacaattattagcatcatttctgagtgatctcacagattttttttcttgtgtttgttttgctttttgacaactgcttctcccacgttccttgcaattctattctctcaccttcactttactatttgtattcgatggaccaggataattcaggcaaggttaccttgtaaacttgaattggccacacaccatgttgtcacccagctggctatgaagtgaataatggtactgaaagtaaacctgaagacctttctcagatctattttaagtctgagtctgaccaaccatggaaaatattcgacatgaattaatgtagagaactataaagcatttatgacagctccaagaaaaatcatctactctatgcaggagatatgtttagagacctctcagaaaaacttgcctggtttgagggtacacagtaccattttaatcttctgaaaatatctgtattcctgctctttttctgctgtcactgtcaatctgctatatttttcactatcctattaaaatattactgtctcctttatctgttcaatgtccatattttaaaaaaatcttccttgtatgagctattctgatccaaataatttctctgatatttctctatatggctcccacaacaatttcattgttgttagcatatctatttctccatacattgtaaaactgtaatccttaggtatttctaaaacataaagaggagaattaagtcagctgcagaacaatggggctgattcttctgctttttctctggaaaatctttcattgcttttggtggaaatttacctagaggttacaaccacaggatgtagcttggtctcttatttgcctttttgggaaaccaattaagattaatacaggataaaggaaaaaagcaatctattcattatataacacagttgtttgtattacttgttccctgcaaaggaaatctgttgaatgcttgcattttgaattcttttctaatagaacaaccaaaaaaggcttcttatggtgcagcaggaaaaaagatcatttttatagctttgcattcttaacatagcatttaaagagcggcatgaattagaggaaagacatggaacacacaggtagtcggtttgagatcatcggcttaaaagtatcctaggatggtaatgacccagaagtatttccagttgtctagtggtgtggtatgcaggaatgagaagtgttttctttccatttcctgttggacaggtggcaatcttagcagagccactatttggagttgataactaaagatgcaaataacgtgactatgccttctggtcatcctangactatttggagttctccaaaaccttgtaagaggcatgtcaggcatgcagtaaaagcatctacaacttcagctgggcactggcagcataggtctcatcttggaccatacagtcccactttatagaagagagtggaagttctccaaaacaatatccacaacaaagtctgacctcactctgagggagatgggaagtgggaggaagaaggactaaccagctccctggagtaagaggaatttgctttccctgtctgcccaccaggggctatatgtgccacctttcaggttggggccaaggaagtgatgtcagtgtgacagaagggagagttagacctccagacgtcagcctccctcccatggggtacattttcaatctgagtgttgttgccttagctgtgttggtattagcttgattggttggtccgctggttatgaggtgtagggaggcagtttttgtttagtttttaggactttgcctcttcctttgtccttagcataatttctaggcagagcatccacgaagtcggttttcattgccagctcaagagcgacaatcatttacgagttcctatgttatgttaggtgccttatgtatattatcccaaatccactgcatggtttaaatacaggcactggaatataaatgaaaaaggtcattacagtcactgactttctgcaggaccttaaacatttctctttccacaagtttccccttaatcatgtgtcaaacctctcttcctgacgggaatgttgtgctataatgaatctgcataacgcttgggattctaggaggaaggaaggttccatggacatgtaagtacagcatattcccctcagtcttctaggagggcagagtgaatcccagaactggtaagattgggaatctgagcattgccactttaatcttagaatatttatcattttgacacatcctgttttttagagaggaaaacaaacacagtttctgcattggtagtgtaaagcataccttgttaggaacgtgttttgtaagacacatttgggttgtcattctagagcatgtcaaactttgtacttcaaaatatatttagtatgattgttagtggtaacatatatcaaggctttgaattaactgttttatttaattttcacaagaagcacttattttagccataggaaaaccaatctgagctacaaatagttctttaaaataagcccaggttatttagctattctagaaagtgccgacttctttcaagaagcaggcattgtaggacagctgagaattatcacatagcctaaattctagcctggcagcaagagtcacatctgagatgtccaaaaaaaaaaaaaaaaaacacctgatctacattgaaagggggtagactaacgtatgtgagaccattttcctatttgcagttacaaggttaaagaactttgaaggtcattcggctgctaagaggcatgtcgaacactctgtgtggctctttcacagtaaaccctcctaagagcagaagacacatggctgttagtgtctgcgtttagatttaatttctcaaataaaggcccttggctgcgtatcatttcatccagttataaactagggctcctgcaagcacccccattctaagggtgaattattgaaatcagttgctatttgatgagtcacaactggcccagcaggcagggcatttgaagtcatggtcatcaaaaagaaatgattgttttttgaaaagctaaatgcttaaaatgcttctagagggaagtcgtggggcgtgtgctcattctctttaaaatcagggttgttgagtttgtttttaaacatttttataagttcatgagaaaaaatatataaattctaagaaccaacactgtattcccagaaacatgaccctcgctggtcttgggtccacatatcattggactctgggggacacaaagatgcctgtgacactttggtgttgccgagttagtcaacaattattctgggaaaaagcagaattgaattcttctctagatgtcctaccagggttggccaagggccacaaagcaggctaataaattcccacaggatccagacaccaggcaaaattgctctaagaagccagttactgtcatccctctatggttctagaaaaaatagtacaaaaatgacaggtcatcctatgagcgtcatgccaatgaaaccccatcttctggagaagcccttgaatcagaattatcttttttcttgatgtcgtcagatgcagccagtttcttaatttttttaaaaactgtatgtttctgtggtatgtatatttgtacacctaactacctggcacttggaaatcacagcactactcagaggcaattgaataaagagaaatttaattttaaatatcaagtcctgtcaaacatttctcaaacttctgattttatcaaaggtttgccagccaataaagtgcatcccaagtatacaggggagaaagctagactcctacagggtcctagagtttaagtaatttttttgttattaatataggtaataatttttctaatttttattttttggttccaaatgtaaagctccttgtgtttacctctgtttatgtcattcttgacatgtttatctaaattatgtgtgctctgtgacaggtgaaatgtaaatctgggatccatagtcaagatatcataaggacctacttcccagcctacctttcttcctctacctgataatgataatactcaaaataacaacattcaaaggaaacacaaagaaatcctgctttcacatctcctatttcttgggctccttaataactactgatggtttgttcatgaaaaaaaatttttaaatcaaaagattgtacttggccctgagttgaaaaaatttcaaaaatcaaaagtttgtacttggccctgagttgaaaaaaaaaattcacattctaagaataaacagaaaaatgttcttcttggaagtaaataacaaaagccatagtgttttcatttgtcttttcttcaggatacacggtagaagtcagagaatctttgatacttttatttggtgcaataatcaaggccatgcaacaacccaaaatcaagcattttggttcaagtcaggatgacatgagtggggacagaagctgtggcagtcattcaaataatctcatgggtcctgaggaaaagacaggagttaatgtattaagtttctactatatgcaggaactgtgttaaatattttacataagttttgataatagctaacattagctgagcacaaaatttgggccctgatttgtgctgagtatctttcacagattactgcttttaatcagcagtccttgtgagctaggtatgatcattatccccattttatagattacagatgagattctgaggcacaaagaggctaagtaacttgccaaagatcatacgatgttaagtaatggcccctggattcagtctgcagcctgaattcttaaccaattatactgtgatttcattattcttcagaattacactaaaaagaaggtattattcccattttacagatgaggtatctaagctcagagaagctaaacaacttgtgcaacaatcactaagcttataagcagtggattagggttagatttagatatttgtctggcatccaaacctgtgctctccctacagtaccacatggtttccacagtctcatcagaccccggaatttcactccctgagactgcttaattgtgaatttcccaaactgattcaccaagagcctactgtctctgctttgtagatagctttgaccacattcaatgacattaggaaagactccatttcccaagatggctcagaaaatcagatgctatgacgcatgttgaaagtgaaaacccatctctgagaaagaagcatctgttttattagtaaaaaaaaaaaaatgaaatttacagcaatgttgtgtgacttctcaaaattctttcattttcttatttcagaatgaatagtgttgttcgttggctgggaatggggaagaatgtgatttttaaaaataaagcataatcaaactctgcataaaag

SEQ ID NO: 338508 - DNA, 6126 bp, Homo sapiens
  misc_feature (2105)..(2105): n is a, c, g, or t
ttttttagatgaagtttcactcttgttgcccaggctagagtgcaatggcacaatctcagctcactgcaacctctgcctcccgggttccagcgattctcttgctttagcttcccaagcagctgagattacaggcatgagccaccatgcccgactaattttgtatttttggcagagacagggtttcaccatgttggccaggctgatcatgaactccttacctcagatgatccacccactcgacttcccaaagtgctgggattacaggcgtaagccactgtgcccagcccatgaaactatttaaacaacatgtgattacttggccacttttctattcaaaaatatggtttattagtcctgattatgtgcccttcttggcagacagaatgatactgtgtacttctgctgaaagaaatagaaactctcttccattttctagataagagagtcctaaaacagaatttccaaaaactccagttagtggaggtaacttaaaatcctctttaagaaggataattatctttaaaggttgattcccaccctccctccccagttacttaaggaactaagtgagtacatctccagttgcccatgaaagcataagtttgttttcctcagctgaggcaagtggtagagtatacaggataacgaagtaacatgtaaaaggcaggacgcacataaaggtgtacatggctattgtttcacctggagaaaccacatgattgggacctgaaggtttactgactgactacaggggctgattgtgaagcacgaggaaccccatgtgtgtggagactgtagggtgagagcacacaattattagcatcatttctgagtgatctcacagattttttttcttgtgtttgttttgctttttgacaactgcttctcccacgttccttgcaattctattctctcaccttcactttactatttgtattcgatggaccaggataattcaggcaaggttaccttgtaaacttgaattggccacacaccatgttgtcacccagctggctatgaagtgaataatggtactgaaagtaaacctgaagacctttctcagatctattttaagtctgagtctgaccaaccatggaaaatattcgacatgaattaatgtagagaactataaagcatttatgacagctccaagaaaaatcatctactctatgcaggagatatgtttagagacctctcagaaaaacttgcctggtttgagggtacacagtaccattttaatcttctgaaaatatctgtattcctgctctttttctgctgtcactgtcaatctgctatatttttcactatcctattaaaatattactgtctcctttatctgttcaatgtccatattttaaaaaaatcttccttgtatgagctattctgatccaaataatttctctgatatttctctatatggctcccacaacaatttcattgttgttagcatatctatttctccatacattgtaaaactgtaatccttaggtatttctaaaacataaagaggagaattaagtcagctgcagaacaatggggctgattcttctgctttttctctggaaaatctttcattgcttttggtggaaatttacctagaggttacaaccacaggatgtagcttggtctcttatttgcctttttgggaaaccaattaagattaatacaggataaaggaaaaaagcaatctattcattatataacacagttgtttgtattacttgttccctgcaaaggaaatctgttgaatgcttgcattttgaattcttttctaatagaacaaccaaaaaaggcttcttatggtgcagcaggaaaaaagatcatttttatagctttgcattcttaacatagcatttaaagagcggcatgaattagaggaaagacatggaacacacaggtagtcggtttgagatcatcggcttaaaagtatcctaggatggtaatgacccagaagtatttccagttgtctagtggtgtggtatgcaggaatgagaagtgttttctttccatttcctgttggacaggtggcaatcttagcagagccactatttggagttgataactaaagatgcaaataacgtgactatgccttctggtcatcctangactatttggagttctccaaaaccttgtaagaggcatgtcaggcatgcagtaaaagcatctacaacttcagctgggcactggcagcataggtctcatcttggaccatacagtcccactttatagaagagagtggaagttctccaaaacaatatccacaacaaagtctgacctcactctgagggagatgggaagtgggaggaagaaggactaaccagctccctggagtaagaggaatttgctttccctgtctgcccaccaggggctatatgtgccacctttcaggttggggccaaggaagtgatgtcagtgtgacagaagggagagttagacctccagacgtcagcctccctcccatggggtacattttcaatctgagtgttgttgccttagctgtgttggtattagcttgattggttggtccgctggttatgaggtgtagggaggcagtttttgtttagtttttaggactttgcctcttcctttgtccttagcataatttctaggcagagcatccacgaagtcggttttcattgccagctcaagagcgacaatcatttacgagttcctatgttatgttaggtgccttatgtatattatcccaaatccactgcatggtttaaatacaggcactggaatataaatgaaaaaggtcattacagtcactgactttctgcaggaccttaaacatttctctttccacaagtttccccttaatcatgtgtcaaacctctcttcctgacgggaatgttgtgctataatgaatctgcataacgcttgggattctaggaggaaggaaggttccatggacatgtaagtacagcatattcccctcagtcttctaggagggcagagtgaatcccagaactggtaagattgggaatctgagcattgccactttaatcttagaatatttatcattttgacacatcctgttttttagagaggaaaacaaacacagtttctgcattggtagtgtaaagcataccttgttaggaacgtgttttgtaagacacatttgggttgtcattctagagcatgtcaaactttgtacttcaaaatatatttagtatgattgttagtggtaacatatatcaaggctttgaattaactgttttatttaattttcacaagaagcacttattttagccataggaaaaccaatctgagctacaaatagttctttaaaataagcccaggttatttagctattctagaaagtgccgacttctttcaagaagcaggcattgtaggacagctgagaattatcacatagcctaaattctagcctggcagcaagagtcacatctgagatgtccaaaaaaaaaaaaaaaaaacacctgatctacattgaaagggggtagactaacgtatgtgagaccattttcctatttgcagttacaaggttaaagaactttgaaggtcattcggctgctaagaggcatgtcgaacactctgtgtggctctttcacagtaaaccctcctaagagcagaagacacatggctgttagtgtctgcgtttagatttaatttctcaaataaaggcccttggctgcgtatcatttcatccagttataaactagggctcctgcaagcacccccattctaagggtgaattattgaaatcagttgctatttgatgagtcacaactggcccagcaggcagggcatttgaagtcatggtcatcaaaaagaaatgattgttttttgaaaagctaaatgcttaaaatgcttctagagggaagtcgtggggcgtgtgctcattctctttaaaatcagggttgttgagtttgtttttaaacatttttataagttcatgagaaaaaatatataaattctaagaaccaacactgtattcccagaaacatgaccctcgctggtcttgggtccacatatcattggactctgggggacacaaagatgcctgtgacactttggtgttgccgagttagtcaacaattattctgggaaaaagcagaattgaattcttctctagatgtcctaccagggttggccaagggccacaaagcaggctaataaattcccacaggatccagacaccaggcaaaattgctctaagaagccagttactgtcatccctctatggttctagaaaaaatagtacaaaaatgacaggtcatcctatgagcgtcatgccaatgaaaccccatcttctggagaagcccttgaatcagaattatcttttttcttgatgtcgtcagatgcagccagtttcttaatttttttaaaaactgtatgtttctgtggtatgtatatttgtacacctaactacctggcacttggaaatcacagcactactcagaggcaattgaataaagagaaatttaattttaaatatcaagtcctgtcaaacatttctcaaacttctgattttatcaaaggtttgccagccaataaagtgcatcccaagtatacaggggagaaagctagactcctacagggtcctagagtttaagtaatttttttgttattaatataggtaataatttttctaatttttattttttggttccaaatgtaaagctccttgtgtttacctctgtttatgtcattcttgacatgtttatctaaattatgtgtgctctgtgacaggtgaaatgtaaatctgggatccatagtcaagatatcataaggacctacttcccagcctacctttcttcctctacctgataatgataatactcaaaataacaacattcaaaggaaacacaaagaaatcctgctttcacatctcctatttcttgggctccttaataactactgatggtttgttcatgaaaaaaaatttttaaatcaaaagattgtacttggccctgagttgaaaaaatttcaaaaatcaaaagtttgtacttggccctgagttgaaaaaaaaaattcacattctaagaataaacagaaaaatgttcttcttggaagtaaataacaaaagccatagtgttttcatttgtcttttcttcaggatacacggtagaagtcagagaatctttgatacttttatttggtgcaataatcaaggccatgcaacaacccaaaatcaagcattttggttcaagtcaggatgacatgagtggggacagaagctgtggcagtcattcaaataatctcatgggtcctgaggaaaagacaggagttaatgtattaagtttctactatatgcaggaactgtgttaaatattttacataagttttgataatagctaacattagctgagcacaaaatttgggccctgatttgtgctgagtatctttcacagattactgcttttaatcagcagtccttgtgagctaggtatgatcattatccccattttatagattacagatgagattctgaggcacaaagaggctaagtaacttgccaaagatcatacgatgttaagtaatggcccctggattcagtctgcagcctgaattcttaaccaattatactgtgatttcattattcttcagaattacactaaaaagaaggtattattcccattttacagatgaggtatctaagctcagagaagctaaacaacttgtgcaacaatcactaagcttataagcagtggattagggttagatttagatatttgtctggcatccaaacctgtgctctccctacagtaccacatggtttccacagtctcatcagaccccggaatttcactccctgagactgcttaattgtgaatttcccaaactgattcaccaagagcctactgtctctgctttgtagatagctttgaccacattcaatgacattaggaaagactccatttcccaagatggctcagaaaatcagatgctatgacgcatgttgaaagtgaaaacccatctctgagaaagaagcatctgttttattagtaaaaaaaaaaaaatgaaatttacagcaatgttgtgtgacttctcaaaattctttcattttcttatttcagaatgaatagtgttgttcgttggctgggaatggggaagaatgtgatttttaaaaataaagcataatcaaactctgcataaaag

SEQ ID NO: 338509 - DNA, 8257 bp, Homo sapiens
  misc_feature (1)..(2): n is a, c, g, or t
  misc_feature (4)..(4): n is a, c, g, or t
  misc_feature (4236)..(4236): n is a, c, g, or t
nnantggcagagagttgagagtgatccaggaaagtgaagcaggagatgcgggactgccccgggtggaagtgatcctcgactgctctgacaggcagaagacagaagggtgcaggcttcaggcaggaaaggagtgtgtggattctccagtggaaggagggcagtcagaagcacctccttctctggtatcctttgccgtctcatcagaaggcacagagcagggagaagatccacgctcggaaaaagatcacagcagacctcacaagcaccgagcgcggcatgcacggctcaggaggagtgaaagcctgtcagaaaaacaagtgaaggaagcaaaatctaaatgcaaaagcattgcccttcttctaacggatgctcccaaccccaactccaagggggtgttgatgtttaagaagcgacgtcggagggccaggaaatacaccctagttagctacggtactggcgagcttgagcgagaggcggacgaggaggaagaaggtgacaaggaggatacatgtgaagtagcatttctcagtgccagcaaaaagaacaggaatattgcaggaggccaaaaggagaagcacgacaaaacccatgtttacttttaaagagcccaaagtaagcccaaatcctgaactcttgtcactccttcaaaattcagaaggcaaacggggcactggagctggaggtgattccggaccggaagaagactacctcagcttgggggcagaggcttgtaatttcatgcaaagctcctctgccaaacaaaagacccctcctcctgctgctccaaaacctgcagtcaagtcctcatcctcccaaccagtaactccagtttccccagtctggtctccaggagtggctcccacccaacctcctgccttccccacatccaacccatcaaagggcaccgttgtctcctccatcaaaatagcccagccttcttaccctcctgcccggcctgcaagtactttgaacgtggctggtcccttcaaaggaccacaagcagcagtagccagtcagaattacacacccaaaccaacagtttccacaccaacagtcaatgctgttcagcctggtgcagtgggaccatccaatgagcttccaggaatgagtgggagaggagctcagctctttgctaaaaggcagtcgagaatggagaagtatgtggtcgattcagacacggtgcaggcccacgctgctcgagctcagtctcccactccatctctcccggccagttggaagtactcctccaatgtccgagcacctcctcctgtggcctataatcctatccactcgccgtcttacccactggctgctctcaagtctcagccatcagctgcacagccctccaaaatgggcaagaaaaagggaaagaaacccctcaatgcattagatgtcatgaagcaccaaccgtatcagctcaatgcatccttgtttactttccaacctccagatgcaaaggatggcctcccccagaagtcatcagtcaaggtcaattcagccctggccatgaagcaagctcttcctccccggccagtgaatgctgcctcacctacgaatgtgcaggcttcgtcagtgtactcggtaccagcctatacctctcctccttccttctttgcagaggcctcctcaccagtcagtgcatccccagtgcctgtgggcattcccacctcgccaaagcaagaatcagcctcatcatcttattttgtggcaccaaggccaaagttctcagccaagaaaagtggtgtcacaattcaggtgtggaaaccatctgttgtggaagagtaatcttgtagctgaagctgagtgtccactttgcttgaaatgaattgtttgcagtgtttcttgagtccctgagaatgcctagcaaagtcctcaacttacttaatttcagatatgtcacctcctaatctgggtccaaggagtataatatttttaatgagtcaaaaatccaactcagattgacctaaaatatatttatcttctttgcacacttaaaaaatccaggagcaccccaaaatagacatgtaccgttatattaagtaagcaggagacttaggatttgtgctgtagccacaagaaagacagtgatcagtgatatcaaacatcaggaatcagcctttatgtaacataacagctgtcctcctatggtgaaaggttcaaatgtagtgaaggtataacctatattgactgagatttcccttttaggtagtgccttatctctattactagtgttaaaggaataaggaatctatgaaggacagggagcagctctggtctgtcaatctcagccacctgtttgatatcacagagaagatactcggaggattgttggaatgtatatagtttagtaagaagtgggtaagaaagagggtcttaattactgagcacttattatgtattaggttctttgccagatgtttttacatatataaactcatttcagaaaacttatttaaagtaaatggggccgggtatggtggttcatgcctggaatcctagcactttgggaggctgaggtaggaggactgcttgaggccgggagttggagaccagcctgagcaacatagtgagaccctgtctcaataataataataataataataatagtaataatgaagtaaatgggataaggaaagaaggataattatctttaaaggttgattcccaccctccctccccagttacttaaggaactaagtgagtacatctccagttgcccatgaaagcataagtttgttttcctcagctgaggcaagtggtagagtatacaggataacgaagtaacatgtaaaaggcaggacgcacataaaggtgtacatggctattgtttcacctggagaaaccacatgattgggacctgaaggtttactgactgactacaggggctgattgtgaagcacgaggaaccccatgtgtgtggagactgtagggtgagagcacacaattattagcatcatttctgagtgatctcacagattttttttcttgtgtttgttttgctttttgacaactgcttctcccacgttccttgcaattctattctctcaccttcactttactatttgtattcgatggaccaggataattcaggcaaggttaccttgtaaacttgaattggccacacaccatgttgtcacccagctggctatgaagtgaataatggtactgaaagtaaacctgaagacctttctcagatctattttaagtctgagtctgaccaaccatggaaaatattcgacatgaattaatgtagagaactataaagcatttatgacagctccaagaaaaatcatctactctatgcaggagatatgtttagagacctctcagaaaaacttgcctggtttgagggtacacagtaccattttaatcttctgaaaatatctgtattcctgctctttttctgctgtcactgtcaatctgctatatttttcactatcctattaaaatattactgtctcctttatctgttcaatgtccatattttaaaaaaatcttccttgtatgagctattctgatccaaataatttctctgatatttctctatatggctcccacaacaatttcattgttgttagcatatctatttctccatacattgtaaaactgtaatccttaggtatttctaaaacataaagaggagaattaagtcagctgcagaacaatggggctgattcttctgctttttctctggaaaatctttcattgcttttggtggaaatttacctagaggttacaaccacaggatgtagcttggtctcttatttgcctttttgggaaaccaattaagattaatacaggataaaggaaaaaagcaatctattcattatataacacagttgtttgtattacttgttccctgcaaaggaaatctgttgaatgcttgcattttgaattcttttctaatagaacaaccaaaaaaggcttcttatggtgcagcaggaaaaaagatcatttttatagctttgcattcttaacatagcatttaaagagcggcatgaattagaggaaagacatggaacacacaggtagtcggtttgagatcatcggcttaaaagtatcctaggatggtaatgacccagaagtatttccagttgtctagtggtgtggtatgcaggaatgagaagtgttttctttccatttcctgttggacaggtggcaatcttagcagagccactatttggagttgataactaaagatgcaaataacgtgactatgccttctggtcatcctangactatttggagttctccaaaaccttgtaagaggcatgtcaggcatgcagtaaaagcatctacaacttcagctgggcactggcagcataggtctcatcttggaccatacagtcccactttatagaagagagtggaagttctccaaaacaatatccacaacaaagtctgacctcactctgagggagatgggaagtgggaggaagaaggactaaccagctccctggagtaagaggaatttgctttccctgtctgcccaccaggggctatatgtgccacctttcaggttggggccaaggaagtgatgtcagtgtgacagaagggagagttagacctccagacgtcagcctccctcccatggggtacattttcaatctgagtgttgttgccttagctgtgttggtattagcttgattggttggtccgctggttatgaggtgtagggaggcagtttttgtttagtttttaggactttgcctcttcctttgtccttagcataatttctaggcagagcatccacgaagtcggttttcattgccagctcaagagcgacaatcatttacgagttcctatgttatgttaggtgccttatgtatattatcccaaatccactgcatggtttaaatacaggcactggaatataaatgaaaaaggtcattacagtcactgactttctgcaggaccttaaacatttctctttccacaagtttccccttaatcatgtgtcaaacctctcttcctgacgggaatgttgtgctataatgaatctgcataacgcttgggattctaggaggaaggaaggttccatggacatgtaagtacagcatattcccctcagtcttctaggagggcagagtgaatcccagaactggtaagattgggaatctgagcattgccactttaatcttagaatatttatcattttgacacatcctgttttttagagaggaaaacaaacacagtttctgcattggtagtgtaaagcataccttgttaggaacgtgttttgtaagacacatttgggttgtcattctagagcatgtcaaactttgtacttcaaaatatatttagtatgattgttagtggtaacatatatcaaggctttgaattaactgttttatttaattttcacaagaagcacttattttagccataggaaaaccaatctgagctacaaatagttctttaaaataagcccaggttatttagctattctagaaagtgccgacttctttcaagaagcaggcattgtaggacagctgagaattatcacatagcctaaattctagcctggcagcaagagtcacatctgagatgtccaaaaaaaaaaaaaaaaaacacctgatctacattgaaagggggtagactaacgtatgtgagaccattttcctatttgcagttacaaggttaaagaactttgaaggtcattcggctgctaagaggcatgtcgaacactctgtgtggctctttcacagtaaaccctcctaagagcagaagacacatggctgttagtgtctgcgtttagatttaatttctcaaataaaggcccttggctgcgtatcatttcatccagttataaactagggctcctgcaagcacccccattctaagggtgaattattgaaatcagttgctatttgatgagtcacaactggcccagcaggcagggcatttgaagtcatggtcatcaaaaagaaatgattgttttttgaaaagctaaatgcttaaaatgcttctagagggaagtcgtggggcgtgtgctcattctctttaaaatcagggttgttgagtttgtttttaaacatttttataagttcatgagaaaaaatatataaattctaagaaccaacactgtattcccagaaacatgaccctcgctggtcttgggtccacatatcattggactctgggggacacaaagatgcctgtgacactttggtgttgccgagttagtcaacaattattctgggaaaaagcagaattgaattcttctctagatgtcctaccagggttggccaagggccacaaagcaggctaataaattcccacaggatccagacaccaggcaaaattgctctaagaagccagttactgtcatccctctatggttctagaaaaaatagtacaaaaatgacaggtcatcctatgagcgtcatgccaatgaaaccccatcttctggagaagcccttgaatcagaattatcttttttcttgatgtcgtcagatgcagccagtttcttaatttttttaaaaactgtatgtttctgtggtatgtatatttgtacacctaactacctggcacttggaaatcacagcactactcagaggcaattgaataaagagaaatttaattttaaatatcaagtcctgtcaaacatttctcaaacttctgattttatcaaaggtttgccagccaataaagtgcatcccaagtatacaggggagaaagctagactcctacagggtcctagagtttaagtaatttttttgttattaatataggtaataatttttctaatttttattttttggttccaaatgtaaagctccttgtgtttacctctgtttatgtcattcttgacatgtttatctaaattatgtgtgctctgtgacaggtgaaatgtaaatctgggatccatagtcaagatatcataaggacctacttcccagcctacctttcttcctctacctgataatgataatactcaaaataacaacattcaaaggaaacacaaagaaatcctgctttcacatctcctatttcttgggctccttaataactactgatggtttgttcatgaaaaaaaatttttaaatcaaaagattgtacttggccctgagttgaaaaaatttcaaaaatcaaaagtttgtacttggccctgagttgaaaaaaaaaattcacattctaagaataaacagaaaaatgttcttcttggaagtaaataacaaaagccatagtgttttcatttgtcttttcttcaggatacacggtagaagtcagagaatctttgatacttttatttggtgcaataatcaaggccatgcaacaacccaaaatcaagcattttggttcaagtcaggatgacatgagtggggacagaagctgtggcagtcattcaaataatctcatgggtcctgaggaaaagacaggagttaatgtattaagtttctactatatgcaggaactgtgttaaatattttacataagttttgataatagctaacattagctgagcacaaaatttgggccctgatttgtgctgagtatctttcacagattactgcttttaatcagcagtccttgtgagctaggtatgatcattatccccattttatagattacagatgagattctgaggcacaaagaggctaagtaacttgccaaagatcatacgatgttaagtaatggcccctggattcagtctgcagcctgaattcttaaccaattatactgtgatttcattattcttcagaattacactaaaaagaaggtattattcccattttacagatgaggtatctaagctcagagaagctaaacaacttgtgcaacaatcactaagcttataagcagtggattagggttagatttagatatttgtctggcatccaaacctgtgctctccctacagtaccacatggtttccacagtctcatcagaccccggaatttcactccctgagactgcttaattgtgaatttcccaaactgattcaccaagagcctactgtctctgctttgtagatagctttgaccacattcaatgacattaggaaagactccatttcccaagatggctcagaaaatcagatgctatgacgcatgttgaaagtgaaaacccatctctgagaaagaagcatctgttttattagtaaaaaaaaaaaaatgaaatttacagcaatgttgtgtgacttctcaaaattctttcattttcttatttcagaatgaatagtgttgttcgttggctgggaatggggaagaatgtgatttttaaaaataaagcataatcaaactctgcataaaag

SEQ ID NO: 338510 - DNA, 6855 bp, Homo sapiens
  misc_feature (1)..(2): n is a, c, g, or t
  misc_feature (4)..(4): n is a, c, g, or t
  misc_feature (2834)..(2834): n is a, c, g, or t
nnantggcagagagttgagagtgatccaggaaagtgaagcaggagatgcgggactgccccgggtggaagtgatcctcgactgctctgacaggcagaagacagaagggtgcaggcttcaggcaggaaaggagtgtgtggattctccagtggaaggagggcagtcagaagcacctccttctctggtatcctttgccgtctcatcagaaggcacagagcagggagaagatccacgctcggaaaaagatcacagcagacctcacaagcaccgagcgcggcatgcacggctcaggaggagtgaaagcctgtcagaaaaacaagtgaaggaagcaaaatctaaatgcaaaagcattgcccttcttctaacggatgctcccaaccccaactccaagggggtgttgatgtttaagaagcgacgtcggagggccaggaaatacaccctagttagctacggtactggcgagcttgagcgagaggcggacgaggaggaagaaggtgacaaggaggatacatgtgaagtagcatttcttggtgcaagcgaatcagaggtggatgaagagttattgtctgacgttgacgacaacacacaagttgtgaactttgactgggattctggactggtggacattgaaaagaaactgaacagaggggacaagatggagatgttaccagacaccacaggcaagggagccctcatgtttgccaagaggagggagagaatggatcagatcacagcccaaaaagaagaggacaaggtaggtggaacgccaagcagagaacaagatgctgcccagaccgatggcctgagaaccacgacttcttaccaaagaaaggaggaagagtcggtaagaacgcagagctctgtgagcaaaagctacatcgaggtgagtcatggtcttggccatgttccccaacagaatggcttcagtggggcatctgagacagcaaacatccagaggatggtccccatgaatagaacggccaaacccttcccagggtctgtgaatcagccagctacccccttctcgccaacccgaaacatgacgagtcccattgctgactttcctgcacctccaccttactctgcagtcactcctccccctgacgccttctccagaggggtttcaagtccgattgctggcccagcacagccccctccatggccccagcctgccccgtggtcccagccagccttttacgattcgtctgagcgaatagcttcccgagatgagaggatctcagtgccagcaaaaagaacaggaatattgcaggaggccaaaaggagaagcacgacaaaacccatgtttacttttaaagagcccaaagtaagcccaaatcctgaactcttgtcactccttcaaaattcagaaggcaaacggggcactggagctggaggtgattccggaccggaagaagactacctcagcttgggggcagaggcttgtaatttcatgcaaagctcctctgccaaacaaaagacccctcctcctgctgctccaaaacctgcagtcaagtcctcatcctcccaaccagtaactccagtttccccagtctggtctccaggatgatctcacagattttttttcttgtgtttgttttgctttttgacaactgcttctcccacgttccttgcaattctattctctcaccttcactttactatttgtattcgatggaccaggataattcaggcaaggttaccttgtaaacttgaattggccacacaccatgttgtcacccagctggctatgaagtgaataatggtactgaaagtaaacctgaagacctttctcagatctattttaagtctgagtctgaccaaccatggaaaatattcgacatgaattaatgtagagaactataaagcatttatgacagctccaagaaaaatcatctactctatgcaggagatatgtttagagacctctcagaaaaacttgcctggtttgagggtacacagtaccattttaatcttctgaaaatatctgtattcctgctctttttctgctgtcactgtcaatctgctatatttttcactatcctattaaaatattactgtctcctttatctgttcaatgtccatattttaaaaaaatcttccttgtatgagctattctgatccaaataatttctctgatatttctctatatggctcccacaacaatttcattgttgttagcatatctatttctccatacattgtaaaactgtaatccttaggtatttctaaaacataaagaggagaattaagtcagctgcagaacaatggggctgattcttctgctttttctctggaaaatctttcattgcttttggtggaaatttacctagaggttacaaccacaggatgtagcttggtctcttatttgcctttttgggaaaccaattaagattaatacaggataaaggaaaaaagcaatctattcattatataacacagttgtttgtattacttgttccctgcaaaggaaatctgttgaatgcttgcattttgaattcttttctaatagaacaaccaaaaaaggcttcttatggtgcagcaggaaaaaagatcatttttatagctttgcattcttaacatagcatttaaagagcggcatgaattagaggaaagacatggaacacacaggtagtcggtttgagatcatcggcttaaaagtatcctaggatggtaatgacccagaagtatttccagttgtctagtggtgtggtatgcaggaatgagaagtgttttctttccatttcctgttggacaggtggcaatcttagcagagccactatttggagttgataactaaagatgcaaataacgtgactatgccttctggtcatcctangactatttggagttctccaaaaccttgtaagaggcatgtcaggcatgcagtaaaagcatctacaacttcagctgggcactggcagcataggtctcatcttggaccatacagtcccactttatagaagagagtggaagttctccaaaacaatatccacaacaaagtctgacctcactctgagggagatgggaagtgggaggaagaaggactaaccagctccctggagtaagaggaatttgctttccctgtctgcccaccaggggctatatgtgccacctttcaggttggggccaaggaagtgatgtcagtgtgacagaagggagagttagacctccagacgtcagcctccctcccatggggtacattttcaatctgagtgttgttgccttagctgtgttggtattagcttgattggttggtccgctggttatgaggtgtagggaggcagtttttgtttagtttttaggactttgcctcttcctttgtccttagcataatttctaggcagagcatccacgaagtcggttttcattgccagctcaagagcgacaatcatttacgagttcctatgttatgttaggtgccttatgtatattatcccaaatccactgcatggtttaaatacaggcactggaatataaatgaaaaaggtcattacagtcactgactttctgcaggaccttaaacatttctctttccacaagtttccccttaatcatgtgtcaaacctctcttcctgacgggaatgttgtgctataatgaatctgcataacgcttgggattctaggaggaaggaaggttccatggacatgtaagtacagcatattcccctcagtcttctaggagggcagagtgaatcccagaactggtaagattgggaatctgagcattgccactttaatcttagaatatttatcattttgacacatcctgttttttagagaggaaaacaaacacagtttctgcattggtagtgtaaagcataccttgttaggaacgtgttttgtaagacacatttgggttgtcattctagagcatgtcaaactttgtacttcaaaatatatttagtatgattgttagtggtaacatatatcaaggctttgaattaactgttttatttaattttcacaagaagcacttattttagccataggaaaaccaatctgagctacaaatagttctttaaaataagcccaggttatttagctattctagaaagtgccgacttctttcaagaagcaggcattgtaggacagctgagaattatcacatagcctaaattctagcctggcagcaagagtcacatctgagatgtccaaaaaaaaaaaaaaaaaacacctgatctacattgaaagggggtagactaacgtatgtgagaccattttcctatttgcagttacaaggttaaagaactttgaaggtcattcggctgctaagaggcatgtcgaacactctgtgtggctctttcacagtaaaccctcctaagagcagaagacacatggctgttagtgtctgcgtttagatttaatttctcaaataaaggcccttggctgcgtatcatttcatccagttataaactagggctcctgcaagcacccccattctaagggtgaattattgaaatcagttgctatttgatgagtcacaactggcccagcaggcagggcatttgaagtcatggtcatcaaaaagaaatgattgttttttgaaaagctaaatgcttaaaatgcttctagagggaagtcgtggggcgtgtgctcattctctttaaaatcagggttgttgagtttgtttttaaacatttttataagttcatgagaaaaaatatataaattctaagaaccaacactgtattcccagaaacatgaccctcgctggtcttgggtccacatatcattggactctgggggacacaaagatgcctgtgacactttggtgttgccgagttagtcaacaattattctgggaaaaagcagaattgaattcttctctagatgtcctaccagggttggccaagggccacaaagcaggctaataaattcccacaggatccagacaccaggcaaaattgctctaagaagccagttactgtcatccctctatggttctagaaaaaatagtacaaaaatgacaggtcatcctatgagcgtcatgccaatgaaaccccatcttctggagaagcccttgaatcagaattatcttttttcttgatgtcgtcagatgcagccagtttcttaatttttttaaaaactgtatgtttctgtggtatgtatatttgtacacctaactacctggcacttggaaatcacagcactactcagaggcaattgaataaagagaaatttaattttaaatatcaagtcctgtcaaacatttctcaaacttctgattttatcaaaggtttgccagccaataaagtgcatcccaagtatacaggggagaaagctagactcctacagggtcctagagtttaagtaatttttttgttattaatataggtaataatttttctaatttttattttttggttccaaatgtaaagctccttgtgtttacctctgtttatgtcattcttgacatgtttatctaaattatgtgtgctctgtgacaggtgaaatgtaaatctgggatccatagtcaagatatcataaggacctacttcccagcctacctttcttcctctacctgataatgataatactcaaaataacaacattcaaaggaaacacaaagaaatcctgctttcacatctcctatttcttgggctccttaataactactgatggtttgttcatgaaaaaaaatttttaaatcaaaagattgtacttggccctgagttgaaaaaatttcaaaaatcaaaagtttgtacttggccctgagttgaaaaaaaaaattcacattctaagaataaacagaaaaatgttcttcttggaagtaaataacaaaagccatagtgttttcatttgtcttttcttcaggatacacggtagaagtcagagaatctttgatacttttatttggtgcaataatcaaggccatgcaacaacccaaaatcaagcattttggttcaagtcaggatgacatgagtggggacagaagctgtggcagtcattcaaataatctcatgggtcctgaggaaaagacaggagttaatgtattaagtttctactatatgcaggaactgtgttaaatattttacataagttttgataatagctaacattagctgagcacaaaatttgggccctgatttgtgctgagtatctttcacagattactgcttttaatcagcagtccttgtgagctaggtatgatcattatccccattttatagattacagatgagattctgaggcacaaagaggctaagtaacttgccaaagatcatacgatgttaagtaatggcccctggattcagtctgcagcctgaattcttaaccaattatactgtgatttcattattcttcagaattacactaaaaagaaggtattattcccattttacagatgaggtatctaagctcagagaagctaaacaacttgtgcaacaatcactaagcttataagcagtggattagggttagatttagatatttgtctggcatccaaacctgtgctctccctacagtaccacatggtttccacagtctcatcagaccccggaatttcactccctgagactgcttaattgtgaatttcccaaactgattcaccaagagcctactgtctctgctttgtagatagctttgaccacattcaatgacattaggaaagactccatttcccaagatggctcagaaaatcagatgctatgacgcatgttgaaagtgaaaacccatctctgagaaagaagcatctgttttattagtaaaaaaaaaaaaatgaaatttacagcaatgttgtgtgacttctcaaaattctttcattttcttatttcagaatgaatagtgttgttcgttggctgggaatggggaagaatgtgatttttaaaaataaagcataatcaaactctgcataaaag

SEQ ID NO: 338511 - DNA, 4977 bp, Homo sapiens
  misc_feature (1)..(2): n is a, c, g, or t
  misc_feature (4)..(4): n is a, c, g, or t
nnantggcagagagttgagagtgatccaggaaagtgaagcaggagatgcgggactgccccgggtggaagtgatcctcgactgctctgacaggcagaagacagaagggtgcaggcttcaggcaggaaaggagtgtgtggattctccagtggaaggagggcagtcagaagcacctccttctctggtatcctttgccgtctcatcagaaggcacagagcagggagaagatccacgctcggaaaaagatcacagcagacctcacaagcaccgagcgcggcatgcacggctcaggaggagtgaaagcctgtcagaaaaacaagtgaaggaagcaaaatctaaatgcaaaagcattgcccttcttctaacggatgctcccaaccccaactccaagggggtgttgatgtttaagaagcgacgtcggagggccaggaaatacaccctagttagctacggtactggcgagcttgagcgagaggcggacgaggaggaagaaggtgacaaggaggatacatgtgaagtagcatttcttggtgcaagcgaatcagaggtggatgaagagttattgtctgacgttgacgacaacacacaagttgtgaactttgactgggattctggactggtggacattgaaaagaaactgaacagaggggacaagatggagatgttaccagacaccacaggcaagggagccctcatgtttgccaagaggagggagagaatggatcagatcacagcccaaaaagaagaggacaaggtaggtggaacgccaagcagagaacaagatgctgcccagaccgatggcctgagaaccacgacttcttaccaaagaaaggaggaagagtcggtaagaacgcagagctctgtgagcaaaagctacatcgaggtgagtcatggtcttggccatgttccccaacagaatggcttcagtggggcatctgagacagcaaacatccagaggatggtccccatgaatagaacggccaaacccttcccagggtctgtgaatcagccagctacccccttctcgccaacccgaaacatgacgagtcccattgctgactttcctgcacctccaccttactctgcagtcactcctccccctgacgccttctccagaggggtttcaagtccgattgctggcccagcacagccccctccatggccccagcctgccccgtggtcccagccagccttttacgattcgtctgagcgaatagcttcccgagatgagaggatctcagtgccagcaaaaagaacaggaatattgcaggaggccaaaaggagaagcacgacaaaacccatgtttacttttaaagagcccaaagtaagcccaaatcctgaactcttgtcactccttcaaaattcagaaggcaaacggggcactggagctggaggtgattccggaccggaagaagactacctcagcttgggggcagaggcttgtaatttcatgcaaagctcctctgccaaacaaaagacccctcctcctgctgctccaaaacctgcagtcaagtcctcatcctcccaaccagtaactccagtttccccagtctggtctccaggagtggctcccacccaacctcctgccttccccacatccaacccatcaaagggcaccgttgtctcctccatcaaaatagcccagccttcttaccctcctgcccggcctgcaagtactttgaacgtggctggtcccttcaaaggaccacaagcagcagtagccagtcagaattacacacccaaaccaacagtttccacaccaacagtcaatgctgttcagcctggtgcagtgggaccatccaatgagcttccaggaatgagtgggagaggagctcagctctttgctaaaaggcagtcgagaatggagaagtatgtggtcgattcagacacggtgcaggcccacgctgctcgagctcagtctcccactccatctctcccggccagttggaagtactcctccaatgtccgagcacctcctcctgtggcctataatcctatccactcgccgtcttacccactggctgctctcaagtctcagccatcagctgcacagccctccaaaatgggcaagaaaaagggaaagaaacccctcaatgcattagatgtcatgaagcaccaaccgtatcagctcaatgcatccttgtttactttccaacctccagatgcaaaggatggcctcccccagaagtcatcagtcaaggtcaattcagccctggccatgaagcaagctcttcctccccggccagtgaatgctgcctcacctacgaatgtgcaggcttcgtcagtgtactcggtaccagcctatacctctcctccttccttctttgcagaggcctcctcaccagtcagtgcatccccagtgcctgtgggcattcccacctcgccaaagcaagaatcagcctcatcatcttattttgtggcaccaaggccaaagttctcagccaagaaaagtggtgtcacaattcaggtgtggaaaccatctgttgtggaagagtaatcttgtagctgaagctgagtgtccactttgcttgaaatgaattgtttgcagtgtttcttgagtccctgagaatgcctagcaaagtcctcaacttacttaatttcagatatgtcacctcctaatctgggtccaaggagtataatatttttaatgagtcaaaaatccaactcagattgacctaaaatatatttatcttctttgcacacttaaaaaatccaggagcaccccaaaatagacatgtaccgttatattaagtaagcaggagacttaggatttgtgctgtagccacaagaaagacagtgatcagtgatatcaaacatcaggaatcagcctttatgtaacataacagctgtcctcctatggtgaaaggttcaaatgtagtgaaggtataacctatattgactgagatttcccttttaggtagtgccttatctctattactagtgttaaaggaataaggaatctatgaaggacagggagcagctctggtctgtcaatctcagccacctgtttgatatcacagagaagatactcggaggattgttggaatgtatatagtttagtaagaagtgggtaagaaagagggtcttaattactgagcacttattatgtattaggttctttgccagatgtttttacatatataaactcatttcagaaaacttatttaaagtaaatggggccgggtatggtggttcatgcctggaatcctagcactttgggaggctgaggtaggaggactgcttgaggccgggagttggagaccagcctgagcaacatagtgagaccctgtctcaataataataataataataataatagtaataatgaagtaaatgggataaggaaagaaggataattatctttaaaggttgattcccaccctccctccccagttacttaaggaactaagtgagtacatctccagttgcccatgaaagcataagtttgttttcctcagctgaggcaagtggtagagtatacaggataacgaagtaacatgtaaaaggcaggacgcacataaaggtgtacatggctattgtttcacctggagaaaccacatgattgggacctgaaggtttactgactgactacaggggctgattgtgaagcacgaggaaccccatgtgtgtggagactgtagggtgagagcacacaattattagcatcatttctgagtgatctcacagattttttttcttgtgtttgttttgctttttgacaactgcttctcccacgttccttgcaattctattctctcaccttcactttactatttgtattcgatggaccaggataattcaggcaaggttaccttgtaaacttgaattggccacacaccatgttgtcacccagctggctatgaagtgaataatggtactgaaagtaaacctgaagacctttctcagatctattttaagtctgagtctgaccaaccatggaaaatattcgacatgaattaatgtagagaactataaagcatttatgacagctccaagaaaaatcatctactctatgcaggagatatgtttagagacctctcagaaaaacttgcctggtttgagggtacacagtaccattttaatcttctgaaaatatctgtattcctgctctttttctgctgtcactgtcaatctgctatatttttcactatcctattaaaatattactgtctcctttaaaaaaaaaaaaaacaaaaaaaaaaaaaaaaaaaaaaaaaaaaaaacaaacaaaacaaaaaaaaaaaaaaaaaacaaaccaaaaccaaaaaacaaaaaaaaacaaaaaaaataaaaaaaaaaaaaaaaaaacaaaaaaaaacacacagtcggcgcgcgagaccaacaggatacgagccacacccaaacgcacgcccaagacaaggagcggaggccgcacagacagacgcaaacgtagaccaccgcgcgcccgaagcagcgccaggccacgagcaccggccagacgccagacccaccaactcgcggcgtcggccgtacctcaaccccagaccgaacaacgaagacgaggacgcggccaacacgcacccgcgcccagcaggcaatatgacgaaccaagaagagtgagaacagacaacggagccgcagacggacaccgacaaccgcgacgcacacccgtacgaataagaataataagcacatcgacgaacgcaggtaggcagtgagtcacacacaaacaagacacggtaaagtagacgacccgaccaccacgccaacgaacgacaagcagagcacagaaaaagttacaggagagcacgacagcaactgacctagtcaaagattgataaagaccagcgagaaagtacgaacgacacgcagaagacaaagacacagattgcgagagagccgcgaacagacgcgtagagcggctcgcacccacagtcataatcgacatagcaagtacgagtcgcatgccacgacagaagcaagcgacagtagcaggcagcgaaacagaagacagacag

SEQ ID NO: 338512 - DNA, 3004 bp, Homo sapiens
  misc_feature (1)..(2): n is a, c, g, or t
  misc_feature (4)..(4): n is a, c, g, or t
nnantggcagagagttgagagtgatccaggaaagtgaagcaggagatgcgggactgccccgggtggaagtgatcctcgactgctctgacaggcagaagacagaagggtgcaggcttcaggcaggaaaggagtgtgtggattctccagtggaaggagggcagtcagaagcacctccttctctggtatcctttgccgtctcatcagaaggcacagagcagggagaagatccacgctcggaaaaagatcacagcagacctcacaagcaccgagcgcggcatgcacggctcaggaggagtgaaagcctgtcagaaaaacaagtgaaggaagcaaaatctaaatgcaaaagcattgcccttcttctaacggatgctcccaaccccaactccaagggggtgttgatgtttaagaagcgacgtcggagggccaggaaatacaccctagttagctacggtactggcgagcttgagcgagaggcggacgaggaggaagaaggtgacaaggaggatacatgtgaagtagcatttcttggtgcaagcgaatcagaggtggatgaagagttattgtctgacgttgacgacaacacacaagttgtgaactttgactgggattctggactggtggacattgaaaagaaactgaacagaggggacaagatggagatgttaccagacaccacaggcaagggagccctcatgtttgccaagaggagggagagaatggatcagatcacagcccaaaaagaagaggacaaggtaggtggaacgccaagcagagaacaagatgctgcccagaccgatggcctgagaaccacgacttcttaccaaagaaaggaggaagagtcggtaagaacgcagagctctgtgagcaaaagctacatcgaggtgagtcatggtcttggccatgttccccaacagaatggcttcagtggggcatctgagacagcaaacatccagaggatggtccccatgaatagaacggccaaacccttcccagggtctgtgaatcagccagctacccccttctcgccaacccgaaacatgacgagtcccattgctgactttcctgcacctccaccttactctgcagtcactcctccccctgacgccttctccagaggggtttcaagtccgattgctggcccagcacagccccctccatggccccagcctgccccgtggtcccagccagccttttacgattcgtctgagcgaatagcttcccgagatgagaggatctcagtgccagcaaaaagaacaggaatattgcaggaggccaaaaggagaagcacgacaaaacccatgtttacttttaaagagcccaaagtaagcccaaatcctgaactcttgtcactccttcaaaattcagaaggcaaacggggcactggagctggaggtgattccggaccggaagaagactacctcagcttgggggcagaggcttgtaatttcatgcaaagctcctctgccaaacaaaagacccctcctcctgctgctccaaaacctgcagtcaagtcctcatcctcccaaccagtaactccagtttccccagtctggtctccaggagtggctcccacccaacctcctgccttccccacatccaacccatcaaagggcaccgttgtctcctccatcaaaatagcccagccttcttaccctcctgcccggcctgcaagtactttgaacgtggctggtcccttcaaaggaccacaagcagcagtagccagtcagaattacacacccaaaccaacagtttccacaccaacagtcaatgctgttcagcctggtgcagtgggaccatccaatgagcttccaggaatgagtgggagaggagctcagctctttgctaaaaggcagtcgagaatggagaagtatgtggtcgattcagacacggtgcaggcccacgctgctcgagctcagtctcccactccatctctcccggccagttggaagtactcctccaatgtccgagcacctcctcctgtggcctataatcctatccactcgccgtcttacccactggctgctctcaagtctcagccatcagctgcacagccctccaaaatgggcaagaaaaagggaaagaaacccctcaatgcattagatgtcatgaagcaccaaccgtatcagctcaatgcatccttgtttactttccaacctccagatgcaaaggatggcctcccccagaagtcatcagtcaaggtcaattcagccctggccatgaagcaagctcttcctccccggccagtgaatgctgcctcacctacgaatgtgcaggcttcgtcagtgtactcggtaccagcctatacctctcctccttccttctttgcagaggcctcctcaccagtcagtgcatccccagtgcctgtgggcattcccacctcgccaaagcaagaatcagcctcatcatcttattttgtggcaccaaggccaaagttctcagccaagaaaagtggtgtcacaattcaggagagtgggcgctccctttctcttcctggaagatcagtcccaccccccatttctacatctccttgggtataccagcctacttatagttactctagtaaaccaaccgatggactagagaaagcaaacaagagaccaactccttgggaagcagcagcaaagtctcctctcggtctagtggatgatgctttccaacccagaaacatccaggaatccattgtggcaaatgtggtttcagcagctcggaggaaggtgcttccagggcctccagaggattggaatgaaagactgtcctatattcctcaaacccagaaggcctatatgggctcatgtggaaggcaagagtataatgtcacagccaataataatatgtccaccacctcccaatatggttcacagttgccatatgcatattataggcaggcttcaagaaatgattctgcaatcatgtccatggaaaccaggtctgattactgtcttccagtagctgattacaactacaacccacacccaaggggatggagacgccaaacatgaaagtt

SEQ ID NO: 338513 - DNA, 1619 bp, Homo sapiens
  misc_feature (1)..(2): n is a, c, g, or t
  misc_feature (4)..(4): n is a, c, g, or t
  misc_feature (1612)..(1612): n is a, c, g, or t
nnantggcagagagttgagagtgatccaggaaagtgaagcaggagatgcgggactgccccgggtggaagtgatcctcgactgctctgacaggcagaagacagaagggtgcaggcttcaggcaggaaaggagtgtgtggattctccagtggaaggagggcagtcagaagcacctccttctctggtatcctttgccgtctcatcagaaggcacagagcagggagaagatccacgctcggaaaaagatcacagcagacctcacaagcaccgagcgcggcatgcacggctcaggaggagtgaaagcctgtcagaaaaacaagtgaaggaagcaaaatctaaatgcaaaagcattgcccttcttctaacggatgctcccaaccccaactccaagggggtgttgatgtttaagaagcgacgtcggagggccaggaaatacaccctagttagctacggtactggcgagcttgagcgagaggcggacgaggaggaagaaggtgacaaggaggatacatgtgaagtagcatttcttggtgcaagcgaatcagaggtggatgaagagttattgtctgacgttgacgacaacacacaagttgtgaactttgactgggattctggactggtggacattgaaaagaaactgaacagaggggacaagatggagatgttaccagacaccacaggcaagggagccctcatgtttgccaagaggagggagagaatggatcagatcacagcccaaaaagaagaggacaaggtaggtggaacgccaagcagagaacaagatgctgcccagaccgatggcctgagaaccacgacttcttaccaaagaaaggaggaagagtcggtaagaacgcagagctctgtgagcaaaagctacatcgaggtgagtcatggtcttggccatgttccccaacagaatggcttcagtggggcatctgagacagcaaacatccagaggatggtccccatgaatagaacggccaaacccttcccagggtctgtgaatcagccagctacccccttctcgccaacccgaaacatgacgagtcccattgctgactttcctgcacctccaccttactctgcagtcactcctccccctgacgccttctccagaggggtttcaagtccgattgctggcccagcacagccccctccatggccccagcctgccccgtggtcccagccagccttttacgattcgtctgagcgaatagcttcccgagatgagaggatctcagtgccagcaaaaagaacaggaatattgcaggaggccaaaaggagaagcacgacaaaacccatgtttacttttaaagagcccaaagtaagcccaaatcctgaactcttgtcactccttcaaaattcagaaggcaaacggggcactggagctggaggtgattccggaccggaagaagactacctcagcttgggggcagaggcttgtaatttcatgcaaagctcctctgccaaacaaaagacccctcctcctgctgctccaaaacctgcagtcaagtcctcatcctcccaaccagtaactccagtttccccagtctggtctccaggagtggctcccacccaacctcctgccttcccattgtttgtttgtatctcctntctaggt

SEQ ID NO: 338514 - DNA, 942 bp, Homo sapiens
  misc_feature (1)..(2): n is a, c, g, or t
  misc_feature (4)..(4): n is a, c, g, or t
nnantggcagagagttgagagtgatccaggaaagtgaagcaggagatgcgggactgccccgggtggaagtgatcctcgactgctctgacaggcagaagacagaagggtgcaggcttcaggcaggaaaggagtgtgtggattctccagtggaaggagggcagtcagaagcacctccttctctggtatcctttgccgtctcatcagaaggcacagagcagggagaagatccacgctcggaaaaagatcacagcagacctcacaagcaccgagcgcggcatgcacggctcaggaggagtgaaagcctgtcagaaaaacaagtgaaggaagcaaaatctaaatgcaaaagcattgcccttcttctaacggatgctcccaaccccaactccaagggggtgttgatgtttaagaagcgacgtcggagggccaggaaatacaccctagttagctacggtactggcgagcttgagcgagaggcggacgaggaggaagaaggtgacaaggaggatacatgtgaagtagcatttcttggtgcaagcgaatcagaggtggatgaagagttattgtctgacgttgacgacaacacacaagttgtgaactttgactgggattctggactggtggacattgaaaagaaactgaacagaggggacaagatggagatgttaccagacaccacaggcaagggagccctcatgtttgccaagaggagggagagaatggatcagatcacagcccaaaaagaagaggacaaggtaggtggaacgccaagcagagaacaagatgctgcccagaccgatggcctgagaaccacgacttcttaccaaagaaaggaggaagagtcggtaagaacgcagagctctgtgagcaaaagctacatcgaggtgaaacacgcgcatgtttcaccacccacgtatgtcgtcgtgaaacaatgcgggtaccgag

SEQ ID NO: 338515 - DNA, 7298 bp, Homo sapiens
  misc_feature (1)..(2): n is a, c, g, or t
  misc_feature (4)..(4): n is a, c, g, or t
  misc_feature (4946)..(4946): n is a, c, g, or t
nnantggcagagagttgagagtgatccaggaaagtgaagcaggagatgcgggactgccccgggtggaagtgatcctcgactgctctgacaggcagaagacagaagggtgcaggcttcaggcaggaaaggagtgtgtggattctccagtggaaggagggcagtcagaagcacctccttctctggtatcctttgccgtctcatcagaaggcacagagcagggagaagatccacgctcggaaaaagatcacagcagacctcacaagcaccgagcgcggcatgcacggctcaggaggagtgaaagcctgtcagaaaaacaagtgaaggaagcaaaatctaaatgcaaaagcattgcccttcttctaacggatgctcccaaccccaactccaagggggtgttgatgtttaagaagcgacgtcggagggccaggaaatacaccctagttagctacggtactggcgagcttgagcgagaggcggacgaggaggaagaaggtgacaaggaggatacatgtgaagtagcatttcttggtgcaagcgaatcagaggtggatgaagagttattgtctgacgttgacgacaacacacaagttgtgaactttgactgggattctggactggtggacattgaaaagaaactgaacagaggggacaagatggagatgttaccagacaccacaggcaagggagccctcatgtttgccaagaggagggagagaatggatcagatcacagcccaaaaagaagaggacaaggtaggtggaacgccaagcagagaacaagatgctgcccagaccgatggcctgagaaccacgacttcttaccaaagaaaggaggaagagtcggtaagaacgcagagctctgtgagcaaaagctacatcgaggtgagtcatggtcttggccatgttccccaacagaatggcttcagtggggcatctgagacagcaaacatccagaggatggtccccatgaatagaacggccaaacccttcccagggtctgtgaatcagccagctacccccttctcgccaacccgaaacatgacgagtcccattgctgactttcctgcacctccaccttactctgcagtcactcctccccctgacgccttctccagaggggtttcaagtccgattgctggcccagcacagccccctccatggccccagcctgccccgtggtcccagccagccttttacgattcgtctgagcgaatagcttcccgagatgagaggatctcagtgccagcaaaaagaacaggaatattgcaggaggccaaaaggagaagcacgacaaaacccatgtttacttttaaagagcccaaagtaagcccaaatcctgaactcttgtcactccttcaaaattcagaaggcaaacggggcactggagctggaggtgattccggaccggaagaagactacctcagcttgggggcagaggcttgtaatttcatgcaaagctcctctgccaaacaaaagacccctcctcctgctgctccaaaacctgcagtcaagtcctcatcctcccaaccagtaactccagtttccccagtctggtctccaggagtggctcccacccaacctcctgccttccccacatccaacccatcaaagggcaccgttgtctcctccatcaaaatagcccagccttcttaccctcctgcccggcctgcaagtactttgaacgtggctggtcccttcaaaggaccacaagcagcagtagccagtcagaattacacacccaaaccaacagtttccacaccaacagtcaatgctgttcagcctggtgcagtgggaccatccaatgagcttccaggaatgagtgggagaggagctcagctctttgctaaaaggcagtcgagaatggagaagtatgtggtcgattcagacacggtgcaggcccacgctgctcgagctcagtctcccactccatctctcccggccagttggaagtactcctccaatgtccgagcacctcctcctgtggcctataatcctatccactcgccgtcttacccactggctgctctcaagtctcagccatcagctgcacagccctccaaaatgggcaagaaaaagggaaagaaacccctcaatgcattagatgtcatgaagcaccaaccgtatcagctcaatgcatccttgtttactttccaacctccagatgcaaaggatggcctcccccagaagtcatcagtcaaggtcaattcagccctggccatgaagcaagctcttcctccccggccagtgaatgctgcctcacctacgaatgtgcaggcttcgtcagtgtactcggtaccagcctatacctctcctccttccttctttgcagaggcctcctcaccagtcagtgcatccccagtgcctgtgggcattcccacctcgccaaagcaagaatcagcctcatcatcttattttgtggcaccaaggccaaagttctcagccaagaaaagtggtgtcacaattcaggtgtggaaaccatctgttgtggaagagtaatcttgtagctgaagctgagtgtccactttgcttgaaatgaattgtttgcagtgtttcttgagtccctgagaatgcctagcaaagtcctcaacttacttaatttcagatatgtcacctcctaatctgggtccaaggagtataatatttttaatgagtcaaaaatccaactcagattgacctaaaatatatttatcttctttgcacacttaaaaaatccaggagcaccccaaaatagacatgtaccgttatattaagtaagcaggagacttaggatttgtgctgtagccacaagaaagacagtgatcagtgatatcaaacatcaggaatcagcctttatgtaacataacagctgtcctcctatggtgaaaggttcaaatgtagtgaaggtataacctatattgactgagatttcccttttaggtagtgccttatctctattactagtgttaaaggaataaggaatctatgaaggacagggagcagctctggtctgtcaatctcagccacctgtttgatatcacagagaagatactcggaggattgttggaatgtatatagtttagtaagaagtgggtaagaaagagggtcttaattactgagcacttattatgtattaggttctttgccagatgtttttacatatataaactcatttcagaaaacttatttaaagtaaatggggccgggtatggtggttcatgcctggaatcctagcactttgggaggctgaggtaggaggactgcttgaggccgggagttggagaccagcctgagcaacatagtgagaccctgtctcaataataataataataataataatagtaataatgaagtaaatgggataaggaaagaaggataattatctttaaaggttgattcccaccctccctccccagttacttaaggaactaagtgagtacatctccagttgcccatgaaagcataagtttgttttcctcagctgaggcaagtggtagagtatacaggataacgaagtaacatgtaaaaggcaggacgcacataaaggtgtacatggctattgtttcacctggagaaaccacatgattgggacctgaaggtttactgactgactacaggggctgattgtgaagcacgaggaaccccatgtgtgtggagactgtagggtgagagcacacaattattagcatcatttctgagtgatctcacagattttttttcttgtgtttgttttgctttttgacaactgcttctcccacgttccttgcaattctattctctcaccttcactttactatttgtattcgatggaccaggataattcaggcaaggttaccttgtaaacttgaattggccacacaccatgttgtcacccagctggctatgaagtgaataatggtactgaaagtaaacctgaagacctttctcagatctattttaagtctgagtctgaccaaccatggaaaatattcgacatgaattaatgtagagaactataaagcatttatgacagctccaagaaaaatcatctactctatgcaggagatatgtttagagacctctcagaaaaacttgcctggtttgagggtacacagtaccattttaatcttctgaaaatatctgtattcctgctctttttctgctgtcactgtcaatctgctatatttttcactatcctattaaaatattactgtctcctttatctgttcaatgtccatattttaaaaaaatcttccttgtatgagctattctgatccaaataatttctctgatatttctctatatggctcccacaacaatttcattgttgttagcatatctatttctccatacattgtaaaactgtaatccttaggtatttctaaaacataaagaggagaattaagtcagctgcagaacaatggggctgattcttctgctttttctctggaaaatctttcattgcttttggtggaaatttacctagaggttacaaccacaggatgtagcttggtctcttatttgcctttttgggaaaccaattaagattaatacaggataaaggaaaaaagcaatctattcattatataacacagttgtttgtattacttgttccctgcaaaggaaatctgttgaatgcttgcattttgaattcttttctaatagaacaaccaaaaaaggcttcttatggtgcagcaggaaaaaagatcatttttatagctttgcattcttaacatagcatttaaagagcggcatgaattagaggaaagacatggaacacacaggtagtcggtttgagatcatcggcttaaaagtatcctaggatggtaatgacccagaagtatttccagttgtctagtggtgtggtatgcaggaatgagaagtgttttctttccatttcctgttggacaggtggcaatcttagcagagccactatttggagttgataactaaagatgcaaataacgtgactatgccttctggtcatcctangactatttggagttctccaaaaccttgtaagaggcatgtcaggcatgcagtaaaagcatctacaacttcagctgggcactggcagcataggtctcatcttggaccatacagtcccactttatagaagagagtggaagttctccaaaacaatatccacaacaaagtctgacctcactctgagggagatgggaagtgggaggaagaaggactaaccagctccctggagtaagaggaatttgctttccctgtctgcccaccaggggctatatgtgccacctttcaggttggggccaaggaagtgatgtcagtgtgacagaagggagagttagacctccagacgtcagcctccctcccatggggtacattttcaatctgagtgttgttgccttagctgtgttggtattagcttgattggttggtccgctggttatgaggtgtagggaggcagtttttgtttagtttttaggactttgcctcttcctttgtccttagcataatttctaggcagagcatccacgaagtcggttttcattgccagctcaagagcgacaatcatttacgagttcctatgttatgttaggtgccttatgtatattatcccaaatccactgcatggtttaaatacaggcactggaatataaatgaaaaaggtcattacagtcactgactttctgcaggaccttaaacatttctctttccacaagtttccccttaatcatgtgtcaaacctctcttcctgacgggaatgttgtgctataatgaatctgcataacgcttgggattctaggaggaaggaaggttccatggacatgtaagtacagcatattcccctcagtcttctaggagggcagagtgaatcccagaactggtaagattgggaatctgagcattgccactttaatcttagaatatttatcattttgacacatcctgttttttagagaggaaaacaaacacagtttctgcattggtagtgtaaagcataccttgttaggaacgtgttttgtaagacacatttgggttgtcattctagagcatgtcaaactttgtacttcaaaatatatttagtatgattgttagtggtaacatatatcaaggctttgaattaactgttttatttaattttcacaagaagcacttattttagccataggaaaaccaatctgagctacaaatagttctttaaaataagcccaggttatttagctattctagaaagtgccgacttctttcaagaagcaggcattgtaggacagctgagaattatcacatagcctaaattctagcctggcagcaagagtcacatctgagatgtccaaaaaaaaaaaaaaaaaacacctgatctacattgaaagggggtagactaacgtatgtgagaccattttcctatttgcagttacaaggttaaagaactttgaaggtcattcggctgctaagaggcatgtcgaacactctgtgtggctctttcacagtaaaccctcctaagagcagaagacacatggctgttagtgtctgcgtttagatttaatttctcaaataaaggcccttggctgcgtatcatttcatccagttataaactagggctcctgcaagcacccccattctaagggtgaattattgaaatcagttgctatttgatgagtcacaactggcccagcaggcagggcatttgaagtcatggtcatcaaaaagaaatgattgttttttgaaaagctaaatgcttaaaatgcttctagagggaagtcgtggggcgtgtgctcattctctttaaaatcagggttgttgagtttgtttttaaacatttttataagttcatgagaaaaaatatataaattctaagaaccaacactgtattcccagaaacatgaccctcgctggtcttgggtccacatatcattggactctgggggacacaaagatgcctgtgacactttggtgttgccgagttagtcaacaattattctgggaaaaagcagaattgaattcttctctagatgtcctaccagggttggccaagggccacaaagcaggctaataaattcccacaggatccagacaccaggcaaaattgctctaagaagccagttactgtcatccctctatggttctagaaaaaatagtacaaaaatgacaggtcatcctatgagcgtcatgccaatgaaaccccatcttctggagaagcccttgaatcagaattatcttttttcttgatgtcgtcagatgcagccagtttcttaatttttttaaaaactgtatgtttctgtggtatgtatatttgtacacctaactacctggcacttggaaatcacagcactactcagaggcaattgaataaagagaaatttaatttta

SEQ ID NO: 338516 - DNA, 3875 bp, Homo sapiens
  misc_feature (1)..(2): n is a, c, g, or t
  misc_feature (4)..(4): n is a, c, g, or t
nnantggcagagagttgagagtgatccaggaaagtgaagcaggagatgcgggactgccccgggtggaagtgatcctcgactgctctgacaggcagaagacagaagggtgcaggcttcaggcaggaaaggagtgtgtggattctccagtggaaggagggcagtcagaagcacctccttctctggtatcctttgccgtctcatcagaaggcacagagcagggagaagatccacgctcggaaaaagatcacagcagacctcacaagcaccgagcgcggcatgcacggctcaggaggagtgaaagcctgtcagaaaaacaagtgaaggaagcaaaatctaaatgcaaaagcattgcccttcttctaacggatgctcccaaccccaactccaagggggtgttgatgtttaagaagcgacgtcggagggccaggaaatacaccctagttagctacggtactggcgagcttgagcgagaggcggacgaggaggaagaaggtgacaaggaggatacatgtgaagtagcatttcttggtgcaagcgaatcagaggtggatgaagagttattgtctgacgttgacgacaacacacaagttgtgaactttgactgggattctggactggtggacattgaaaagaaactgaacagaggggacaagatggagatgttaccagacaccacaggcaagggagccctcatgtttgccaagaggagggagagaatggatcagatcacagcccaaaaagaagaggacaaggtaggtggaacgccaagcagagaacaagatgctgcccagaccgatggcctgagaaccacgacttcttaccaaagaaaggaggaagagtcggtaagaacgcagagctctgtgagcaaaagctacatcgaggtgagtcatggtcttggccatgttccccaacagaatggcttcagtggggcatctgagacagcaaacatccagaggatggtccccatgaatagaacggccaaacccttcccagggtctgtgaatcagccagctacccccttctcgccaacccgaaacatgacgagtcccattgctgactttcctgcacctccaccttactctgcagtcactcctccccctgacgccttctccagaggggtttcaagtccgattgctggcccagcacagccccctccatggccccagcctgccccgtggtcccagccagccttttacgattcgtctgagcgaatagcttcccgagatgagaggatctcagtgccagcaaaaagaacaggaatattgcaggaggccaaaaggagaagcacgacaaaacccatgtttacttttaaagagcccaaagtaagcccaaatcctgaactcttgtcactccttcaaaattcagaaggcaaacggggcactggagctggaggtgattccggaccggaagaagactacctcagcttgggggcagaggcttgtaatttcatgcaaagctcctctgccaaacaaaagacccctcctcctgctgctccaaaacctgcagtcaagtcctcatcctcccaaccagtaactccagtttccccagtctggtctccaggagtggctcccacccaacctcctgccttccccacatccaacccatcaaagggcaccgttgtctcctccatcaaaatagcccagccttcttaccctcctgcccggcctgcaagtactttgaacgtggctggtcccttcaaaggaccacaagcagcagtagccagtcagaattacacacccaaaccaacagtttccacaccaacagtcaatgctgttcagcctggtgcagtgggaccatccaatgagcttccaggaatgagtgggagaggagctcagctctttgctaaaaggcagtcgagaatggagaagtatgtggtcgattcagacacggtgcaggcccacgctgctcgagctcagtctcccactccatctctcccggccagttggaagtactcctccaatgtccgagcacctcctcctgtggcctataatcctatccactcgccgtcttacccactggctgctctcaagtctcagccatcagctgcacagccctccaaaatgggcaagaaaaagggaaagaaacccctcaatgcattagatgtcatgaagcaccaaccgtatcagctcaatgcatccttgtttactttccaacctccagatgcaaaggatggcctcccccagaagtcatcagtcaaggtcaattcagccctggccatgaagcaagctcttcctccccggccagtgaatgctgcctcacctacgaatgtgcaggcttcgtcagtgtactcggtaccagcctatacctctcctccttccttctttgcagaggcctcctcaccagtcagtgcatccccagtgcctgtgggcattcccacctcgccaaagcaagaatcagcctcatcatcttattttgtggcaccaaggccaaagttctcagccaagaaaagtggtgtcacaattcaggtgaaatgtaaatctgggatccatagtcaagatatcataaggacctacttcccagcctacctttcttcctctacctgataatgataatactcaaaataacaacattcaaaggaaacacaaagaaatcctgctttcacatctcctatttcttgggctccttaataactactgatggtttgttcatgaaaaaaaatttttaaatcaaaagattgtacttggccctgagttgaaaaaatttcaaaaatcaaaagtttgtacttggccctgagttgaaaaaaaaaattcacattctaagaataaacagaaaaatgttcttcttggaagtaaataacaaaagccatagtgttttcatttgtcttttcttcaggatacacggtagaagtcagagaatctttgatacttttatttggtgcaataatcaaggccatgcaacaacccaaaatcaagcattttggttcaagtcaggatgacatgagtggggacagaagctgtggcagtcattcaaataatctcatgggtcctgaggaaaagacaggagttaatgtattaagtttctactatatgcaggaactgtgttaaatattttacataagttttgataatagctaacattagctgagcacaaaatttgggccctgatttgtgctgagtatctttcacagattactgcttttaatcagcagtccttgtgagctaggtatgatcattatccccattttatagattacagatgagattctgaggcacaaagaggctaagtaacttgccaaagatcatacgatgttaagtaatggcccctggattcagtctgcagcctgaattcttaaccaattatactgtgatttcattattcttcagaattacactaaaaagaaggtattattcccattttacagatgaggtatctaagctcagagaagctaaacaacttgtgcaacaatcactaagcttataagcagtggattagggttagatttagatatttgtctggcatccaaacctgtgctctccctacagtaccacatggtttccacagtctcatcagaccccggaatttcactccctgagactgcttaattgtgaatttcccaaactgattcaccaagagcctactgtctctgctttgtagatagctttgaccacattcaatgacattaggaaagactccatttcccaagatggctcagaaaatcagatgctatgacgcatgttgaaagtgaaaacccatctctgagaaagaagcatctgttttattagtaaaaaaaaaaaaatgaaatttacagcaatgttgtgtgacttctcaaaattctttcattttcttatttcagaatgaatagtgttgttcgttggctgggaatggggaagaatgtgatttttaaaaataaagcataatcaaactctgcataaaag

SEQ ID NO: 338517 - DNA, 1739 bp, Homo sapiens
  misc_feature (1)..(2): n is a, c, g, or t
  misc_feature (4)..(4): n is a, c, g, or t
nnantggcagagagttgagagtgatccaggaaagtgaagcaggagatgcgggactgccccgggtggaagtgatcctcgactgctctgacaggcagaagacagaagggtgcaggcttcaggcaggaaaggagtgtgtggattctccagtggaaggagggcagtcagaagcacctccttctctggtatcctttgccgtctcatcagaaggcacagagcagggagaagatccacgctcggaaaaagatcacagcagacctcacaagcaccgagcgcggcatgcacggctcaggaggagtgaaagcctgtcagaaaaacaagtgaaggaagcaaaatctaaatgcaaaagcattgcccttcttctaacggatgctcccaaccccaactccaagggggtgttgatgtttaagaagcgacgtcggagggccaggaaatacaccctagttagctacggtactggcgagcttgagcgagaggcggacgaggaggaagaaggtgacaaggaggatacatgtgaagtagcatttcttggtgcaagcgaatcagaggtggatgaagagttattgtctgacgttgacgacaacacacaagttgtgaactttgactgggattctggactggtggacattgaaaagaaactgaacagaggggacaagatggagatgttaccagacaccacaggcaagggagccctcatgtttgccaagaggagggagagaatggatcagatcacagcccaaaaagaagaggacaaggtaggtggaacgccaagcagagaacaagatgctgcccagaccgatggcctgagaaccacgacttcttaccaaagaaaggaggaagagtcggtaagaacgcagagctctgtgagcaaaagctacatcgaggtgagtcatggtcttggccatgttccccaacagaatggcttcagtggggcatctgagacagcaaacatccagaggatggtccccatgaatagaacggccaaacccttcccagggtctgtgaatcagccagctacccccttctcgccaacccgaaacatgacgagtcccattgctgactttcctgcacctccaccttactctgcagtcactcctccccctgacgccttctccagaggggtttcaagtccgattgctggcccagcacagccccctccatggccccagcctgccccgtggtcccagccagccttttacgattcgtctgagcgaatagcttcccgagatgagaggatctcagtgccagcaaaaagaacaggaatattgcaggaggccaaaaggagaagcacgacaaaacccatgtttacttttaaagagcccaaagtaagcccaaatcctgaactcttgtcactccttcaaaattcagaaggcaaacggggcactggagctggaggtgattccggaccggaagaagactacctcagcttgggggcagaggcttgtaatttcatgcaaagctcctctgccaaacaaaagacccctcctcctgctgctccaaaacctgcagtcaagtcctcatcctcccaaccagtaactccagtttccccagtctggtctccaggagtggctcccacccaacctcctgccttccccacatccaacccatcaaagggcaccgttgtctcctccatcaaaatagcccagccttcttaccctcctgcccggcctgcaagtactttgaacgtggctggtcccttcaaaggaccacaagcagcaggaggaggacggtacgagctagtg

SEQ ID NO: 338518 - DNA, 762 bp, Homo sapiens
  misc_feature (1)..(2): n is a, c, g, or t
  misc_feature (4)..(4): n is a, c, g, or t
nnantggcagagagttgagagtgatccaggaaagtgaagcaggagatgcgggactgccccgggtggaagtgatcctcgactgctctgacaggcagaagacagaagggtgcaggcttcaggcaggaaaggagtgtgtggattctccagtggaaggagggcagtcagaagcacctccttctctggtatcctttgccgtctcatcagaaggcacagagcagggagaagatccacgctcggaaaaagatcacagcagacctcacaagcaccgagcgcggcatgcacggctcaggaggagtgaaagcctgtcagaaaaacaagtgaaggaagcaaaatctaaatgcaaaagcattgcccttcttctaacggatgctcccaaccccaactccaagggggtgttgatgtttaagaagcgacgtcggagggccaggaaatacaccctagttagctacggtactggcgagcttgagcgagaggcggacgaggaggaagaaggtgacaaggaggatacatgtgaagtagcatttcttggtgcaagcgaatcagaggtggatgaagagttattgtctgacgttgacgacaacacacaagttgtgaactttgactgggattctggactggtggacattgaaaagaaactgaacagaggggacaagatggagatgttaccagacaccacaaggcgccacgcaaagagccccccgatgagccacgcgaccgggccacccaacgtgccccacaaagagccggtaccgagctgattca

SEQ ID NO: 338519 - DNA, 774 bp, Homo sapiens
tagctgggactacaggcgcccaccaccaaacccggctaattttttgtactttcagtagaggtggggtttcaccgtgttagccaggatggtctcgatctcctgaccttgtgatccacccacctcagcctcccaaagtgctgggattacaggcgtgagccactgcgcccggccgagatggagtttttccttgttaggccggtctcgaactcccgacctcaggcaatccgcctgcctcggcctcccaaagtgctgggattacaggcgtgagccaccattcccggccagttacagagattttatggtgaagagggaaattgaattctacattggctggccatctggtgagtgtgatggtgataatagtcttcacaaaagatgaacgaaaggatggctgagcaagggtgaccactcagccaaagtttgacaatagtgatttgtagttgacccatttgatacaagtttctaattccttaactctcttcaacagcttgggaacagagaaaggaaatggaagttgcccagggtcagaagggttacaaggataggggattctagggtaacagggagtatttccatgtaatggcccaccatggagaatccataacagtgatgaaggtctaagacagtagttttccatatgttccttggagccctaaaatttcactgcaatgcctgggggttgggggggcgggtgttgacagccctcctgatttaaccaaggtaaattttacttgtttattaattatgggagttccgtggcatctctcattagaa

SEQ ID NO: 338520 - DNA, 464 bp, Homo sapiens
gaggtatctttctagagaaaaaacagtattagctgggcacagtggctcacacctgtaattccagcactttgggaggccaaggcaggagaatcacctgagctcaggagttagagaccagccagggcaacataggaaaaccctatctccacaaaaataataaaagattagctgggcatgatggtacatgcctgtggtgtcagctactcactgatcacaccactgcactccagcatgggtgacagagcaagaccctgtcagagtggaggggtacagggacggggtaagacagtggggactgaaagagagagagaaataaaggaaggaaggcagggaggaagggggaggggggaggtagggtagaaggaaagaaaggaagggagggaagagaggaagggaaggaagggaaagaaaagaagggagggaaagaggattaaaatgcccattagggctgggcgccgtggctc

SEQ ID NO: 338521 - DNA, 288 bp, Homo sapiens
aacccccacctcccgggttcaagcgattctcctgcctcagccttcccagtagctgggattacaggcaaccgccaccacgcccagctaattttttttatatttttagtagggacagggtttcaccatgttggccaggctggtttcgaactcctgacctcaagtggtccgcccgccttggcctcccaaagtgctaggattataggtgtgaaccaccgcacctggccccagataattttttaatagtctctcgtattactgagttttttcatattatatataaagattctg

SEQ ID NO: 338522 - DNA, 1693 bp, Homo sapiens
gagccaccgtccgagccttgcggagcgcggcagtgggcgccggctgcccgcagcccctgacccggccccggacggagcgccggccgcaccaccgccctctggccgttgcctcaccggctcggcaagatgtcggtgaaggagggcgcacagcgcaagtgggcagcgctgaaggagaagctggggccacaggattcggaccccacggaggccaacctggagagcgcggaccctgagctgtgcatccggctgctccagatgccctctgtggtcaactactccggcctgcgcaagcgcctggagggcagcgacggcggctggatggtgcagttcctggagcagagcggcctggacctgctgctggaggcgctggcgcggctgtcgggccgcggcgttgcacgtatctccgacgccctgctgcagctcacctgcgtcagctgcgtgcgcgccgtcatgaactcgcggcagggcatcgagtacatcctcagcaaccagggctacgtgcgccagctctcccaggccctggacacatccaacgtgatggtgaagaagcaggtgtttgagctactggctgccctgtgcatctactctcccgagggccacgtgctgaccctggacgccctggaccactacaagacggtgtgcagccagcagtaccgcttcagcattgtcatgaacgagctctccggcagcgacaacgtgccctacgtggtcaccctgcttagcgtgatcaacgccgtcatcttgggccccgaggacctgcgcgcgcgcacccagctgcggaacgagtttatcgggctgcagctgctggacgtcctggctcgcctgcggtgagtccccactgtagcggtcctgccggctccccctcctgctcccaaggccaggcccacctgccctttggctcccagccacctcacctaagcagcacctccagatggcagggaggtggctccctcggagtaaccccaggggtccagccagaagccaggtctcaggctagaatccagctcactgtccctggcagctgcccacagaaactagggttgcagcagccatagaaaggacagaatgagctcatatcctttgcacaccgtggatggagctggaggccgtgatcctaagtgaaccaacccagaaacagaaaatgaaatgccaataagagggaactacagggtggttcacgtggacgcaagatggagacagggacacgggctccagggcgagagttgaaaaactacctacagggtacagtgttcgtcgctacttggtgtcaggcccactagaacaagggtccccaaccgccaggctgcggaccggtacctggcctattggaaccgggccacgcagcaggaagtgagcggtgggcgggcattcctgcctgagctgcacctcatgtcagatcagcactgcattagattctccagcgcacgcacgcgcgcaagggatccaggctgcgcgctcctcatgacaatctaatgcctgatgatcgggggtggaacagttttatccctaaaccattcccgtcaccccagtctatggaaaaattgtcttccacaaaaccagtccctggtgccaaaaaggctggggaccactgccctagaaggcaaatcgcctacgttacacagtgtaccatgtggcaaacacgcacatgtacccccgagtctaaaataaaaattttttaaaaaagaaaaactag

SEQ ID NO: 338523 - DNA, 447 bp, Homo sapiens
ggggagcctgcccttggccccaacccatcctctgcccaggggaggtggccgctttttcctgcctcttcctcaagcccccatccctccctctccggctcccttctcccttgaccctggacatcccctactgcagcccaggaatgcaccctggaggaagtggttgagcggctcctgtctgtcaaggggcgacccagaccgagccccctggtcaaggcccataaaagcgtccaggccaacctagaccagagccagaggggcagctccccgcaaaacactacaacccccaagcccagcgtggagggccagcagccagcagcagctgctgcctgcgagcccgtggaccacgcccagagtgagagcatcctgaaagtttcgcagcccagagccctggagcagcaggcgtccaccccacccccacccccacccccacccctgctccctggttcc

SEQ ID NO: 338524 - DNA, 514 bp, Homo sapiens
ggggagcctgcccttggccccaacccatcctctgcccaggggaggtggccgctttttcctgcctcttcctcaagcccccatccctccctctccggctcccttctcccttgaccctggacatcccctactgcagcccaggaatgcaccctggaggaagtggttgagcggctcctgtctgtcaaggggcgacccagaccgagccccctggtcaaggcccataaaagcgtccaggccaacctagaccagagccagaggggcagctccccgcaaaacactacaacccccaagcccagcgtggagggccagcagccagcagcagctgctgcctgcgagcccgtggaccacgcccagagtgagagcatcctgaaagtttcgcagctcgcccctgagttgcagctcgcccctgagttgcagctcgcccctgagttagcagctcgcccctgagttagcagctcgcccgctgagtctagcagctcgcgcctgagttagcagctcagcacctgaggttagcagc

SEQ ID NO: 338525 - DNA, 545 bp, Homo sapiens
gagccaccgtccgagccttgcggagcgcggcagtgggcgccggctgcccgcagcccctgacccggccccggacggagcgccggccgcaccaccgccctctggccgttgcctcaccggctcggcaagatgtcggtgaaggagggcgcacagcgcaagtgggcagcgctgaaggagaagctggggccacaggattcggaccccacggaggccaacctggagagcgcggaccctgagctgtgcatccggctgctccagatgccctctgtggtcaactactccggcctgcgcaagcgcctggagggcagcgacggcggctggatggtgcagttcctggagcagagcggcctggacctgctgctggaggcgctggcgcggctgtcgggccgcggcgttgcacgtatctccgacgccctgctgcagctcacctgcgtcagctgcgtgcgcgccgtcatgaactcgcggcagggcatcgagtacatcctcagcaaccaggcccagggcccgagaggcaggccccgagatacagccccgagagtagtaccacc

SEQ ID NO: 338526 - DNA, 429 bp, Homo sapiens
aggccctggagagcctcgtgaaccgggccgtgctcctggccagcgatgcccaggaatgcaccctggaggaagtggttgagcggctcctgtctgtcaaggggcgacccagaccgagccccctggtcaaggcccataaaagcgtccaggccaacctagaccagagccagaggggcagctccccgcaaaacactacaacccccaagcccagcgtggagggccagcagccagcagcagctgctgcctgcgagcccgtggaccacgcccagagtgagagcatcctgaaagtttcgcagctcgcccctgagttgcagctcgcccctgagttgcagctcgcccctgagttagcagctcgcccctgagttagcagctcgcccgctgagtctagcagctcgcgcctgagttagcagctcagcacctgaggttagcagc

SEQ ID NO: 338527 - DNA, 541 bp, Homo sapiens
tgataaaaagttgcagttggcccacagctcacagcctaatgctcacggtccgctgggcccaccaagccagcaggcccccatacagtgcctttgtatgaactggatggggaaaaaaaaaaaaaacatcttttcccctgagccagggtgcatggcttggcatgcaggatatggactggaaatcacacctcaccacttccctcagcttgaagccccttacatggtacatacacacatacatactctctatgttaggaagagaatgtgaaattggggtgctcttttgggaattacacattctgggggctcagcacaggtgttgcaaccaagtagtatgtaaaatatgaggctgggcacagtacctcttgctcagtctttcttgagctaaagagcactggtccaagccaagtgtatacatatgcctaagaccacatccagcccagccaaattgctcaacatgcagatgaacttacggaaatctgttatcagaatctttctctatgaaacagaattattattattattattatttttgaaagagcct

SEQ ID NO: 338528 - DNA, 702 bp, Homo sapiens
ttggaaaatctggctgggcgtggtggctcacgcgtgtaatcccagcactttgggaggctaaggtgggcagatgacgaggtcaagagatggagaccttcctggccaacgtggtgaaacgctgtctgtactaaaaatacaaaaattagctgggcgtgatggcgggcactgtaatcccagctactcgggaggccaaggcagaagaatcgcttgaacccaggaggcagaggtggcagtgagccgagattgcgccactcgcagagcaatctgcgagactcatctctaaaaaaaccaaacaaatgaaaaaaaaaaccaattcattggtttttcacgtattcacagaattctgcagtcatcaaccagtcgattacagaatattttcatcaccttaaaaagaaaccctttagctatcagcccccccaacctcttgtcctcctccagccttaggcagctactaatctatctctctctatttgcttattctagacacttcatataaacagaatcacataatatgtggtcttctgtgattggcttctttcactaagcatgatgtttttggggtccagccacattgtagcatgtatcagaacttcattccttcatatggcttcatattattccattgtgtagatagatgtggcacattttgtttatttatctttttgggtgtttgggttgttttcaccttttggctattatgaa

SEQ ID NO: 338529 - DNA, 149 bp, Homo sapiens
acattagtaattatcaaagagtaatgtggaagcattcctattttagtacattcagcagtattccaaaggacaaaaatataccttagctctaggaataatgggtgtgtacctaataaaaggttatgtttcacaaatcaattctgaaaact

SEQ ID NO: 338530 - DNA, 695 bp, Homo sapiens
aaatgaagaaaagaacagttctttttttcttgggactgcgattacatatggtcctgcaggtggttgatgcactgttcattttgttctttttccctgtttcattttgtgcagttgttcactgatctttacttctgtaatatctaaccttctgctgtcaatccctccctccctccctccttcgttcctttctctctcttctcttcctcttccttttctcttctctttcttgcctgtgcagagcagggctgctccataggcaaagtagcccagcgtatttttcatttcagatactgtatatcccctctagaagtttaatttggattttttttcatgtcttccatttctctcctcatatttattatttcctcttctttcttttttgagatgaggtctcactctctcttccaggctggagtgcactggcatgagatctcagctcactgcaacctccacctcccaggttcaagcgacccttctgcctcagcctcctgagtagctgggattacaagtgtgcaccaccacgcccagctaatttttgtatttttagtagagaccaagtttcaccatattggccaggctggtctcagactcctaacctcaagttatccacccaccttggcctcccaaagtgctgggattacaggcttgagacactgctcctggcccgatcctgtgtctttaaaaaaaaaaaaaaa

SEQ ID NO: 338531 - DNA, 762 bp, Homo sapiens
gcctccggcggacgctccacgtgtccctcgccgcgccccgtctacccgcccctgccctgaggaccctagtccaacatggcggcgcccagcggagggtggaacggcgtcggcgcgagcttgtgggccgcgctgctcctaggggccgtggcgctgaggccggcggaggcggtgtccgagcccacgacggtggcgtttgacgtgcggcccggcggcgtcgtgcattccttctcccataacgtgggcccgggggacaaatatacgtgtatgttcacttacgcctctcaaggagggaccaatgagcaatggcagatgagtctggggaccagcgaagaccaccagcacttcacctgcaccatctggaggccccaggggaagtcctatctgtacttcacacagttcaaggcagaggtgcggggcgctgagattgagtacgccatggcctactctaaagccgcatttgaaagggaaagtgatgtccctctgaaaactgaggaatttgaagtgaccaaaacagcagaggtacggaaagatggggatggggtagaggtgacgccacccccatccaagggtgggcaatcggggcagtttggagaggggggtcagccataggggtcctggagactgtagaccaggcatccacaaactgattctataaaggccacctcgtcaatatcttcagctttgtggcactgtgggttctgtctagagctgtgccattgtggcacaaagctgctgcagacagtatgtccatgcgtgggtgtg

SEQ ID NO: 338532 - DNA, 373 bp, Homo sapiens
  misc_feature (336)..(336): n is a, c, g, or t
cttttttttccttccattctctaggacaaatatacgtgtatgttcacttacgcctctcaaggagggaccaatgagcaatggcagtgagcagggtccctcagccagcgggagattctctgtctttgaaaagcagggtccctccagccagcaggagtttctgtccctcacagtcagtgctatgtcttggttgcttttgactttatgaaagaacacatcattttgcttttctgtttgcactgaaaatctgtagagggcaagctgacaagcagtctggtgtgagctggtaatttgtaaaaacatcaatctcaaggcttgttgcaaaaacaaacacagacnacatggaagtgggacctgtccctggagacagcctcgc

SEQ ID NO: 338533 - DNA, 169 bp, Homo sapiens
gcggccgcctactactactactgctcgaattcaagcttctaacgatgtacggggacatgagcctgcagaactgctttcctatgtttacccaggggacctcctttcagatgaactgggaagagatgaaatgttttttcatatttaaataaataagaacattaaaaagcaa

SEQ ID NO: 338534 - DNA, 1069 bp, Homo sapiens
caagtgtgtatagtcgatcctgggtgttatttcagtacgatgggttgcgctgtccctgtcctgacgtggccctattgtccattccacatggcggcgcccagcggagggtggaacggcgtcggcgcgagcttgtgggccgcgctgctcctaggggccgtggcgctgaggccggcggaggcggtgtccgagcccacgacggtggcgtttgacgtgcggcccggcggcgtcgtgcattccttctcccataacgtgggcccgggggacaaatatacgtgtatgttcacttacgcctctcaaggagggaccaatgagcaatggcagatgagtctggggaccagcgaagaccaccagcacttcacctgcaccatctggaggccccaggggaagtcctatctgtacttcacacagttcaaggcagaggtgcggggcgctgagattgagtacgccatggcctactctaaagccgcatttgaaagggaaagtgatgtccctctgaaaactgaggaatttgaagtgaccaaaacagcagtggctcacaggcccggggcattcaaagctgagctgtccaagctggtgattgtggccaaggcatcgcgcactgagctgtgaccagcagccctgttgcgggtggcaccttctcatctccggtgaagctgaaggggcctgtgtccctgaaagggccagcacatcactggttttctaggagggactcttaagttttctacctgggctgacgttgccttgtccggaggggcttgcagggtggctgaagccctggggcagagaacagagggtccagggccctcctggctcccaacagcttctcagttcccacttcctgctgagctcttctggactcaggatcgcagatccggggcacaaagagggtggggaacatgggggctatgctggggaaagcagccatgctccccccgacctccagccgagcatccttcatgagcctgcagaactgctttcctatgtttacccaggggacctcctttcagatgaactgggaagagatgaaatgttttttcatatttaaataaataagaacattaaaaagcaa

SEQ ID NO: 338535 - DNA, 1137 bp, Homo sapiens
gcctccggcggacgctccacgtgtccctcgccgcgccccgtctacccgcccctgccctgaggaccctagtccaacatggcggcgcccagcggagggtggaacggcgtcggcgcgagcttgtgggccgcgctgctcctaggggccgtggcgctgaggccggcggaggcggtgtccgagcccacgacggtggcgtttgacgtgcggcccggcggcgtcgtgcattccttctcccataacgtgggcccgggggacaaatatacgtgtatgttcacttacgcctctcaaggagggaccaatgagcaatggcagatgagtctggggaccagcgaagaccaccagcacttcacctgcaccatctggaggccccaggggaagtcctatctgtacttcacacagttcaaggcagaggtgcggggcgctgagattgagtacgccatggcctactctaaagccgcatttgaaagggaaagtgatgtccctctgaaaactgaggaatttgaagtgaccaaaacagcagtggctcacaggcccggggcattcaaagctgagctgtccaagctggtgattgtggccaaggcatcgcgcactgagctgtgaccagcagccctgttgcgggtggcaccttctcatctccggtgaagctgaaggggcctgtgtccctgaaagggccagcacatcactggttttctaggagggactcttaagttttctacctgggctgacgttgccttgtccggaggggcttgcagggtggctgaagccctggggcagagaacagagggtccagggccctcctggctcccaacagcttctcagttcccacttcctgctgagctcttctggactcaggatcgcagatccggggcacaaagagggtggggaacatgggggctatgctggggaaagcagccatgctccccccgacctccagccgagcatccttcatgagcctgcagaactgctttcctatgtttacccaggggacctcctttcagatgaactgggaagagatgaaatgttttttcatatttaaataaataagaacattaaaaagcaaaaaaaaaaaacacacaccaccccaaaaaacccccggggctctttccgggggcgacaacaaggtcttaaggggcccgggcc

SEQ ID NO: 338536 - DNA, 958 bp, Homo sapiens
gcctccggcggacgctccacgtgtccctcgccgcgccccgtctacccgcccctgccctgaggaccctagtccaacatggcggcgcccagcggagggtggaacggcgtcggcgcgagcttgtgggccgcgctgctcctaggggccgtggcgctgaggccggcggaggcggtgtccgagcccacgacggtggcgtttgacgtgcggcccggcggcgtcgtgcattccttctcccataacgtgggcccgggggacaaatatacgtgtatgttcacttacgcctctcaaggagggaccaatgagcaatggcagatgagtctggggaccagcgaagaccaccagcacttcacctgcaccatctggaggccccaggggaagtcctatctgtacttcacacagttcaaggcagaggtgcggggcgctgagattgagtacgccatggcctactctaaagccgcatttgaaagggaaagtgatgtccctctgaaaactgaggaatttgaagtgaccaaaacagcagtggctcacaggcccggggcattcaaagctgagctgtccaagctggtgattgtggccaaggcatcgcgcactgagctgtgaccagcagccctgttgcgggtggcaccttctcatctccggtgaagctgaaggggcctgtgtccctgaaagggccagcacatcactggttttctaggagggactcttaagttttctacctgggctgacgttgccttgtccggaggggcttgcagggtggctgaagccctggggcagagaacagagggtccagggccctcctggctcccaacagcttctcagttcccacttcctgctgagctcttctggactcaggatcgcagaactgctttcctatgtttacccaggggacctcctttcagatgaactgggaagagatgaaatgttttttcatatttaaataaataagaacattaaaaagcaa

SEQ ID NO: 338537 - DNA, 1142 bp, Homo sapiens
  misc_feature (665)..(665): n is a, c, g, or t
gcctccggcggacgctccacgtgtccctcgccgcgccccgtctacccgcccctgccctgaggaccctagtccaacatggcggcgcccagcggagggtggaacggcgtcggcgcgagcttgtgggccgcgctgctcctaggggccgtggcgctgaggccggcggaggcggtgtccgagcccacgacggtggcgtttgacgtgcggcccggcggcgtcgtgcattccttctcccataacgtgggcccgggggacaaatatacgtgtatgttcacttacgcctctcaaggagggaccaatgagcaatggcagatgagtctggggaccagcgaagaccaccagcacttcacctgcaccatctggaggccccaggggaagtcctatctgtacttcacacagttcaaggcagaggtgcggggcgctgagattgagtacgccatggcctactctaaagccgcatttgaaagggaaagtgatgtccctctgaaaactgaggaatttgaagtgaccaaaacagcagtggctcacaggcccggggcattcaaagctgagctgtccaagctggtgattgtggccaaggcatcgcgcactgagctgtgaccagcagccctgttgcgggtggcaccttctcatctccggtgaacagagggcagcaattgggaacgggncggggtgggggagtggggagggtggggtgaggggggggagggggggtggagagggaaaacgctgaaggggcctgtgtccctgaaagggccagcacatcactggttttctaggagggactcttaagttttctacctgggctgacgttgccttgtccggaggggcttgcagggtggctgaagccctggggcagagaacagagggtccagggccctcctggctcccaacagcttctcagttcccacttcctgctgagctcttctggactcaggatcgcagatccggggcacaaagagggtggggaacatgggggctatgctggggaaagcagccatgctccccccgacctccagccgagcatccttcatgagcctgcagaactgctttcctatgtttacccaggggacctcctttcagatgaactgggaagagatgaaatgttttttcatatttaaataaataagaacattaaaaagcaa

SEQ ID NO: 338538 - DNA, 907 bp, Homo sapiens
gcctccggcggacgctccacgtgtccctcgccgcgccccgtctacccgcccctgccctgaggaccctagtccaacatggcggcgcccagcggagggtggaacggcgtcggcgcgagcttgtgggccgcgctgctcctaggggccgtggcgctgaggccggcggaggcggtgtccgagcccacgacggtggcgtttgacgtgcggcccggcggcgtcgtgcattccttctcccataacgtgggcccgggggacaaatatacgtgtatgttcacttacgcctctcaaggagggaccaatgagcaatggcagatgagtctggggaccagcgaagaccaccagcacttcacctgcaccatctggaggccccaggggaagtcctatctgtacttcacacagttcaaggcagaggtgcggggcgctgagattgagtacgccatggcctactctaaagccgcatttgaaagggaaagtgatgtccctctgaaaactgaggaatttgaagtgaccaaaacagcagtggctcacaggcccggggcattcaaagctgagctgtccaagctggtgattgtggccaaggcatcgcgcactgagctgtgaccagcagccctgttgcgggtggcaccttctcatctccggtgaacctcctggctcccaacagcttctcagttcccacttcctgctgagctcttctggactcaggatcgcagatccggggcacaaagagggtggggaacatgggggctatgctggggaaagcagccatgctccccccgacctccagccgagcatccttcatgagcctgcagaactgctttcctatgtttacccaggggacctcctttcagatgaactgggaagagatgaaatgttttttcatatttaaataaataagaacattaaaaagcaa

SEQ ID NO: 338539 - DNA, 1057 bp, Homo sapiens
gcctccggcggacgctccacgtgtccctcgccgcgccccgtctacccgcccctgccctgaggaccctagtccaacatggcggcgcccagcggagggtggaacggcgtcggcgcgagcttgtgggccgcgctgctcctaggggccgtggcgctgaggccggcggaggcggtgtccgagcccacgacggtggcgtttgacgtgcggcccggcggcgtcgtgcattccttctcccataacgtgggcccgggggacaaatatacgtgtatgttcacttacgcctctcaaggagggaccaatgagcaatggcagatgagtctggggaccagcgaagaccaccagcacttcacctgcaccatctggaggccccaggggaagtcctatctgtacttcacacagttcaaggcagaggtgcggggcgctgagattgagtacgccatggcctactctaaagccgcatttgaaagggaaagtgatgtccctctgaaaactgaggaatttgaagtgaccaaaacagcagtggctcacaggcccggggcattcaaagctgagctgtccaagctggtgattgtggccaaggcatcgcgcactgagctgtgaccagcagccctgttgcgggtggcaccttctcatctccggtgaagctgaaggggcctgtgtccctgaaagggccagcacatcactggttttctaggagggactcttaagttttctacctgggctgacgttgccttgtccggaggggcttgcagggtggctgaagccctggggcagagaacagagggtccagggccctcctggctcccaacagcttctcagttcccacttcctgctgagctcttctggactcaggatcgcagatccggggcacaaagagggtggggaacatgggggctatgctggggaaagcagccatgctccccccgacctccagccgagcatccttcatgagcctgcagaactgctttcctatgtttacccaggggacctcctttcagatgaactgggaagagatgaaatgttttttcatatttaaataaataagaacattaaaaagcaa

SEQ ID NO: 338540 - DNA, 1550 bp, Homo sapiens
ttcctcgtattacacatcacaacgttcattcctttttccgcctatctggggtcgcaatccccccaaggtcccacagcccagcgtttccctcacctttaaccccccctcttcttttacccctcctataggccccttgcaaaaaccggtaccgtaactggcccttcaggtatttttgccccccccctttttttgctttttcttttacatcagtttaattatgtcatccttttcttcataatccagatatttaaaatgcaaagaaattaacttcaatgatatgttcagggactggcactaaaaaaaattttcagactgcaaatgagttatacaaatgaaaatatcaaatggagatccagttatcaaatgaaagcactcaacatattaaaagttcacaagtatttgtattgagcacattacaaaagtcagcttgctaactgttgtgattttaaagaactattgcagaagtctgaagaaaatagatttattagttaacttataaagagattaaagaggctgaaacaagtattaaaaagaaatttgtgcctttattagaacgacccacgcgtacatggcggcgcccagcggagggtggaacggcgtcggcgcgagcttgtgggccgcgctgctcctaggggccgtggcgctgaggccggcggaggcggtgtccgagcccacgacggtggcgtttgacgtgcggcccggcggcgtcgtgcattccttctcccataacgtgggcccgggggacaaatatacgtgtatgttcacttacgcctctcaaggagggaccaatgagcaatggcagatgagtctggggaccagcgaagaccaccagcacttcacctgcaccatctggaggccccaggggaagtcctatctgtacttcacacagttcaaggcagaggtgcggggcgctgagattgagtacgccatggcctactctaaagccgcatttgaaagggaaagtgatgtccctctgaaaactgaggaatttgaagtgaccaaaacagcagtggctcacaggcccggggcattcaaagctgagctgtccaagctggtgattgtggccaaggcatcgcgcactgagctgtgaccagcagccctgttgcgggtggcaccttctcatctccggtgaagctgaaggggcctgtgtccctgaaagggccagcacatcactggttttctaggagggactcttaagttttctacctgggctgacgttgccttgtccggaggggcttgcagggtggctgaagccctggggcagagaacagagggtccagggccctcctggctcccaacagcttctcagttcccacttcctgctgagctcttctggactcaggatcgcagatccggggcacaaagagggtggggaacatgggggctatgctggggaaagcagccatgctccccccgacctccagccgagcatccttcatgagcctgcagaactgctttcctatgtttacccaggggacctcctttcagatgaactgggaagagatgaaatgttttttcatatttaaataaataagaacattaaaaagcaa

SEQ ID NO: 338541 - DNA, 1197 bp, Homo sapiens
gcctccggcggacgctccacgtgtccctcgccgcgccccgtctacccgcccctgccctgaggaccctagtccaacatggcggcgcccagcggagggtggaacggcgtcggcgcgagcttgtgggccgcgctgctcctaggggccgtggcgctgaggccggcggaggcggtgtccgagcccacgacggtggcgtttgacgtgcggcccggcggcgtcgtgcattccttctcccataacgtgggcccgggggacaaatatacgtgtatgttcacttacgcctctcaaggagggaccaatgagcaatggcagatgagtctggggaccagcgaagaccaccagcacttcacctgcaccatctggaggccccaggggaagtcctatctgtacttcacacagttcaaggcagaggtgcggggcgctgagattgagtacgccatggcctactctaaagccgcatttgaaagggaaagtgatgtccctctgaaaactgaggaatttgaagtgaccaaaacagcagtggctcacaggcccggggcattcaaagctgagctgtccaagctggtgattgtggccaaggcatcgcgcactgagctgtgaccagcagccctgttgcgggtggcaccttctcatctccggtgaagctgaaggggcctgtgtccctgaaagggccagcacatcactggttttctaggagggactcttaagttttctacctgggctgacgttgccttgtccggaggggcttgcagggtggctgaagccctggggcagagaacagagggtccagggccctcctggctcccaacagcttctcagttcccacttcctgctgagctcttctggactcaggatcgcagatccggggcacaaagagggtggggaacatgggggctatgctggggaaagcagccatgctccccccgacctccagccgagcatccttcatgagcctgcagaactgctttcctatgtttacccaggggacctcctttcagatgaactgggaagagatgaaatgttttctattaataatacgacttgaaaaaaaaaaaattcgggttttgtggtgggggaaaggatgaagggctggctaggtctgcccttgaaagggagtgggccatgggttttgatgggcggagtaagcttgggggagtagaagagagtagagagaatagacaggagggcacggagagaaac

SEQ ID NO: 338542 - DNA, 1506 bp, Homo sapiens
ttcctcgtattacacatcacaacgttcattcctttttccgcctatctggggtcgcaatccccccaaggtcccacagcccagcgtttccctcacctttaaccccccctcttcttttacccctcctataggccccttgcaaaaaccggtaccgtaactggcccttcaggtatttttgccccccccctttttttgctttttcttttacatcagtttaattatgtcatccttttcttcataatccagatatttaaaatgcaaagaaattaacttcaatgatatgttcagggactggcactaaaaaaaattttcagactgcaaatgagttatacaaatgaaaatatcaaatggagatccagttatcaaatgaaagcactcaacatattaaaagttcacaagtatttgtattgagcacattacaaaagtcagcttgctaactgttgtgattttaaagaactattgcagaagtctgaagaaaatagatttattagttaacttataaagagattaaagaggctgaaacaagtattaaaaagaaatttgtgcctttattagaacgacccacgcgtacatggcggcgcccagcggagggtggaacggcgtcggcgcgagcttgtgggccgcgctgctcctaggggccgtggcgctgaggccggcggaggcggtgtccgagcccacgacggtggcgtttgacgtgcggcccggcggcgtcgtgcattccttctcccataacgtgggcccgggggacaaatatacgtgtatgttcacttacgcctctcaaggagggaccaatgagcaatggcagatgagtctggggaccagcgaagaccaccagcacttcacctgcaccatctggaggccccaggggaagtcctatctgtacttcacacagttcaaggcagaggtgcggggcgctgagattgagtacgccatggcctactctaaagccgcatttgaaagggaaagtgatgtccctctgaaaactgaggaatttgaagtgaccaaaacagcaggtgattgtggccaaggcatcgcgcactgagctgtgaccagcagccctgttgcgggtggcaccttctcatctccggtgaagctgaaggggcctgtgtccctgaaagggccagcacatcactggttttctaggagggactcttaagttttctacctgggctgacgttgccttgtccggaggggcttgcagggtggctgaagccctggggcagagaacagagggtccagggccctcctggctcccaacagcttctcagttcccacttcctgctgagctcttctggactcaggatcgcagatccggggcacaaagagggtggggaacatgggggctatgctggggaaagcagccatgctccccccgacctccagccgagcatccttcatgagcctgcagaactgctttcctatgtttacccaggggacctcctttcagatgaactgggaagagatgaaatgttttttcatatttaaataaataagaacattaaaaagcaa

SEQ ID NO: 338543 - DNA, 1286 bp, Homo sapiens
ttcctcgtattacacatcacaacgttcattcctttttccgcctatctggggtcgcaatccccccaaggtcccacagcccagcgtttccctcacctttaaccccccctcttcttttacccctcctataggccccttgcaaaaaccggtaccgtaactggcccttcaggtatttttgccccccccctttttttgctttttcttttacatcagtttaattatgtcatccttttcttcataatccagatatttaaaatgcaaagaaattaacttcaatgatatgttcagggactggcactaaaaaaaattttcagactgcaaatgagttatacaaatgaaaatatcaaatggagatccagttatcaaatgaaagcactcaacatattaaaagttcacaagtatttgtattgagcacattacaaaagtcagcttgctaactgttgtgattttaaagaactattgcagaagtctgaagaaaatagatttattagttaacttataaagagattaaagaggctgaaacaagtattaaaaagaaatttgtgcctttattagaacgacccacgcgtacatggcggcgcccagcggagggtggaacggcgtcggcgcgagcttgtgggccgcgctgctcctaggggccgtggcgctgaggccggcggaggcggtgtccgagcccacgacggtggcgtttgacgtgcggcccggcggcgtcgtgcattccttctcccataacgtgggcccgggggacaaatatacgtgtatgttcacttacgcctctcaaggagggaccaatgagcaatggcagatgagtctggggaccagcgaagaccaccagcacttcacctgcaccatctggaggccccaggggaagtcctatctgtacttcacacagttcaaggcagaggtgcggggcgctgagattgagtacgccatggcctactctaaagccgcatttgaaagggaaagtgatgtccctctgaaaactgaggaatttgaagtgaccaaaacagcagttatctcagccccacaagaaaaaggagatgaccagccccattggacagatggggaaactgaggcctagaagctggggatttacaagatcccaagaactctgccagaggtccctgcgtcaaagctcgagcgggtgtgattccagggaggtcatctgctgaggggtgtcgggagatgctgggaaggggcaggcatgctgtggaactgggccgttcctgcctctcgctctgcctccttgccctgctccccgtctgtaacacctgagctgtacctgggca

SEQ ID NO: 338544 - DNA, 657 bp, Homo sapiens
cccattgcagaggttgcagtgacccgagattgcgccactgtattccaacctgggcaatggggcgagactccgtttcaaagaaaaccaaaaacaaaaaacaaaacaaaaaaagtataggcacatgtgtaggttcggatggaacaataaacactacagagtttcgggggattgtggcagatggatgtgaggcaggactagattgcagctctagacagaccagcatgtggatgcttgtattgtgaattttagctacaaatccactgcaagaacaaaccagtaatcccaagaggacccacagatcctctgaaggaagcagagtgctcctgcaggacccaggagacacccaaatacagtgacttccccaactgcaggagtaggaaagggagaccctcctcttctgaacacacaccaccactggagaactgaaggtctgtttgcaggagaagtttctggctttaccttgagctgagttaagttagagagctgagtgaaatgcaggggtagaggaagcagggcagaaggccctgggagctcactgggtccccaaacagccgattcctgcctggcaccatagtactccatcaggagggtggccagaggagcagggggtaaaaccccccaggcagaagaaatctctagctgaactttataacaatt

SEQ ID NO: 338545 - DNA, 237 bp, Homo sapiens
attcgtaagatgaattttatttaacctctccttaattgctagctgttactattacaatattggtgaagcagagcatattcctccaggtttgaagatttgtagcttaaaaaggctataaaaagctgttcagttcagtagttgattttacgtcttaaactattgtaggactcagcagaacctctgataagcaagagagcttgctacctccaacaaaatcacatctccaggcccaaataa

SEQ ID NO: 338546 - DNA, 620 bp, Homo sapiens
tctcttgggcctctggagggatggcatttgtgctaaggcctgaaggaagggtaggaagcagcaagaagggccttccaggaggaaggaagagaaaatatgaaggtcccaagataaagatgagtgaattccagggcagaagagaaagccagtgtgttagggcctggtgcagaaaggggagcgggataggggcgcggtcagaggtaaggctgagactggaccagtttgggcctgggtgccagggtgagtctttggtcatggtacacggaagggttatctgtttgaagttgcggaggggcatgatgtgatgctctgcgtctaagaattattattttatctgctataaggagaatttttgtagggctaaaagtggaagcagtccttatcaggaaacccaaacatttataactttttggaatttctcactcctgggactggctttagaaagtgatccaaaattgtaagggagatcatcagtgttttggtcagcctggcatttagtccacttgctctggtgatggctgcccaatttcttatttttcttttgagaaatcacatccttccctcacccatctctagtccttagggtgggctgaccctacagatgggtacacacctggcct

SEQ ID NO: 338547 - DNA, 713 bp, Homo sapiens
tacaatcagctcggtaccaacctgaagtgccaaataaagcaattaatggaaattaataagtgagcagtgtggatttaatgagctgcctatgaatactatgacatgcgctcgttttgtcggctccctggcggggcatggggacagatcgcagcacttcaacgtctgtatttataaacatgcattcctggacttcaggcagcgcgcatactccatcattggttctgctgtgagtcctacattcaacggagatgtattttgatctctgttgaagacagagcaatcgacggcattcagtttgcactgcactgatttgggattccagtacattgcccagtccctgttagtctatattgggcagcatgtcccattcaggagctccatttgacatcaccgaacgttctccaatgaaggtgtcaggcagttgaggtccatagaggaatcccagcaacttcctttgagaggctcacggccattctgctgctagactgaaaatgcgtttcctctgatttccttagtgaggaagcattcatttaggagccatttaaactgtgtttttctcaaagaagatgtaagtacatttcctgtttatttctcaacttagattaatttgggccacttccggtgagatttaagaccatcattaagaatgtatgggcagggccatctgcagaactaccccacctcccccatcacctatcccaaggacgtgcctg

SEQ ID NO: 338548 - DNA, 617 bp, Homo sapiens
tacaatcagctcggtaccaacctgaagtgccaaataaagcaattaatggaaattaataagtgagcagtgtggatttaatgagctgcctatgaatactatgacatgcgctcgttttgtcggctccctggcggggcatggggacagatcgcagcacttcaacgtctgtatttataaacatgcattcctggacttcaggcagcgcgcatactccatcattggttctgctgtgagtcctacattcaacggagatgtattttgatctctgttgaagacagagcaatcgacggcattcagtttgcactgcactgatttgggattccagtacattgcccagtccctgttagtctatattgggcagcatgtcccattcaggagctccatttgacatcaccgaacgttctccaatgaaggtgtcaggcagttgaggtccatagaggaatcccagcaacttcctttgagaggctcacggccattctgctgctagactgaaaatgcgtttcctctgatttccttagtgaggaagcattcatttaggagccatttaaactgtgtttttctcaaattaatctaagttgagaaataaacaggaaatgtacttacatcttctttgggaaaaa

SEQ ID NO: 338549 - DNA, 789 bp, Homo sapiens
actccggctcactatagccctgccctgggcagcagggctggctggctagcccagaggaaggaacaacgtacagtgaaaagaaccccagaccaggaaccagggaggctagctccactttctgtgtgacctttggcaagtggcattgcctgacttgtttcctcactcacattcaacttagaattgctgtgcatatactatgtgccgggcaccgtggtgtgtacgttaacaagcattgggtctttaaatcttcccaacaatcctatgcggaattgccccattcccatgtcacagatgagaaagcaggaactcagagaggtgaagtgacttggccaagggcacacagcaaagaaggaatcaggtctgagtccaggactctgagctccgactgaggtgctctgtccccaccatcaggctctaacatctgtctcaggaatggcttggactagaacgagctctcaaatgagagggtgggaaggagagctgcctagtagctaagtccccacctccttgcccctccgtgcatgcattaatttgttcagcaaacatttattgaacctccagggtaccagaatggtgctcgatactagggatacagagttcaataagacagggtcttgatgtcttatgggagaaaccagcgtgtaaatcaattccaattcagtgggggcagaagtgttctcgggtgtctggaaaaccccgggaggggcaaagaagccagcctgggatgcagcaggaagcacccactggcttgggaggtcaacgaatttggagagacaagtaggtgaagaa

SEQ ID NO: 338550 - DNA, 342 bp, Homo sapiens
cctactcaccaagaagacatagctatcctaaatctttatgcaataaacaatagagcttcagaacacatgaagcaaaaactgacagaaataaaatagaaatagttccacatataacagttggaggttgcaatattcctctttcagttattaaaaaaacaggcagacacaacattaccatggatagagaagacctgaaaaacattaagaatcatcttgacagttacagaacactccatccaacaacagaatacttattctgggaatcaccaagatagaacacatagtgtgtcacaaaccaaaccttaaacttaaaatgactgaagtcagccgggcacggtgcct

SEQ ID NO: 338551 - DNA, 686 bp, Homo sapiens
tgtttgttgcactttatttttcagtgggtttggtgatttggacggattaaaattctagactgaaaagtaactcctactgtggttatggctagaggaaagcaagttcaagtatgatgggacaagtttgaataatgaactgattcctttgcctatcttaattaactgtatttgagaaattttaatttattattcccccctttttttcctgcatctataggataatattgtaaaatagcaattgaaaccaataatcattaaataaatatcaaggaaaatccaagcaaagctttctttttgttggactagtggtgtggtgtttggagacagtctctgaatgtgaacaggaaagcacccatcagcaaaacacgatcactctctagggagacagctgggggaatctgactctggcttctgcttttgttttaagggattaacttccctgtcaagtccaagaagacttgcgtatgagaagattacctgatgggacgaagagcgcgcatcttctcccatcaggttagactgctgtttttgataacccacaaaggtcaatgtataaaatccgctgatgggagaagactggcgcgtcttgctcccatcagggatttctatacattgacctcttgttggttatcaaaaccgcagtccaacgacgtgtcactatgacgatggttcgtgatgggctgatg

SEQ ID NO: 338552 - DNA, 8808 bp, Homo sapiens
tgtttgttgcactttatttttcagtgggtttggtgatttggacggattaaaattctagactgaaaagtaactcctactgtggttatggctagaggaaagcaagttcaagtatgatgggacaagtttgaataatgaactgattcctttgcctatcttaattaactgtatttgagaaattttaatttattattcccccctttttttcctgcatctataggataatattgtaaaatagcaattgaaaccaataatcattaaataaatatcaaggaaaatccaagcaaagctttctttttgttggactagtggtgtggtgtttggagacagtctctgaatgtgaacaggaaagcacccatcagcaaaacacgatcactctctagggagacagctgggggaatctgactctggcttctgcttttgttttaagggattaacttccctgtcaagtccaagaagacttgcgtatgagaagattacctgatggacttaattctaagattagcttttttcatcaagatggaaaaagatctttaggagcagaaaaggggagtgctaactgggggagcgagaagggagacgagcaaaagaaacaaaatcttgccacgtggctctgttttgtcagcaagaggatttaagactcacccagggcaaacactgggaccactgtaagagcgctggaacattctgcctcttgagtgaaggggccttctttctagcctctatggcactgaggggtgcgccggctggtggaggagtagtccgatggagccctgcgttccccggggacacagggccaagctttgaggtggaaagtttctggttctgaaacaacaaggagagagtctgtttttcttcctaaaatttggactcttgtctgcacaaactctggtctgttttgcacggtttgtgtgcctttttttccctttatgcaatctttttcagctttagcagcagaaatttgtctagttcaggaaacatgctagagggtggcttcagaaggaagatgatcctgtgtattctgtctctgcatccgaacttttgaagagaaaaattcgagctagagggattcttaaagccttaagttacttgaaatctatgtatttgcaaccctttgtctctggaatcatattacactaaactggaatctcaggctgaatgagaataaccaagtggagtaaaaagaagaaaaccgtttcttgatcaccacttaattaacgatgctctttctccaaaggatcagcacgttcttcctctgagaacttgaaaatacaaatggaccccatgtttttttaagcattaccttttcttagaagactgccatcatcttttatagaggaattttttcactatgcattcagtggatctttataaaatactgaccttctaattagattcaggtcagtcttaattaaagggggaaaaaagcaacgcaagccaaccacaaaaacacatataccaatgaaagaaattggtttaaatttcacagcattaacattactttttaagtaaaacagttcattgaagaaagtatgtatgcagcagtggaacatgggcctgtgctttgcagtgactccaacatcctgtgcctgtcctggaaggggcgtgtccccaagagtgagaaggagaagcctgtgtgcaggagacgctactatgaggaaggctggctggccacgggcaacgggcgaggagtggttggggtgactttcacctctagtcactgtcgcagggacaggagtactccacagaggataaatttcaacctccggggccacaatagcgaggttgtgctggtgaggtggaatgagccctaccagaaactggccacgtgcgatgcggacggaggcatattcgtgtggattcagtacgagggcaggtggtctgtggagctggtcaacgaccgcggggcgcaggtgagtgatttcacgtggagccatgatggaactcaagcacttatttcctatcgagatgggtttgtcctggttgggtctgtcagtggacaaagacactggtcatccgaaatcaacttggaaagtcaaattacgtgtggcatatggactcctgacgaccaacaggtgctgtttggcacggccgatgggcaggtgattgtcatggattgccacggcagaatgctggcccacgtcctcttgcacgagtcagacggtgtcctcggcatgtcctggaactacccgatcttcctggtggaggacagcagcgagagcgacacggactcagatgactacgcccctccccaagatggtccggcagcatatcccatcccagtgcagaacatcaagcctctgctcaccgtcagcttcacctcgggagacatcagcttaatgaacaactacgatgacttgtctcccacggtcatccgctcagggctgaaagaggtggtagcccagtggtgcacacagggggacttgctggcagtcgctgggatggaacggcagacccagcttggtgagcttcccaatggtccccttctgaagagtgccatggtcaagttctacaatgttcgtggggagcacatcttcacactggacactctcgtgcagcgccccatcatctccatctgctggggtcaccgggattcgaggctgttgatggcatcaggaccagccctgtacgtggtgcgtgtggagcaccgggtgtccagcctgcagctgctgtgccagcaggccatcgccagcaccttgcgtgaggacaaggacgtcagcaagctgactctgcccccccgcctctgctcctacctctccactgccttcatccccaccatcaagcccccaattccagatccgaacaacatgagagactttgtcagctacccatcagccggcaacgagcggctgcactgcaccatgaagcgcacagaggacgacccggaggtgggcggcccgtgctacacgctctacctggagtacctgggcgggcttgtgcccatcctcaaagggcggcgcatcagcaagctgcggccagagttcgtcatcatggacccgcggacagatagcaaaccagatgaaatctatgggaacagcttgatttctactgtgatcgacagctgcaactgctcagactccagtgacattgagctgagtgatgactgggctgccaagaaatctcccaaaatctccagagctagcaaatcacccaaactcccaaggatcagcattgaggcccgcaagtcacccaagctgccccgggctgctcaggagctctcccggtccccacggttgcccctgcgcaagccctctgtgggctcgcccagcctgactcggagagagtttccttttgaagacatcactcagcacaactatcttgctcaggtcacgtctaatatctggggaaccaaatttaagattgtgggcttggctgctttcctgccaaccaacctcggtgcagtaatctataaaaccagcctcctgcatctccagccgcggcagatgaccatttatctcccagaagttcggaaaatttccatggactatattaatttacctgtcttcaacccaaatgttttcagtgaagatgaagatgatttaccaggtgatgcagtttggacggattgatggcagtgcgtacattctagacttccagtatccgttctcagccgtgcaggcctttgcagttgccctggccaacgtgactcagcgcctcaaatgaagagactggtgtggggaggagagagatgcagagagcctttggaagaggtcttcggagatgccagaggagccctctaggggtccgatgcctgggaggaccagaagccaacagcaaaactggaaaagcccggcaggcccaggagagggcgctgacctgtggtcgtcatttatttggttgggttttattaccttttattgtctgttcttcttttcttctttcatttcagtggcatttggaagcaaagagtgctaggcacctgctgttctttcaggaaacagcttggctgtggtaatgctctactgggcccttcagaatgaagacagtctgccttagagcctgctattcttttagacatagggaggatgcattatcctgtattctcctccaacatcaccactagcgtaaaagcaaaaagcttttacaaaacacagccaaaaattctcaagatgcaggttcttggggaatgggatggggacagcatttgatttacactgattatgttactccccaaaaggtgacttaattaataaagggcatttgggcagacacactgtgttggaccaacaaagtaggctctttacaggggtgttctcaccaggtagaaatgcgatttgctcactgaggatgttggggaagggacgaagggtaaagaagaaactgcaccgtatacacaggttcacatcactctgcagacagcaatgtgactcagcgtgtgacttgtagcagcagtacgagggctacactcctctgctgaggatgtctacattgaaagcctccactagtttcatcgtttgtcaaagttccgtaggatcagtgatggtcattcagcatgactggttctgggagaaggtgagagacaaaaatggaaagatcctggcctgtggtagtggtagcagttttctcaaataatgtggtgacagtcactagatcctcacatgctgagaaacagcctctactctctctgccccttttactttttaatctggaatgcattactgtaaacatgatctttcccatgagataccatgttctatgccttcccattctaaaagtgtggacaacgcttgatttgaaaccactccttttctcctcttggctacattaaaattcagttgactacaaatgctttctatcaaattagaaatgtaaccaaaaaaatgttaagtgttcaccagggtattaaaatacagagggagtatggtcaaatctttgacaaaattttcatgatcttctctaacaaaaaaagttgtttattaactgtacagactgtttactaaggagctaaaccactgagaaaacgttattaaaattgtaatacctaggtagttggttgatcacagtttgttaattgtataaaaaaaaattacctagaatatctcttcccacttcctcgtcctcgtgagaacctgtgggcagtattcaagccctgatgacaaaacccagtgttttttgttgttgttttttgttgttgttttttgtttttgtttttgtttttctcagtcttacctgtgatgttgtttaggatcaggcccctctcctgggcctgctgtgcaggagcacaggaactatctgctggcgttgggttccaaatttgcattttatttggaaacagacaagtagaagatgctacagaaaagtattttcaaatttaaacgttttttaatcccctgttttagttaaaaaattggaaaagaaaccgacccatttttttcccagatcaagatgacatgacatcactcccaattctctccaaaccccagagaaatactgacgaagttttctgatgtggcaaaggatatttcccatctaataccagtttctcatttatatttaacgtattggacctgatatttttagtgggtgcattcttccagaaagaattcagcaatgttatcagaattaattcttttatatgagtttatgtagcttgatatggtgtttcagtgcttattggttgtgcaataatggttatagcctgttagataatctaaatgcaattcccctgttttgtcgtttaggagataattatttatcttgcttttcatagtgttcttaggaattattttgttgttacgttttggtgagttatacccattttatttatttagaaaaatagtatctttgttaacgacttacatggtcacagtatattttgctgcaagaaataaagaggatatgatagaaggtttttttttttttttttttttttttttgagacggagtcccactcttgtcgcccaactagagtgtagtggcacaatctcggctccccacaacctctgactccagggttcaggtgattattttgcctcagcctcccaagcagctgggattatagacacccgccaacacgccaggctaatgtttttgtatttttaatagagatggggttttgccatgttggccaggctggtcttgaactcctgacctcaggtgatccgcccgcctcggcctcccaaagtgctgggattacagacgtgagccaccactcccggcccatagaaggttttttgctggataatttgtaacttttctaattgggaaaaaattcctattaatcacttaaaaatttttttttgtattttgtgttattgattatatacaaaggagactttttttttgagataacactcaaatagtattctcttcttttgaaaattttatttttatctgaaaataacagttgatctgaaataaaaaggggagacctattagaatgagagtagccaaggaaagagttactaggtaataagcttcactttttgtgttctaattgtttttgagatataaagaccctgaaaaagcccattttagaacctgtttaataagagcaaatataggggaaaatctttgaaatgaaagctacaaatacatgtgagaagaaaaaaatggatttttttagcaaataattaactaagcttctaaatgcctagctccctcccccaaaggcgctttcccccgatggaggcacaggcttctgtctcggatgtttggcgcacgtgagtttgtatgagtttgtaccggagtgaccccggcagccactgcccacctcccctctacccaggggcctgaaaagaggggctgccctcctgcgccaaggcagacacaagctgcgggctgtgcggtcctagtagtgtgacgtttcagttaatagtggtggtcttattttcaactatgctttcattcagtcagtctctgttgactaaatacgacgaaaattcatactttatgcaggagatttctaaaaatttaatgtttattaatagtttatgaatatcaagatacctcattgaatccctaaatttaaaagcagtccagtaaaaggttaactgtataaagaatctatgactttttgagggaagtgtgatatattaacaaatataaccaattctaaatttgttttagctctaacctcatcaaaccaaaggcacagatttgtgtacaatatacccattgaatgtatatcctgagaaaaattggggccaaagaagcaggaaaatctcaaagctctaatggcagcataaatcaaagaatttcacaggctagtgtttttatccatagccattgctcccttgtcaagtgtctcacaaggacatggaagaatgtgttatgttcatcttgtaatcatagcaaaaagtctgcaaaccccagggtcaagcctgctctgccacagggttggatggtgaccttgggcaagtccctggggctggctaggcctccacttgtccatctgtgaaatgaaaggatcagcctggacagccctctaaactcccttacagctctcagcctaagagcgcagcactgaacagcctcatcattccacttttcatgggaaatatatttcacaccattgcctttgtgtagagaaatatttcttttcctgtgttaatgagctatgtactgaatataaaccagtgcatttaaagtaatatcttttgtgcacctctaaatgtgtttggaattgtgtttgttctcatagaatatacaaaagtactgattctaggtaagaaggagtctccacgggtgtgccctgctcagctggatgtccatgagaacagccatgaaataagtcactacttgtccccaaaaccacaggaatatatacctaggtcacctcaaattcctgagtgtgctctgccatgttacacggtcttcaaattgaaaaggtttcttgaaaaggaaagtttggcccagcaactggagaaggagtccatggtgtcgctgtgtgcctgtatcatttggccaagtcaatggttgtaagcaaagttagtggagacaaaaatgtgtccaaaatgtcgtttgagttcctgggatttctgtaatagcacacaactcagaactcttcagcatttgtgtgattccttacctctggctgataaaactctaatgggttgtggcttactttgtttccattttctttggctttgtgcaatttttgtgtaactttacttgtacctatattttctgtttacagttctttttaaggggaggggtagggttctaagatcttgttgtttattgtagataaaaattttttcgtgttgtagaaaagcatgggttatgcgtttgactgaaaaagacactgtattatttaccaaaggggtattgtttttgcatttgtttataaatgcattattttggtactgtaaatttggacataatttctgagtttattactactggcattttctttttccctttttttttttttttaaccgtaagtgcacgatgcaggtgcataggccccagaccaaactagaccaccagcatgttcatgtccagacctcggcagtggcgtgcactgcttgtgcacctcagttcctccagtgttggtttgtttgttttttaattcagcatcctgctggttttactttccaagcaagatctgttgcgactcccaaatgcgttttaatgagctcatccttatttgcctttcttcttacgtattttgtgtattagattgtgcaggagatattctagaaggcattaatggtttgcattcaaaacgatgtggtttgtccaagttattttctgtctttattactgagacggattaatctccttatttttttcttgatgatttgaagttgtaacagttgtccagctattgcttaataaaattttgcagatcaaaaaaaatgtgtgcag

SEQ ID NO: 338553 - DNA, 2093 bp, Homo sapiens
tgtttgttgcactttatttttcagtgggtttggtgatttggacggattaaaattctagactgaaaagtaactcctactgtggttatggctagaggaaagcaagttcaagtatgatgggacaagtttgaataatgaactgattcctttgcctatcttaattaactgtatttgagaaattttaatttattattcccccctttttttcctgcatctataggataatattgtaaaatagcaattgaaaccaataatcattaaataaatatcaaggaaaatccaagcaaagctttctttttgttggactagtggtgtggtgtttggagacagtctctgaatgtgaacaggaaagcacccatcagcaaaacacgatcactctctagggagacagctgggggaatctgactctggcttctgcttttgttttaagggattaacttccctgtcaagtccaagaagacttgcgtatgagaagattacctgatggacttaattctaagattagcttttttcatcaagatggaaaaagatctttaggagcagaaaaggggagtgctaactgggggagcgagaagggagacgagcaaaagaaacaaaatcttgccacgtggctctgttttgtcagcaagaggatttaagactcacccagggcaaacactgggaccactgtaagagcgctggaacattctgcctcttgagtgaaggggccttctttctagcctctatggcactgaggggtgcgccggctggtggaggagtagtccgatggagccctgcgttccccggggacacagggccaagctttgaggtggaaagtttctggttctgaaacaacaaggagagagtctgtttttcttcctaaaatttggactcttgtctgcacaaactctggtctgttttgcacggtttgtgtgcctttttttccctttatgcaatctttttcagctttagcagcagaaatttgtctagttcaggaaacatgctagagggtggcttcagaaggaagatgatcctgtgtattctgtctctgcatccgaacttttgaagagaaaaattcgagctagagggattcttaaagccttaagttacttgaaatctatgtatttgcaaccctttgtctctggaatcatattacactaaactggaatctcaggctgaatgagaataaccaagtggagtaaaaagaagaaaaccgtttcttgatcaccacttaattaacgatgctctttctccaaaggatcagcacgttcttcctctgagaacttgaaaatacaaatggaccccatgtttttttaagcattaccttttcttagaagactgccatcatcttttatagaggaattttttcactatgcattcagtggatctttataaaatactgaccttctaattagattcaggtcagtcttaattaaagggggaaaaaagcaacgcaagccaaccacaaaaacacatataccaatgaaagaaattggtttaaatttcacagcattaacattactttttaagtaaaacagttcattgaagaaagtatgtatgcagcagtggaacatgggcctgtgctttgcagtgactccaacatcctgtgcctgtcctggaaggggcgtgtccccaagagtgagaaggagaagcctgtgtgcaggagacgctactatgaggaaggctggctggccacgggcaacgggcgaggagtggttggggtgactttcacctctagtcactgtcgcagggacaggagtactccacagaggataaatttcaacctccggggccacaatagcgagatttgtaagactccagggcctcccagccgtgaataatctgatggttcctgaaatgactggggaagcagacgcttcgtatggcagttgaagagtgtgtgtctatgtgcatttaaaaccttctttctgtacttacacattcacacgggaagacaggctcattcttgtgcacacttgagagttttacaactgatgaaaattaatttaagaatcagatggagcaacttgacaccagtgggctcaggagcccggggagaaaaatacatcactaatggccagttttccatatggtctgcacgggtaaagaaagtctgc

SEQ ID NO: 338554 - DNA, 2395 bp, Homo sapiens
tgtttgttgcactttatttttcagtgggtttggtgatttggacggattaaaattctagactgaaaagtaactcctactgtggttatggctagaggaaagcaagttcaagtatgatgggacaagtttgaataatgaactgattcctttgcctatcttaattaactgtatttgagaaattttaatttattattcccccctttttttcctgcatctataggataatattgtaaaatagcaattgaaaccaataatcattaaataaatatcaaggaaaatccaagcaaagctttctttttgttggactagtggtgtggtgtttggagacagtctctgaatgtgaacaggaaagcacccatcagcaaaacacgatcactctctagggagacagctgggggaatctgactctggcttctgcttttgttttaagggattaacttccctgtcaagtccaagaagacttgcgtatgagaagattacctgatggacttaattctaagattagcttttttcatcaagatggaaaaagatctttaggagcagaaaaggggagtgctaactgggggagcgagaagggagacgagcaaaagaaacaaaatcttgccacgtggctctgttttgtcagcaagaggatttaagactcacccagggcaaacactgggaccactgtaagagcgctggaacattctgcctcttgagtgaaggggccttctttctagcctctatggcactgaggggtgcgccggctggtggaggagtagtccgatggagccctgcgttccccggggacacagggccaagctttgaggtggaaagtttctggttctgaaacaacaaggagagagtctgtttttcttcctaaaatttggactcttgtctgcacaaactctggtctgttttgcacggtttgtgtgcctttttttccctttatgcaatctttttcagctttagcagcagaaatttgtctagttcaggaaacatgctagagggtggcttcagaaggaagatgatcctgtgtattctgtctctgcatccgaacttttgaagagaaaaattcgagctagagggattcttaaagccttaagttacttgaaatctatgtatttgcaaccctttgtctctggaatcatattacactaaactggaatctcaggctgaatgagaataaccaagtggagtaaaaagaagaaaaccgtttcttgatcaccacttaattaacgatgctctttctccaaaggatcagcacgttcttcctctgagaacttgaaaatacaaatggaccccatgtttttttaagcattaccttttcttagaagactgccatcatcttttatagaggaattttttcactatgcattcagtggatctttataaaatactgaccttctaattagattcaggtcagtcttaattaaagggggaaaaaagcaacgcaagccaaccacaaaaacacatataccaatgaaagaaattggtttaaatttcacagcattaacattactttttaagtaaaacagttcattgaagaaagtatgtatgcagcagtggaacatgggcctgtgctttgcagtgactccaacatcctgtgcctgtcctggaaggggcgtgtccccaagagtgagaaggagaagcctgtgtgcaggagacgctactatgaggaaggctggctggccacgggcaacgggcgaggagtggttggggtgactttcacctctagtcactgtcgcagggacaggagtactccacagaggataaatttcaacctccggggccacaatagcgaggttgtgctggtgaggtggaatgagccctaccagaaactggccacgtgcgatgcggacggaggcatattcgtgtggattcagtacgagggcaggtggtctgtggagctggtcaacgaccgcggggcgcaggtgagtgatttcacgtggagccatgatggaactcaagcacttatttcctatcgagatgggtttgtcctggttgggtctgtcagtggacaaagacactggtcatccgaaatcaacttggaaagtcaaattacgtgtggcatatggactcctgacgaccaacaggtgctgtttggcacggccgatgggcaggtgattgtcatggttttactttccaagcaagatctgttgcgactcccaaatgcgttttaatgagctcatccttatttgcctttcttcttacgtattttgtgtattagattgtgcaggagatattctagaaggcattaatggtttgcattcaaaacgatgtggtttgtccaagttattttctgtctttattactgagacggattaatctccttatttttttcttgatgatttgaagttgtaacagttgtccagctattgcttaataaaattttgcagatcaaaaaaaatgtgtgcag

SEQ ID NO: 338555 - DNA, 181 bp, Homo sapiens
ccagttgaaaatacggaaatagattgtgattcttcttttttcttttcttcctaccgcagcacaactatcttgctcaggtcacgtctaatatctggggaaccaaatttaagattgtgggcttggctgctttcctgccaaccaacctcggtgcaggtaaaaatcatgtcctcttctctcattg

SEQ ID NO: 338556 - DNA, 11309 bp, Homo sapiens
tgtttgttgcactttatttttcagtgggtttggtgatttggacggattaaaattctagactgaaaagtaactcctactgtggttatggctagaggaaagcaagttcaagtatgatgggacaagtttgaataatgaactgattcctttgcctatcttaattaactgtatttgagaaattttaatttattattcccccctttttttcctgcatctataggataatattgtaaaatagcaattgaaaccaataatcattaaataaatatcaaggaaaatccaagcaaagctttctttttgttggactagtggtgtggtgtttggagacagtctctgaatgtgaacaggaaagcacccatcagcaaaacacgatcactctctagggagacagctgggggaatctgactctggcttctgcttttgttttaagggattaacttccctgtcaagtccaagaagacttgcgtatgagaagattacctgatggacttaattctaagattagcttttttcatcaagatggaaaaagatctttaggagcagaaaaggggagtgctaactgggggagcgagaagggagacgagcaaaagaaacaaaatcttgccacgtggctctgttttgtcagcaagaggatttaagactcacccagggcaaacactgggaccactgtaagagcgctggaacattctgcctcttgagtgaaggggccttctttctagcctctatggcactgaggggtgcgccggctggtggaggagtagtccgatggagccctgcgttccccggggacacagggccaagctttgaggtggaaagtttctggttctgaaacaacaaggagagagtctgtttttcttcctaaaatttggactcttgtctgcacaaactctggtctgttttgcacggtttgtgtgcctttttttccctttatgcaatctttttcagctttagcagcagaaatttgtctagttcaggaaacatgctagagggtggcttcagaaggaagatgatcctgtgtattctgtctctgcatccgaacttttgaagagaaaaattcgagctagagggattcttaaagccttaagttacttgaaatctatgtatttgcaaccctttgtctctggaatcatattacactaaactggaatctcaggctgaatgagaataaccaagtggagtaaaaagaagaaaaccgtttcttgatcaccacttaattaacgatgctctttctccaaaggatcagcacgttcttcctctgagaacttgaaaatacaaatggaccccatgtttttttaagcattaccttttcttagaagactgccatcatcttttatagaggaattttttcactatgcattcagtggatctttataaaatactgaccttctaattagattcaggtcagtcttaattaaagggggaaaaaagcaacgcaagccaaccacaaaaacacatataccaatgaaagaaattggtttaaatttcacagcattaacattactttttaagtaaaacagttcattgaagaaagtatgtatgcagcagtggaacatgggcctgtgctttgcagtgactccaacatcctgtgcctgtcctggaaggggcgtgtccccaagagtgagaaggagaagcctgtgtgcaggagacgctactatgaggaaggctggctggccacgggcaacgggcgaggagtggttggggtgactttcacctctagtcactgtcgcagggacaggagtactccacagaggataaatttcaacctccggggccacaatagcgaggttgtgctggtgaggtggaatgagccctaccagaaactggccacgtgcgatgcggacggaggcatattcgtgtggattcagtacgagggcaggtggtctgtggagctggtcaacgaccgcggggcgcaggtgagtgatttcacgtggagccatgatggaactcaagcacttatttcctatcgagatgggtttgtcctggttgggtctgtcagtggacaaagacactggtcatccgaaatcaacttggaaagtcaaattacgtgtggcatatggactcctgacgaccaacaggtgctgtttggcacggccgatgggcaggtgattgtcatggattgccacggcagaatgctggcccacgtcctcttgcacgagtcagacggtgtcctcggcatgtcctggaactacccgatcttcctggtggaggacagcagcgagagcgacacggactcagatgactacgcccctccccaagatggtccggcagcatatcccatcccagtgcagaacatcaagcctctgctcaccgtcagcttcacctcgggagacatcagcttaatgaacaactacgatgacttgtctcccacggtcatccgctcagggctgaaagaggtggtagcccagtggtgcacacagggggacttgctggcagtcgctgggatggaacggcagacccagcttggtgagcttcccaatggtccccttctgaagagtgccatggtcaagttctacaatgttcgtggggagcacatcttcacactggacactctcgtgcagcgccccatcatctccatctgctggggtcaccgggattcgaggctgttgatggcatcaggaccagccctgtacgtggtgcgtgtggagcaccgggtgtccagcctgcagctgctgtgccagcaggccatcgccagcaccttgcgtgaggacaaggacgtcagcaagctgactctgcccccccgcctctgctcctacctctccactgccttcatccccaccatcaagcccccaattccagatccgaacaacatgagagactttgtcagctacccatcagccggcaacgagcggctgcactgcaccatgaagcgcacagaggacgacccggaggtgggcggcccgtgctacacgctctacctggagtacctgggcgggcttgtgcccatcctcaaagggcggcgcatcagcaagctgcggccagagttcgtcatcatggacccgcggacagatagcaaaccagatgaaatctatgggaacagcttgatttctactgtgatcgacagctgcaactgctcagactccagtgacattgagctgagtgatgactgggctgccaagaaatctcccaaaatctccagagctagcaaatcacccaaactcccaaggatcagcattgaggcccgcaagtcacccaagctgccccgggctgctcaggagctctcccggtccccacggttgcccctgcgcaagccctctgtgggctcgcccagcctgactcggagagagtttccttttgaagacatcactcagcacaactatcttgctcaggtcacgtctaatatctggggaaccaaatttaagattgtgggcttggctgctttcctgccaaccaacctcggtgcagtaatctataaaaccagcctcctgcatctccagccgcggcagatgaccatttatctcccagaagttcggaaaatttccatggactatattaatttacctgtcttcaacccaaatgttttcagtgaagatgaagatgatttaccagtgacaggagcatctggtgtccctgagaacagcccaccttgtaccgtgaacatccctattgcaccgatccacagctcggctcaggctatgtcccccacgcagagcatagggctggtgcagtccctactggccaatcagaatgtgcagctagatgtcctgaccaaccagacgacagctgtagggacagcagaacatgcaggtgacagtgccacccagtacccagtctccaaccggtactccaatcctggacaggtgattttcggaagcgtggaaatgggccgcatcattcagaacccccctccactgtccctgcctcccccgccgcaggggcccatgcagctgtccacggtgggccatggagaccgagaccacgaacacctgcagaagtcagccaaggccctgcggccaacaccgcagctggcagctgagggggacgcagtggtctttagtgccccccaggaggtccaggtgacgaagataaaccctccacccccgtacccaggaaccatccccgctgcccccaccacagcagcacccccgccccctctgccgcccccacagcccccagtggatgtgtgcttgaagaagggcgacttctccctctaccccacgtcagtgcactaccagacccccctgggctatgagaggatcaccaccttcgacagcagtggcaacgtggaggaggtgtgccggccccgcacccggatgctgtgctcccagaacacctacaccctccccggcccgggtagctctgccaccttgaggctcacggccactgagaagaaggtccctcagccctgcagcagtgccaccctgaaccgcctgaccgtccctcgctactccatccccaccggggacccacccccgtatcctgaaattgccagccagctggcccaggggcggggggctgcccagaggtccgacaatagcctcatccacgctaccctgcggaggaacaaccgtgaggctacgctcaagatggcccagctggccgacagcccgcgggcccccctgcagcccctggccaagtccaagggcgggcccgggggggtggtgacacagctcccagcgcggcccccacctgccctgtacacctgcagtcagtgcagtggcacagggcccagctcacagcccggagcctccctggcccataccgccagcgcctccccgttggcctcccagtcctcctacagcctcctgagcccacccgacagcgcccgcgaccgcaccgactacgtcaactcggccttcacggaggacgaggccctgtcccagcactgtcagcttgagaagcccttgaggcaccctcccctgcctgaagctgctgtcaccctgaaacggccacccccttaccagtgggaccccatgctgggtgaggacgtttgggttcctcaagaaaggacagcacagacttcagggcccaaccccttaaaactgtcctctctgatgctgagtcagggccagcacctggacgtgtcccgactgcccttcatctcccccaagtctcctgccagccccactgccactttccaaacaggctatgggatgggagtgccatatccaggaagctataacaacccccctttgcctggagtgcaggctccctgctctcccaaagatgccctgtccccaacgcagtttgcacaacaggagcctgctgtggtccttcagccgctgtacccacccagcctctcctattgcaccctgccccccatgtacccaggaagcagcacgtgctctagtttacagctgccacctgtcgccttgcatccatggagttcctacagcgcctgcccgcccatgcagaacccccagggcactctccccccaaagccacacttggtggtggagaagccccttgtgtccccaccacctgccgacctccaaagccacttgggcacagaggtgatggtagagactgcagacaacttccaggaagtcctctccctgaccgaaagcccagtcccccagcggacagaaaaatttggaaagaagaaccggaagcgcctggacagccgagcagaagaaggcagcgttcaggccatcactgagggcaaagtgaagaaggaggctaggactttgagtgactttaattccctaatctccagcccacacctggggagagagaagaagaaagtgaagagtcagaaagaccaactgaagtcaaagaagttgaataagacaaacgagttccaggacagctccgagagcgagcctgagctgttcatcagcggggatgagctcatgaaccagagccagggcagcagaaagggctggaaaagcaagcgctccccacgggccgccggcgagctggaggaggccaagtgccggcgggccagtgagaaggaggacgggcggctgggcagccaaggcttcgtgtacgtgatggccaacaagcagccgctgtggaacgaggccacccaggtctaccagctggacttcggggggcgggtgacccaggagtccgccaagaacttccagattgagttagaggggcggcaggtgatgcagtttggacggattgatggcagtgcgtacattctagacttccagtatccgttctcagccgtgcaggcctttgcagttgccctggccaacgtgactcagcgcctcaaatgaagagactggtgtggggaggagagagatgcagagagcctttggaagaggtcttcggagatgccagaggagccctctaggggtccgatgcctgggaggaccagaagccaacagcaaaactggaaaagcccggcaggcccaggagagggcgctgacctgtggtcgtcatttatttggttgggttttattaccttttattgtctgttcttcttttcttctttcatttcagtggcatttggaagcaaagagtgctaggcacctgctgttctttcaggaaacagcttggctgtggtaatgctctactgggcccttcagaatgaagacagtctgccttagagcctgctattcttttagacatagggaggatgcattatcctgtattctcctccaacatcaccactagcgtaaaagcaaaaagcttttacaaaacacagccaaaaattctcaagatgcaggttcttggggaatgggatggggacagcatttgatttacactgattatgttactccccaaaaggtgacttaattaataaagggcatttgggcagacacactgtgttggaccaacaaagtaggctctttacaggggtgttctcaccaggtagaaatgcgatttgctcactgaggatgttggggaagggacgaagggtaaagaagaaactgcaccgtatacacaggttcacatcactctgcagacagcaatgtgactcagcgtgtgacttgtagcagcagtacgagggctacactcctctgctgaggatgtctacattgaaagcctccactagtttcatcgtttgtcaaagttccgtaggatcagtgatggtcattcagcatgactggttctgggagaaggtgagagacaaaaatggaaagatcctggcctgtggtagtggtagcagttttctcaaataatgtggtgacagtcactagatcctcacatgctgagaaacagcctctactctctctgccccttttactttttaatctggaatgcattactgtaaacatgatctttcccatgagataccatgttctatgccttcccattctaaaagtgtggacaacgcttgatttgaaaccactccttttctcctcttggctacattaaaattcagttgactacaaatgctttctatcaaattagaaatgtaaccaaaaaaatgttaagtgttcaccagggtattaaaatacagagggagtatggtcaaatctttgacaaaattttcatgatcttctctaacaaaaaaagttgtttattaactgtacagactgtttactaaggagctaaaccactgagaaaacgttattaaaattgtaatacctaggtagttggttgatcacagtttgttaattgtataaaaaaaaattacctagaatatctcttcccacttcctcgtcctcgtgagaacctgtgggcagtattcaagccctgatgacaaaacccagtgttttttgttgttgttttttgttgttgttttttgtttttgtttttgtttttctcagtcttacctgtgatgttgtttaggatcaggcccctctcctgggcctgctgtgcaggagcacaggaactatctgctggcgttgggttccaaatttgcattttatttggaaacagacaagtagaagatgctacagaaaagtattttcaaatttaaacgttttttaatcccctgttttagttaaaaaattggaaaagaaaccgacccatttttttcccagatcaagatgacatgacatcactcccaattctctccaaaccccagagaaatactgacgaagttttctgatgtggcaaaggatatttcccatctaataccagtttctcatttatatttaacgtattggacctgatatttttagtgggtgcattcttccagaaagaattcagcaatgttatcagaattaattcttttatatgagtttatgtagcttgatatggtgtttcagtgcttattggttgtgcaataatggttatagcctgttagataatctaaatgcaattcccctgttttgtcgtttaggagataattatttatcttgcttttcatagtgttcttaggaattattttgttgttacgttttggtgagttatacccattttatttatttagaaaaatagtatctttgttaacgacttacatggtcacagtatattttgctgcaagaaataaagaggatatgatagaaggtttttttttttttttttttttttttttgagacggagtcccactcttgtcgcccaactagagtgtagtggcacaatctcggctccccacaacctctgactccagggttcaggtgattattttgcctcagcctcccaagcagctgggattatagacacccgccaacacgccaggctaatgtttttgtatttttaatagagatggggttttgccatgttggccaggctggtcttgaactcctgacctcaggtgatccgcccgcctcggcctcccaaagtgctgggattacagacgtgagccaccactcccggcccatagaaggttttttgctggataatttgtaacttttctaattgggaaaaaattcctattaatcacttaaaaatttttttttgtattttgtgttattgattatatacaaaggagactttttttttgagataacactcaaatagtattctcttcttttgaaaattttatttttatctgaaaataacagttgatctgaaataaaaaggggagacctattagaatgagagtagccaaggaaagagttactaggtaataagcttcactttttgtgttctaattgtttttgagatataaagaccctgaaaaagcccattttagaacctgtttaataagagcaaatataggggaaaatctttgaaatgaaagctacaaatacatgtgagaagaaaaaaatggatttttttagcaaataattaactaagcttctaaatgcctagctccctcccccaaaggcgctttcccccgatggaggcacaggcttctgtctcggatgtttggcgcacgtgagtttgtatgagtttgtaccggagtgaccccggcagccactgcccacctcccctctacccaggggcctgaaaagaggggctgccctcctgcgccaaggcagacacaagctgcgggctgtgcggtcctagtagtgtgacgtttcagttaatagtggtggtcttattttcaactatgctttcattcagtcagtctctgttgactaaatacgacgaaaattcatactttatgcaggagatttctaaaaatttaatgtttattaatagtttatgaatatcaagatacctcattgaatccctaaatttaaaagcagtccagtaaaaggttaactgtataaagaatctatgactttttgagggaagtgtgatatattaacaaatataaccaattctaaatttgttttagctctaacctcatcaaaccaaaggcacagatttgtgtacaatatacccattgaatgtatatcctgagaaaaattggggccaaagaagcaggaaaatctcaaagctctaatggcagcataaatcaaagaatttcacaggctagtgtttttatccatagccattgctcccttgtcaagtgtctcacaaggacatggaagaatgtgttatgttcatcttgtaatcatagcaaaaagtctgcaaaccccagggtcaagcctgctctgccacagggttggatggtgaccttgggcaagtccctggggctggctaggcctccacttgtccatctgtgaaatgaaaggatcagcctggacagccctctaaactcccttacagctctcagcctaagagcgcagcactgaacagcctcatcattccacttttcatgggaaatatatttcacaccattgcctttgtgtagagaaatatttcttttcctgtgttaatgagctatgtactgaatataaaccagtgcatttaaagtaatatcttttgtgcacctctaaatgtgtttggaattgtgtttgttctcatagaatatacaaaagtactgattctaggtaagaaggagtctccacgggtgtgccctgctcagctggatgtccatgagaacagccatgaaataagtcactacttgtccccaaaaccacaggaatatatacctaggtcacctcaaattcctgagtgtgctctgccatgttacacggtcttcaaattgaaaaggtttcttgaaaaggaaagtttggcccagcaactggagaaggagtccatggtgtcgctgtgtgcctgtatcatttggccaagtcaatggttgtaagcaaagttagtggagacaaaaatgtgtccaaaatgtcgtttgagttcctgggatttctgtaatagcacacaactcagaactcttcagcatttgtgtgattccttacctctggctgataaaactctaatgggttgtggcttactttgtttccattttctttggctttgtgcaatttttgtgtaactttacttgtacctatattttctgtttacagttctttttaaggggaggggtagggttctaagatcttgttgtttattgtagataaaaattttttcgtgttgtagaaaagcatgggttatgcgtttgactgaaaaagacactgtattatttaccaaaggggtattgtttttgcatttgtttataaatgcattattttggtactgtaaatttggacataatttctgagtttattactactggcattttctttttccctttttttttttttttaaccgtaagtgcacgatgcaggtgcataggccccagaccaaactagaccaccagcatgttcatgtccagacctcggcagtggcgtgcactgcttgtgcacctcagttcctccagtgttggtttgtttgttttttaattcagcatcctgctggttttactttccaagcaagatctgttgcgactcccaaatgcgttttaatgagctcatccttatttgcctttcttcttacgtattttgtgtattagattgtgcaggagatattctagaaggcattaatggtttgcattcaaaacgatgtggtttgtccaagttattttctgtctttattactgagacggattaatctccttatttttttcttgatgatttgaagttgtaacagttgtccagctattgcttaataaaattttgcagatcaaaaaaaatgtgtgcag

SEQ ID NO: 338557 - DNA, 2831 bp, Homo sapiens
tgtttgttgcactttatttttcagtgggtttggtgatttggacggattaaaattctagactgaaaagtaactcctactgtggttatggctagaggaaagcaagttcaagtatgatgggacaagtttgaataatgaactgattcctttgcctatcttaattaactgtatttgagaaattttaatttattattcccccctttttttcctgcatctataggataatattgtaaaatagcaattgaaaccaataatcattaaataaatatcaaggaaaatccaagcaaagctttctttttgttggactagtggtgtggtgtttggagacagtctctgaatgtgaacaggaaagcacccatcagcaaaacacgatcactctctagggagacagctgggggaatctgactctggcttctgcttttgttttaagggattaacttccctgtcaagtccaagaagacttgcgtatgagaagattacctgatggacttaattctaagattagcttttttcatcaagatggaaaaagatctttaggagcagaaaaggggagtgctaactgggggagcgagaagggagacgagcaaaagaaacaaaatcttgccacgtggctctgttttgtcagcaagaggatttaagactcacccagggcaaacactgggaccactgtaagagcgctggaacattctgcctcttgagtgaaggggccttctttctagcctctatggcactgaggggtgcgccggctggtggaggagtagtccgatggagccctgcgttccccggggacacagggccaagctttgaggtggaaagtttctggttctgaaacaacaaggagagagtctgtttttcttcctaaaatttggactcttgtctgcacaaactctggtctgttttgcacggtttgtgtgcctttttttccctttatgcaatctttttcagctttagcagcagaaatttgtctagttcaggaaacatgctagagggtggcttcagaaggaagatgatcctgtgtattctgtctctgcatccgaacttttgaagagaaaaattcgagctagagggattcttaaagccttaagttacttgaaatctatgtatttgcaaccctttgtctctggaatcatattacactaaactggaatctcaggctgaatgagaataaccaagtggagtaaaaagaagaaaaccgtttcttgatcaccacttaattaacgatgctctttctccaaaggatcagcacgttcttcctctgagaacttgaaaatacaaatggaccccatgtttttttaagcattaccttttcttagaagactgccatcatcttttatagaggaattttttcactatgcattcagtggatctttataaaatactgaccttctaattagattcaggtcagtcttaattaaagggggaaaaaagcaacgcaagccaaccacaaaaacacatataccaatgaaagaaattggtttaaatttcacagcattaacattactttttaagtaaaacagttcattgaagaaagtatgtatgcagcagtggaacatgggcctgtgctttgcagtgactccaacatcctgtgcctgtcctggaaggggcgtgtccccaagagtgagaaggagaagcctgtgtgcaggagacgctactatgaggaaggctggctggccacgggcaacgggcgaggagtggttggggtgactttcacctctagtcactgtcgcagggacaggagtactccacagaggataaatttcaacctccggggccacaatagcgaggttgtgctggtgaggtggaatgagccctaccagaaactggccacgtgcgatgcggacggaggcatattcgtgtggattcagtacgagggcaggtggtctgtggagctggtcaacgaccgcggggcgcaggtgagtgatttcacgtggagccatgatggaactcaagcacttatttcctatcgagatgggtttgtcctggttgggtctgtcagtggacaaagacactggtcatccgaaatcaacttggaaagtcaaattacgtgtggcatatggactcctgacgaccaacaggtgctgtttggcacggccgatgggcaggtgattgtcatggattgccacggcagaatgctggcccacgtcctcttgcacgagtcagacggtgtcctcggcatgtcctggaactacccgatcttcctggtggaggacagcagcgagagcgacacggactcagatgactacgcccctccccaagatggtccggcagcatatcccatcccagtgcagaacatcaagcctctgctcaccgtcagcttcacctcgggagacatcagcttaatgaacaactacgatgacttgtctcccacggtcatccgctcagggctgaaagaggtggtagcccagtggtgcacacagggggacttgctggcagtcgctgggatggaacggcagacccagcttggtgagcttcccaatggtccccttctgaagagtgccatggtcaagttctacaatgttcgtggggagcacatcttcacactggacactctcgtgcagcgccccatcatctccatctgctggggtcaccgggattcgaggctgttgatggcatcaggaccagccctgtacgtggtgcgtgtggagcaccgggtgtccagcctgcagctgctgtgccagcaggccatcgccagcaccttgcgtgaggacaaggacgtcagcaagctgactctgcccccccgcctctgctcctacctctccactgccttcatccccaccatcaagccgcataactgtctgtcttagagcattaagaatgatgggctgggtgtggta

SEQ ID NO: 338558 - DNA, 921 bp, Homo sapiens
ggaatacctgaacctgggttatcttatctgaagaaagagtctttgaagatgttagaaaggatcttgaaatgaggagattatcctggattctccaagagagcccccaacttaatgacaagtgtccttataaaagacacacagggccgggcgcagtggctcatgcctgtaatcccagcactttgggagggcaatgcaggaggatcacttgaggccaggagttcgaaaccccttctctacaaaaaatacaaaaatcagccaggcttgatggtgcatgcctgtagtcccagctccttgggaggctgaggtgggagtattgtttgagcctgagaggttgaggctgcagtaagctatgattgcaccactgcaccaaagcaagaccccatttcaaaaaacaacaaacaaaccaaaaacacaccagcaggttctgactgcagcctcagaaagcccccggctttcctgttcagcaagcaggcgccctgcagagtgaaggatgctttcccagagccaccctcaagtgctgctggaggcccagattccttcaaatgacctgggcagccctgccggaatgcagtgtgacaacagaaacaagttggctgcttggggaaaccatgcgggcatccccagggtctgatttggtaaccgcagatattctttgataaattgtagaaccattaggcactggtctgggcagtatgtgtatggatggggaatctgtttatgagaatataaaataaaacgtgcaaacacaggagaagtagaagatacaggtggcaggggtagagtgagaactgaagtcaggactggggagctggaggaggaaatcaggcctgaagaaactttgtggctgaagccagcaaatcttgtatatataggatctccatgaactgtcctaaaatttccaagagaaggagacatccgtca

SEQ ID NO: 338559 - DNA, 347 bp, Homo sapiens
tctgtttttcatttctataattttgtcatttcaaggatgttatataaatggaatcacagggcatataactttctgggattgactttcatttaccataatgcccttgagattcagccaagttgttgcgtgcatcaacagtttgttctttttattgctgaataatattccataatatggatacatcagtgttttaacctgttgaaggacatcaggtcgttccagtttttgtccatcttgaataaagttgtcatgaacattcgaatacaggataagaaactgccaaactgttttccagaatgggtatactattttatttatttatttattgagatggagtctcactttgt

SEQ ID NO: 338560 - DNA, 106 bp, Homo sapiens
cttgcaggccacactaagggttccaggatttcttctaagagcaacaatatgtccttgaagtattgggggtacatgagcatgacattattagagttgcattttcaaa

SEQ ID NO: 338561 - DNA, 673 bp, Homo sapiens
ttgggcaactgatagatgggggtgctgcttactgaaatgggaaggtgagaagagaggtatacgttggagaaagatgagtggattttgtgatgtcagtgaggcatctaacacagacagaaatgagtctggagcttaggtgagagatctgggagaccaatttgagcgtatttggcgaataggagatttaaaaatcctggggatggatgagagtaagaaagcatgaaatataaatgggaaaggggttcaagtctgagccttcaaggatggcagcatatggagatcaggttgaatctaaaagaatcaggagtctaaaagaattggccagaaagttaggaggaaaacacagaaatgcaccaaggaatgcaagtttcaagaggaggagagtgaccagaggtgctgaatgctgccaagagatcgagtaggaagagaatggaaaactgtccgctggagcagttctcaactgggggtgattattgcctcacgaggatgcttggcaatgcctatagacattcttggttgtcaaaacataggaggtgctactggtatctagagtgtagaggccagggatactgctaaaatcctctacagcacagaaagcccctcacaacaaagaattatctggctccagctgggcgcggtggctcacgcctataatcccagcactttgggaggc

SEQ ID NO: 338562 - DNA, 354 bp, Homo sapiens
aggctgggcatggtggctcacacctataatcccagcactttgggaggccatggtgggaggatcatttgagtccaggagtttgaggccagcctaggcaacatagcgagacttcatctccagttaaaaaaaaaattttttttaaagaaacatgtacaagaggttcatcacaactttatttgtaatagcaaaaaattagaaacagtctaaatgtccaccgataggagaatggttgtgtcaaatatgacacatttgtattttttattaccatccagcagtttaaaaataatataggaaatctttatatcccaacatagagcgtcctgtaagacacatagttaaatgtttgttgaagat

SEQ ID NO: 338563 - DNA, 109 bp, Homo sapiens
cctgtgtggaggggaggagttaggagccttccacggggtgaacccctgccttcctggcataccacattccactgaggaggagaagcttggagcgcagcctctcactcat

SEQ ID NO: 338564 - DNA, 168 bp, Homo sapiens
gggggataggcagccaggattttactatgttgcctgggctggtttgaactcaagtgatcctcctgcctcagactcccaagtagttgggactacaggtgtgtgccacctgagctaaaattctattaattttaccaaatttcattaaatctaagatgtctgtgattataa

SEQ ID NO: 338565 - DNA, 280 bp, Homo sapiens
tgggcttaagcgatcctcccacctcagcctctcaaacagttgggactataggcatgtgccaccatgcctggctaatttttgtatttgttgtagagatgaggtttcaccatgttgcccaggctagtctgggctcaagtgatccgcctgcctcagcctcccgaaacactggggattacaggtgtgaaccactgggctggaaatgttaatgttttaacttgttgctgtgtttctatgactaattaattcatttaatgattcagggagccagtctgaaatgtta

SEQ ID NO: 338566 - DNA, 909 bp, Homo sapiens
agcctcccaagtagctgggactacccgtgcatgacaccctatctggcccttgttttttgttgttgttgttgttctttcttttttcacgtggtttcgcacttgtcacccaggctggagtgcaatggtgtgttgtcggctcactgcaacctgtctctcaggttgaagtgattctcgtgtctcagtcttccgagtagctgggattacaggcgtgtgccaccacgcctggctaatttttgtatttttagtaaagacggggcttcactatattggtcaggctggtctcgatttcctgacctcaggtgatctgcccacctcagcctcccaaagtgctgatattacaggcgtgagccaccacgcccggcccgcatccggctttaagatttgtttttcacttgcccgtgggaggatgtacttatctcagatgctagagccgggagaccctcccccccaccacccccatctcctgcaggagctctgatcgcagattggagtgtctgaactctgcatctatggacggtgcttctgtaagccggccgcaactctggagtggcatagtaaagtggcaaaggctttgcctttctggttaaagaccccagcacctccagtgagaccctttcctgtacccccactgatattctttatggaatgttttgtgcgtgagtcagcacatttaatgcccgtgaatagtgacaaaacatcgtttgcagtaccctaatgactgatgatgctgagaatcttttgatgtgcttgttggccgtttgtacatctttggagaaatttctcttcgtgtcttttgtctattttatttttttgggacagagtctcactcctaaccccgggctggagtgcagtggcacgatctccacgcactacaattcttgtacctcagcctcccaagtagctgggatt

SEQ ID NO: 338567 - DNA, 302 bp, Homo sapiens
agcgtactctaccacactagctagacaaccagcgctttaaagaaatggacattatagccaggggtggtggtggatgcctgcaatcccagctacttgggaggctgagacatgagaatcccttgaatccgggaggtgaaggttgcagtgagccaagatcgtgacactgcactccagcctgggcaacagagcaagactctgtctcaaattaaaaaaagaaaagagaagaaaagaaacggacgtgaaaacaaccccaaactgtgccaccttaaaagcagccacttggctgggcgcggtggctcaca

SEQ ID NO: 338568 - DNA, 428 bp, Homo sapiens
agtcagtagaccaacaaacatcaaaattagaactccaggaacttcctatcacagaattttcagatacagactataaaatacatatacatgtttaaagatagaaaaggaattgaaaccacggagaaataacaagacattgttttaacaaacaaaaaagatgtcaggaaaaaggcatagaaatgataaatatcctcattgacattaaaacagaatatacaggatgaaaagtaaattacttatagctgaagagagatgtagtgaacctcaagacagatctgaagaaattaagaatgcagcagttagggagaaagaaatggattatatgaaagagggattaagtggcatggaaggcaaaatgagaaagacccaactcatatctgagctctataaggagacaatagatagaattagccagaatggtaaagaca

SEQ ID NO: 338569 - DNA, 333 bp, Homo sapiens
  misc_feature (314)..(314): n is a, c, g, or t
  misc_feature (322)..(322): n is a, c, g, or t
ccaagacccaaagttaaccacaatacaaaaggagagaagaatggatactatgatcttccttttaaactttcattatagctgactgcagaactgctgggatgactcaatagattatgggaaatggcctaaaagtctactggaaaccagactgaactgtggccacatcttaaaaataacctcttgcctctaattttcttctcccccaatttttttgactaaaaagggttttttgctgtttcgttgttgttgtttcgcaatcaccagtcctaaaatgaagctaaaaatttattttcattttatccttggcggtctanagatccgntagaggtccga

SEQ ID NO: 338570 - DNA, 363 bp, Homo sapiens
aaaaggagagaagaatggatactatgatcttccttttaaactttcattatagctgactgcagaactgctgggatgactcaatagattatgggaaatggcctaaaagtctactggaaaccagactgaactgtggccacatcttaaaaataacctcttgcctctaattttcttctcccccaatttttttgactaaaaagggttttttgctgtttcgttgttgttgtttcgcaatcaccagtcctaaaatgaagctaaaaatttattttcattttatccttggtcattctctagcaccacaatcaagaacattaatgagtctttcctacaataccgaaagttagttaaacaaataccttgtttccc

SEQ ID NO: 338571 - DNA, 744 bp, Homo sapiens
cttgactataaaatattttcagatatttgaatgagaaaacaaaaagccatggttccccactgagagacacagaaagaactcctacagctctgccccctccccacacagaccagccctccttccttgaggacaggactgactaggtctgaacacagcaggtgccccacgcatgagctgaactccactgaactacagccagtcacacagactggagggtctttctgtgggattctcccattcccactgaatccttcccataggcaaaaggtagttccctaaaacaaatgagaacagctggaagggatctgtttactgaatcaagaaaacacttaaatctattaactgaatgaagacaactgaaaaacaaaacattcctgaaggattaaactctgcagaaagaagctggcatttgcccaggacaaggacaggcatcctttacaatgcttatctcagttagaacagccttgtaggtagacagggcagaaggatctctgctgggtcagcctaacaggagcaggaagggtcacctggtgcaaaaacaggggaggaaagtttctgaccagctgatgtgaaagcaaagttggccagaggtcacgtgagggaagtctgctaggatgcctgtctcagtctgtgtagttttgctatgaagaaatatctgaggctgggtatttacttttaaaagaggtgtatctggctcatgggtctgcagactgtacaagcagggtgtcagcatctgcttccaaa

SEQ ID NO: 338572 - DNA, 507 bp, Homo sapiens
ttttaatagcttgataatcattctcaaatgtaagtgcacttagttctgtgcattttatttataggtttaaaaatgttattctgagaagggatccataggcttcaccagacagctaaagggatccatcgcacaaaaaaaggttaagaatctacactttatttaactaagatgcaggtgtaacacagaaggcacaggggataattttcaagagccatctaaggggtacaatgtattgagggaaagagaaggctttaaattactaaccaaaataaggccaagtgcaccagaaaaaaaaaatgcacctgagtcttgggaaggagggatatggatatacagaaagaaggatttgtataaactaggagaggctgattgggggaacagaaagaccaatctaatggaattgaagaaaaaggagagaaatgaacctgtacaaggtctggtcaggtcctgtgctctcaaaaagagaaaaacaatctaggctcctccatgaggaaccaagcagccagt

SEQ ID NO: 338573 - DNA, 2636 bp, Homo sapiens
agtcagacttccgggcgaggcggtgaggggcttccggttggggtggcagggtggtggatctgtcggtcccgttttcccgtcgcacgtggtggccactgttggcttctgaatggtttgcaaggcggatatccacgccaaggcctttggatcggccgtgggtacatccgtctgagccgttcctttccatcgcagagcggcggcctccggcggcgctctccagtcatggactaccggcggcttctcatgagccgggtggtccccgggcaattcgacgacgcggactcctctgacagtgaaaacagagacttgaagacagtcaaagagaaggatgacattctgtttgaagaccttcaagacaatgtgaatgagaatggtgaaggtgaaatagaagatgaggaggaggagggttatgatgatgatgatgatgactgggactgggatgaaggagttggaaaactcgccaagggttatgtctggaatggaggaagcaacccacaggcaaatcgacagacctccgacagcagttcagccaaaatgtctactccagcagacaaggtcttacggaaatttgagaataaaattaatttagataagctaaatgttactgattccgtcataaataaagtcaccgaaaagtctagacaaaaggaagcagatatgtatcgcatcaaagataaggcagacagagcaactgtagaacaggtgttggatcccagaacaagaatgattttattcaagatgttgactagaggaatcataacagagataaatggctgcattagcacaggaaaagaagctaatgtataccatgctagcacagcaaatggagagagcagagcaatcaaaatttataaaacttctattttggtgttcaaagatcgggataaatatgtaagtggagaattcaggtaagttcagatttttccctccagttggtttaatttctatttcctaaaacattaaaataataatggaatgattgaaataataaacatttttcttattcaagatttcgtcatggctattgtaaaggaaaccctaggaaaatggtgaaaacttgggcagaaaaagaaatgaggaacttaatcaggctaaacacagcagagataccatgtccagaaccaataatgctaagaagtcatgttcttgtcatgagtttcatcggtaaagatgacatgcctgcaccactcttgaaaaatgtccagttatcagaatccaaggctcgggagttgtacctgcaggtcattcagtacatgagaagaatgtatcaggatgccagacttgtccatgcagatctcagtgaatttaacatgctgtaccacggtggaggcgtgtatatcattgacgtgtctcagtccgtggagcacgaccacccacatgccttggagttcttgagaaaggattgcgccaacgtcaatgatttctttatgaggcacagtgttgctgtcatgactgtgcgggagctctttgaatttgtcacagatccatccattacacatgagaacatggatgcttatctctcaaaggccatggaaatagcatctcaaaggaccaaggaagaacggtctagccaagatcatgtggatgaagaggtgtttaagcgagcatatattcctagaaccttgaatgaagtgaaaaattatgagagggatatggacataattatgaaattgaaggaagaggacatggccatgaatgcccaacaagataatattctataccagactgttacaggattgaagaaagatttgtcaggagttcagaaggtccctgcactcctagaaaatcaagtggaggaaaggacttgttctgattcagaagatattggaagctctgagtgctctgacacagactctgaagagcagggagaccatgcccgccccaagaaacacaccacggaccctgacattgataaaaaagaaagaaaaaagatggtcaaggaagcccagagagagaaaagaaaaaacaaaattcctaaacatgtgaaaaaaagaaaggagaagacagccaagacgaaaaaaggcaaatagaatgagaaccatattatgtacagtcattttcctcagttccttttctcgcctgaactcttaagctgcatctggaagatggcttattggttttaaccagattgtcatcgtggcactgtctgtgaagacggattcaaatgttttcatgtaactatgtaaaaagctctaagctctagagtctagatccagtcactgactctgtctggtgttgacagaggatttatttaagctattattttaataaagaactttgtacatttttatttttatatttttttctcttacaaatatgtttttggaagcatgataaatgtttaaatgtagtcaacatctgtaactcttacatgagtgtccagaggcactcatgggaaaattggttttgctttctttgtacacaccagagacccatctgaggtcatctgattataaggccatgtttatataaagggaatttcacccacagttcagctggctgttgattttcactgcaactctgcctttgtgtgtattggcgatcatttgtaatgctcttacacttcgtctttaatgttctttttggagttaggacctctcagttcataaagttttttacaattcaaaaaaaaaaaa

SEQ ID NO: 338574 - DNA, 1957 bp, Homo sapiens
agcatcgtgatatcgtcatagctgatctctagagtatcccggttcattcgctacacaagatgttgactagaggaatcataacagagataaatggctgcattagcacaggaaaagaagctaatgtataccatgctagcacagcaaatggagagagcagagcaatcaaaatttataaaacttctattttggtgttcaaagatcgggataaatatgtaagtggagaattcaggtaagttcagatttttccctccagttggtttaatttctatttcctaaaacattaaaataataatggaatgattgaaataataaacatttttcttattcaagatttcgtcatggctattgtaaaggaaaccctaggaaaatggtgaaaacttgggcagaaaaagaaatgaggaacttaatcaggctaaacacagcagagataccatgtccagaaccaataatgctaagaagtcatgttcttgtcatgagtttcatcggtaaagatgacatgcctgcaccactcttgaaaaatgtccagttatcagaatccaaggctcgggagttgtacctgcaggtcattcagtacatgagaagaatgtatcaggatgccagacttgtccatgcagatctcagtgaatttaacatgctgtaccacggtggaggcgtgtatatcattgacgtgtctcagtccgtggagcacgaccacccacatgccttggagttcttgagaaaggattgcgccaacgtcaatgatttctttatgaggcacagtgttgctgtcatgactgtgcgggagctctttgaatttgtcacagatccatccattacacatgagaacatggatgcttatctctcaaaggccatggaaatagcatctcaaaggaccaaggaagaacggtctagccaagatcatgtggatgaagaggtgtttaagcgagcatatattcctagaaccttgaatgaagtgaaaaattatgagagggatatggacataattatgaaattgaaggaagaggacatggccatgaatgcccaacaagataatattctataccagactgttacaggattgaagaaagatttgtcaggagttcagaaggtccctgcactcctagaaaatcaagtggaggaaaggacttgttctgattcagaagatattggaagctctgagtgctctgacacagactctgaagagcagggagaccatgcccgccccaagaaacacaccacggaccctgacattgataaaaaagaaagaaaaaagatggtcaaggaagcccagagagagaaaagaaaaaacaaaattcctaaacatgtgaaaaaaagaaaggagaagacagccaagacgaaaaaaggcaaatagaatgagaaccatattatgtacagtcattttcctcagttccttttctcgcctgaactcttaagctgcatctggaagatggcttattggttttaaccagattgtcatcgtggcactgtctgtgaagacggattcaaatgttttcatgtaactatgtaaaaagctctaagctctagagtctagatccagtcactgactctgtctggtgttgacagaggatttatttaagctattattttaataaagaactttgtacatttttatttttatatttttttctcttacaaatatgtttttggaagcatgataaatgtttaaatgtagtcaacatctgtaactcttacatgagtgtccagaggcactcatgggaaaattggttttgctttctttgtacacaccagagacccatctgaggtcatctgattataaggccatgtttatataaagggaatttcacccacagttcagctggctgttgattttcactgcaactctgcctttgtgtgtattggcgatcatttgtaatgctcttacacttcgtctttaatgttctttttggagttaggacctctcagttcataaagttttttacaattcaaaaaaaaaaaa

SEQ ID NO: 338575 - DNA, 1727 bp, Homo sapiens
agtcagacttccgggcgaggcggtgaggggcttccggttggggtggcagggtggtggatctgtcggtcccgttttcccgtcgcacgtggtggccactgttggcttctgaatggtttgcaaggcggatatccacgccaaggcctttggatcggccgtgggtacatccgtctgagccgttcctttccatcgcagagcggcggcctccggcggcgctctccagtcatggactaccggcggcttctcatgagccgggtggtccccgggcaattcgacgacgcggactcctctgacagtgaaaacagagacttgaagacagtcaaagagaaggatgacattctgtttgaagaccttcaagacaatgtgaatgagaatggtgaaggtgaaatagaagatgaggaggaggagggttatgatgatgatgatgatgactgggactgggatgaaggagttggaaaactcgccaagggttatgtctggaatggaggaagcaacccacaggcaaatcgacagacctccgacagcagttcagccaaaatgtctactccagcagacaaggtcttacggaaatttgagaataaaattaatttagataagctaaatgttactgattccgtcataaataaagtcaccgaaaagtctagacaaaaggaagcagatatgtatcgcatcaaagataaggcagacagagcaactgtagaacaggtgttggatcccagaacaagaatgattttattcaagatgttgactagaggaatcataacagagataaatggctgcattagcacaggaaaagaagctaatgtataccatgctagcacagcaaatggagagagcagagcaatcaaaatttataaaacttctattttggtgttcaaagatcgggataaatatgtaagtggagaattcagatttcgtcatggctattgtaaaggaaaccctaggaaaatggtgaaaacttgggcagaaaaagaaatgaggaacttaatcaggctaaacacagcagagataccatgtccagaaccaataatgctaagaagtcatgttcttgtcatgagtttcatcggtaaagatgacatgcctgcaccactcttgaaaaatgtccagttatcagaatccaaggctcgggagttgtacctgcaggtcattcagtacatgagaagaatgtatcaggatgccagacttgtccatgcagatctcagtgaatttaacatgctgtaccacggtggaggcgtgtatatcattgacgtgtctcagtccgtggagcacgaccacccacatgccttggagttcttgagaaaggattgcgccaacgtcaatgatttctttatgaggcacagtgttgctgtcatgactgtgcgggagctctttgaatttgtcacagatccatccattacacatgagaacatggatgcttatctctcaaaggccatggaaatagcatctcaaaggaccaaggaagaacggtctagccaagatcatgtggatgaagaggtgtttaagcgagcatatattcctagaaccttgaatgaagtgaaaaattatgagagggatatggacataattatgaaattgaaggaagaggacatggccatgaatgcccaacaagataatgtaagtagcttggtttgtatatagcaagcagctcttcaaaagtagtaggggactgtcccaaacctatctgggccttttaagttcccctaatcttgaatattggcttctgagctagt

SEQ ID NO: 338576 - DNA, 1481 bp, Homo sapiens
agtcagacttccgggcgaggcggtgaggggcttccggttggggtggcagggtggtggatctgtcggtcccgttttcccgtcgcacgtggtggccactgttggcttctgaatggtttgcaaggcggatatccacgccaaggcctttggatcggccgtgggtacatccgtctgagccgttcctttccatcgcagagcggcggcctccggcggcgctctccagtcatggactaccggcggcttctcatgagccgggtggtccccgggcaattcgacgacgcggactcctctgacagtgaaaacagagacttgaagacagtcaaagagaaggatgacattctgtttgaagaccttcaagacaatgtgaatgagaatggtgaaggtgaaatagaagatgaggaggaggagggttatgatgatgatgatgatgactgggactgggatgaaggagttggaaaactcgccaagggttatgtctggaatggaggaagcaacccacaggcaaatcgacagacctccgacagcagttcagccaaaatgtctactccagcagacaaggtcttacggaaatttgagaataaaattaatttagataagctaaatgttactgattccgtcataaataaagtcaccgaaaagtctagacaaaaggaagcagatatgtatcgcatcaaagataaggcagacagagcaactgtagaacaggtgttggatcccagaacaagaatgattttattcaagatgttgactagaggaatcataacagagataaatggctgcattagcacaggaaaagaagctaatgtataccatgctagcacagcaaatggagagagcagagcaatcaaaatttataaaacttctattttggtgttcaaagatcgggataaatatgtaagtggagaattcagatttcgtcatggctattgtaaaggaaaccctaggaaaatggtgaaaacttgggcagaaaaagaaatgaggaacttaatcaggctaaacacagcagagataccatgtccagaaccaataatgctaagaagtcatgttcttgtcatgagtttcatcggtaaagatgacatgcctgcaccactcttgaaaaatgtccagttatcagaatccaaggctcgggagttgtacctgcaggtcattcagtacatgagaagaatgtatcaggatgccagacttgtccatgcagatctcagtgaatttaacatgctgtaccacggtggaggcgtgtatatcattgacgtgtctcagtccgtggagcacgaccacccacatgccttggagttcttgagaaaggattgcgccaacgtcaatggtgagtagaaacggcaattttcgaaacagctcattggtctgttttggttttgtactcagttaagctgttggcgtaaaattttctcactaaattgtttggtgcagtgatgcttaaaccatttgctgggagatggtatgtaattttatctccttgtttctctata

SEQ ID NO: 338577 - DNA, 1065 bp, Homo sapiens
agtcagacttccgggcgaggcggtgaggggcttccggttggggtggcagggtggtggatctgtcggtcccgttttcccgtcgcacgtggtggccactgttggcttctgaatggtttgcaaggcggatatccacgccaaggcctttggatcggccgtgggtacatccgtctgagccgttcctttccatcgcagagcggcggcctccggcggcgctctccagtcatggactaccggcggcttctcatgagccgggtggtccccgggcaattcgacgacgcggactcctctgacagtgaaaacagagacttgaagacagtcaaagagaaggatgacattctgtttgaagaccttcaagacaatgtgaatgagaatggtgaaggtgaaatagaagatgaggaggaggagggttatgatgatgatgatgatgactgggactgggatgaaggagttggaaaactcgccaagggttatgtctggaatggaggaagcaacccacaggcaaatcgacagacctccgacagcagttcagccaaaatgtctactccagcagacaaggtcttacggaaatttgagaataaaattaatttagataagctaaatgttactgattccgtcataaataaagtcaccgaaaagtctagacaaaaggaagcagatatgtatcgcatcaaagataaggcagacagagcaactgtagaacaggtgttggatcccagaacaagaatgattttattcaagatgttgactagaggaatcataacagagataaatggctgcattagcacaggaaaagaagctaatgtataccatgctagcacagcaaatggagagagcagagcaatcaaaatttataaaacttctattttggtgttcaaagatcgggataaatatgtaagtggagaattcagatttcgtcatggctattgtaaaggaaaccctaggaaaatggtgaaaacttgggcagaaaaagaaatgaggaacttaatcaggctaaacacagcagagataccatgtccagcctgggcgacaaaactggagtcatgactattcggagctctttgaatt

SEQ ID NO: 338578 - DNA, 602 bp, Homo sapiens
agtcagacttccgggcgaggcggtgaggggcttccggttggggtggcagggtggtggatctgtcggtcccgttttcccgtcgcacgtggtggccactgttggcttctgaatggtttgcaaggcggatatccacgccaaggcctttggatcggccgtgggtacatccgtctgagccgttcctttccatcgcagagcggcggcctccggcggcgctctccagtcatggactaccggcggcttctcatgagccgggtggtccccgggcaattcgacgacgcggactcctctgacagtgaaaacagagacttgaagacagtcaaagagaaggatgacattctgtttgaagaccttcaagacaatgtgaatgagaatggtgaaggtgaaatagaagatgaggaggaggagggttatgatgatgatgatgatgactgggactggcatcaaagactgggttaaatctgtatgaccttgggttagggaggggattgttaaatacaacaccaatccctaggtgacaatatcaataaattggttgagctggcttcaataaaattaaaaacttttgtgcttcaaaagtaacccttttgaaagtgaaaatgcct

SEQ ID NO: 338579 - DNA, 415 bp, Homo sapiens
caaatattatagctgtagtgatgaaagtgacacttacgaaggaaacgcagtttagtgcctacttttaaaaacattacattgttttcattactaaactgtattctatttacaataaaacatttagaaagtgtagaagagaaggaagaggggagaaataccctgttcagcaactctgttaatgtcttttcgtcttacatattgtttacattgtgggtttcttgtattttagataagctaaatgttactgattccgtcataaataaagtcaccgaaaagtctagacaaaaggaagcagatatgtaagtaatattttaataatatgcatgggtgataaggactaatctagattaagcagcaccttgatcataattcttttacagaggatgttcatttgtatacttaaaccaatcattat

SEQ ID NO: 338580 - DNA, 321 bp, Homo sapiens
catgctagcacagcaaatggagagagcagagcaatcaaaatttataaaacttctattttggtgttcaaagatcgggataaatatgtaagtggagaattcaggtaagttcagatttttccctccagttggtttaatttctatttcctaaaacattaaaataataatggaatgattgaaataataaacatttttcttattcaagatttcgtcatggctattgtaaaggaaaccctaggaaaatggtgaaaacttgggcagaaaaagaaatgaggaacttaatcaggtgactgtctgggatgtgtgtatgtctgtcctatgccc

SEQ ID NO: 338581 - DNA, 460 bp, Homo sapiens
cttctgtgtctctggcccataggtaccacggtggaggcgtgtatatcattgacgtgtctcagtccgtggagcacgaccacccacatgccttggagttcttgagaaaggattgcgccaacgtcaatggtgagtagaaacggcaattttcgaaacagctcattggtctgttttggttttgtactcagttaagctgttggcgtaaaattttctcactaaattgtttggtgcagtgatgcttaaaccatttgctgggagatggtatgtaattttatctccttgtttctctataaggtagttggaataataatatttttcctcataaaagctgtcattaacgtttttccttctgacagatttctttatgaggcacagtgttgctgtcatgactgtgcgggagctctttgaatttgtcacagatccatccattacacatgagaacatggatgcttatctctcaaag

SEQ ID NO: 338582 - DNA, 2535 bp, Homo sapiens
agtcagacttccgggcgaggcggtgaggggcttccggttggggtggcagggtggtggatctgtcggtcccgttttcccgtcgcacgtggtggccactgttggcttctgaatggtttgcaaggcggatatccacgccaaggcctttggatcggccgtgggtacatccgtctgagccgttcctttccatcgcagagcggcggcctccggcggcgctctccagtcatggactaccggcggcttctcatgagccgggtggtccccgggcaattcgacgacgcggactcctctgacagtgaaaacagagacttgaagacagtcaaagagaaggatgacattctgtttgaagaccttcaagacaatgtgaatgagaatggtgaaggtgaaatagaagatgaggaggaggagggttatgatgatgatgatgatgactgggactgggatgaaggagttggaaaactcgccaagggttatgtctggaatggaggaagcaacccacaggcaaatcgacagacctccgacagcagttcagccaaaatgtctactccagcagacaaggtcttacggaaatttgagaataaaattaatttagataagctaaatgttactgattccgtcataaataaagtcaccgaaaagtctagacaaaaggaagcagatatgtatcgcatcaaagataaggcagacagagcaactgtagaacaggtgttggatcccagaacaagaatgattttattcaagatgttgactagaggaatcataacagagataaatggctgcattagcacaggaaaagaagctaatgtataccatgctagcacagcaaatggagagagcagagcaatcaaaatttataaaacttctattttggtgttcaaagatcgggataaatatgtaagtggagaattcagatttcgtcatggctattgtaaaggaaaccctaggaaaatggtgaaaacttgggcagaaaaagaaatgaggaacttaatcaggctaaacacagcagagataccatgtccagaaccaataatgctaagaagtcatgttcttgtcatgagtttcatcggtaaagatgacatgcctgcaccactcttgaaaaatgtccagttatcagaatccaaggctcgggagttgtacctgcaggtcattcagtacatgagaagaatgtatcaggatgccagacttgtccatgcagatctcagtgaatttaacatgctgtaccacggtggaggcgtgtatatcattgacgtgtctcagtccgtggagcacgaccacccacatgccttggagttcttgagaaaggattgcgccaacgtcaatgatttctttatgaggcacagtgttgctgtcatgactgtgcgggagctctttgaatttgtcacagatccatccattacacatgagaacatggatgcttatctctcaaaggccatggaaatagcatctcaaaggaccaaggaagaacggtctagccaagatcatgtggatgaagaggtgtttaagcgagcatatattcctagaaccttgaatgaagtgaaaaattatgagagggatatggacataattatgaaattgaaggaagaggacatggccatgaatgcccaacaagataatattctataccagactgttacaggattgaagaaagatttgtcaggagttcagaaggtccctgcactcctagaaaatcaagtggaggaaaggacttgttctgattcagaagatattggaagctctgagtgctctgacacagactctgaagagcagggagaccatgcccgccccaagaaacacaccacggaccctgacattgataaaaaagaaagaaaaaagatggtcaaggaagcccagagagagaaaagaaaaaacaaaattcctaaacatgtgaaaaaaagaaaggagaagacagccaagacgaaaaaaggcaaatagaatgagaaccatattatgtacagtcattttcctcagttccttttctcgcctgaactcttaagctgcatctggaagatggcttattggttttaaccagattgtcatcgtggcactgtctgtgaagacggattcaaatgttttcatgtaactatgtaaaaagctctaagctctagagtctagatccagtcactgactctgtctggtgttgacagaggatttatttaagctattattttaataaagaactttgtacatttttatttttatatttttttctcttacaaatatgtttttggaagcatgataaatgtttaaatgtagtcaacatctgtaactcttacatgagtgtccagaggcactcatgggaaaattggttttgctttctttgtacacaccagagacccatctgaggtcatctgattataaggccatgtttatataaagggaatttcacccacagttcagctggctgttgattttcactgcaactctgcctttgtgtgtattggcgatcatttgtaatgctcttacacttcgtctttaatgttctttttggagttaggacctctcagttcataaagttttttacaattcaaaaaaaaaaaa

SEQ ID NO: 338583 - DNA, 2391 bp, Homo sapiens
agtcagacttccgggcgaggcggtgaggggcttccggttggggtggcagggtggtggatctgtcggtcccgttttcccgtcgcacgtggtggccactgttggcttctgaatggtttgcaaggcggatatccacgccaaggcctttggatcggccgtgggtacatccgtctgagccgttcctttccatcgcagagcggcggcctccggcggcgctctccagtcatggactaccggcggcttctcatgagccgggtggtccccgggcaattcgacgacgcggactcctctgacagtgaaaacagagacttgaagacagtcaaagagaaggatgacattctgtttgaagaccttcaagacaatgtgaatgagaatggtgaaggtgaaatagaagatgaggaggaggagggttatgatgatgatgatgatgactgggactgggatgaaggagttggaaaactcgccaagggttatgtctggaatggaggaagcaacccacaggcaaatcgacagacctccgacagcagttcagccaaaatgtctactccagcagacaaggtcttacggaaatttgagaataaaattaatttagataagctaaatgttactgattccgtcataaataaagtcaccgaaaagtctagacaaaaggaagcagatatgtatcgcatcaaagataaggcagacagagcaactgtagaacaggtgttggatcccagaacaagaatgattttattcaagatgttgactagaggaatcataacagagataaatggctgcattagcacaggaaaagaagctaatgtataccatgctagcacagcaaatggagagagcagagcaatcaaaatttataaaacttctattttggtgttcaaagatcgggataaatatgtaagtggagaattcagatttcgtcatggctattgtaaaggaaaccctaggaaaatggtgaaaacttgggcagaaaaagaaatgaggaacttaatcaggctaaacacagcagagataccatgtccagaaccaataatgctaagaagtcatgttcttgtcatgagtttcatcggtaaagatgacatgcctgcaccactcttgaaaaatgtccagttatcagaatccaaggctcgggagttgtacctgcaggtcattcagtacatgagaagaatgtatcaggatgccagacttgtccatgcagatctcagtgaatttaacatgctgtaccacggtggaggcgtgtatatcattgacgtgtctcagtccgtggagcacgaccacccacatgccttggagttcttgagaaaggattgcgccaacgtcaatgatttctttatgaggcacagtgttgctgtcatgactgtgcgggagctctttgaatttgtcacagatccatccattacacatgagaacatggatgcttatctctcaaaggccatggaaatagcatctcaaaggaccaaggaagaacggtctagccaagatcatgtggatgaagaggtgtttaagcgagcatatattcctagaaccttgaatgaagtgaaaaattatgagagggatatggacataattatgaaattgaaggaagaggacatggccatgaatgcccaacaagataatattctataccagactgttacaggattgaagaaagatttgtcaggagttcagaaggtccctgcactcctagaaaatcaagtggaggaaaggacttgttctgattcagaagatattggaagctctgagtgctctgacacagactctgaagagcagggagaccatgcccgccccaagaaacacaccacggaccctgacattgataaaaaagaaagaaaaaagatggtcaaggaagcccagagagagaaaagaaaaaacaaaattcctaaacatgtgaaaaaaagaaaggagaagacagccaagacgaaaaaaggcaaatagaatgagaaccatattatgtacagtcattttcctcagttccttttctcgcctgaactcttaagctgcatctggaagatggcttattggttttaaccagattgtcatcgtggcactgtctgtgaagacggattcaaatgttttcatgtaactatgtaaaaagctctaagctctagagtctagatccagtcactgactctgtctggtgttgacagaggatttatttaagctattattttaataaagaactttgtacatttttatttttatatttttttctcttacaaatatgtttttggaagcatgataaatgtttaaatgtagtcaacatctgtaactcttacatgagtgtccagaggcactcatgggaaaattggttttgctttctttgtacacaccagagacccatctgaggtcatctgattataaggccatgtttatataaagggaatttcacccacagtt

SEQ ID NO: 338584 - DNA, 2501 bp, Homo sapiens
agtcagacttccgggcgaggcggtgaggggcttccggttggggtggcagggtggtggatctgtcggtcccgttttcccgtcgcacgtggtggccactgttggcttctgaatggtttgcaaggcggatatccacgccaaggcctttggatcggccgtgggtacatccgtctgagccgttcctttccatcgcagagcggcggcctccggcggcgctctccagtcatggactaccggcggcttctcatgagccgggtggtccccgggcaattcgacgacgcggactcctctgacagtgaaaacagagacttgaagacagtcaaagagaaggatgacattctgtttgaagaccttcaagacaatgtgaatgagaatggtgaaggtgaaatagaagatgaggaggaggagggttatgatgatgatgatgatgactgggactgggatgaaggagttggaaaactcgccaagggttatgtctggaatggaggaagcaacccacaggcaaatcgacagacctccgacagcagttcagccaaaatgtctactccagcagacaaggtcttacggaaatttgagaataaaattaatttagataagctaaatgttactgattccgtcataaataaagtcaccgaaaagtctagacaaaaggaagcagatatgtatcgcatcaaagataaggcagacagagcaactgtagaacaggtgttggatcccagaacaagaatgattttattcaagatgttgactagaggaatcataacagagataaatggctgcattagcacaggaaaagaagctaatgtataccatgctagcacagcaaatggagagagcagagcaatcaaaatttataaaacttctattttggtgttcaaagatcgggataaatatgtaagtggagaattcagatttcgtcatggctattgtaaaggaaaccctaggaaaatggtgaaaacttgggcagaaaaagaaatgaggaacttaatcaggctaaacacagcagagataccatgtccagaaccaataatgctaagaagtcatgttcttgtcatgagtttcatcggtaaagatgacatgcctgcaccactcttgaaaaatgtccagttatcagaatccaaggctcgggagttgtacctgcaggtcattcagtacatgagaagaatgtatcaggatgccagacttgtccatgcagatctcagtgaatttaacatgctgtaccacggtggaggcgtgtatatcattgacgtgtctcagtccgtggagcacgaccacccacatgccttggagttcttgagaaaggattgcgccaacgtcaatgatttctttatgaggcacagtgttgctgtcatgactgtgcgggagctctttgaatttgtcacagatccatccattacacatgagaacatggatgcttatctctcaaaggccatggaaatagcatctcaaaggaccaaggaagaacggtctagccaagatcatgtggatgaagaggtgtttaagcgagcatatattcctagaaccttgaatgaagtgaaaaattatgagagggatatggacataattatgaaattgaaggaagaggacatggccatgaatgcccaacaagataatattctataccagactgttacaggattgaagaaagatttgtcaggagttcagaaggtccctgcactcctagaaaatcaagtggaggaaaggacttgttctgattcagaagatattggaagctctgagtgctctgacacagactctgaagagcagggagaccatgcccgccccaagaaacacaccacggaccctgacattgataaaaaagaaagaaaaaagatggtcaaggaagcccagagagagaaaagaaaaaacaaaattcctaaacatgtgaaaaaaagaaaggagaagacagccaagacgaaaaaaggcaaatagaatgagaaccatattatgtacagtcattttcctcagttccttttctcgcctgaactcttaagctgcatctggaagatggcttattggttttaaccagattgtcatcgtggcactgtctgtgaagacggattcaaatgttttcatgtaactatgtaaaaagctctaagctctagagtctagatccagtcactgactctgtctggtgttgacagaggatttatttaagctattattttaataaagaactttgtacattaaaaaaaaaaaaaaaaaaaaaaaaaaaaaaaaaaaacccgcgcggagcgccacccagaggggcggggcggcggcaaaagagagagagagagagagagagagagggggaagagcggggccaccaaagggagtctcacggcccaccaattagggggaccacaggggggcaaaacatggggggcgccccacaaagggagaggacccacttaaaaacaaagaaaaaccggggagaaacagggcgcccaaagaccgctcgacacacacaccgaaataaaaaacaaaacacggacacacaaccaaaacaaaccccacaaaac

SEQ ID NO: 338585 - DNA, 1196 bp, Homo sapiens
cttcatgcacagtgtctgacattcatctaaagttaccatgcatgccaagaactaggaccaagagaagaagaaaaacagaaaatggaagctgacgtacaagtgatgcagatattggatttttcagacatactttaaaataactatgattattagtgtttaagcgagcatatattcctagaaccttgaatgaagtgaaaaattatgagagggatatggacataattatgaaattgaaggaagaggacatggccatgaatgcccaacaagataatattctataccagactgttacaggattgaagaaagatttgtcaggagttcagaaggtccctgcactcctagaaaatcaagtggaggaaaggacttgttctgattcagaagatattggaagctctgagtgctctgacacagactctgaagagcagggagaccatgcccgccccaagaaacacaccacggaccctgacattgataaaaaagaaagaaaaaagatggtcaaggaagcccagagagagaaaagaaaaaacaaaattcctaaacatgtgaaaaaaagaaaggagaagacagccaagacgaaaaaaggcaaatagaatgagaaccatattatgtacagtcattttcctcagttccttttctcgcctgaactcttaagctgcatctggaagatggcttattggttttaaccagattgtcatcgtggcactgtctgtgaagacggattcaaatgttttcatgtaactatgtaaaaagctctaagctctagagtctagatccagtcactgactctgtctggtgttgacagaggatttatttaagctattattttaataaagaactttgtacatttttatttttatatttttttctcttacaaatatgtttttggaagcatgataaatgtttaaatgtagtcaacatctgtaactcttacatgagtgtccagaggcactcatgggaaaattggttttgctttctttgtacacaccagagacccatctgaggtcatctgattataaggccatgtttatataaagggaatttcacccacagttcagctggctgttgattttcactgcaactctgcctttgtgtgtattggcgatcatttgtaatgctcttacacttcgtctttaatgttctttttggagttaggacctctcagttcataaagttttttacaattcaaaaaaaaaaaa

SEQ ID NO: 338586 - DNA, 757 bp, Homo sapiens
agtcagacttccgggcgaggcggtgaggggcttccggttggggtggcagggtggtggatctgtcggtcccgttttcccgtcgcacgtggtggccactgttggcttctgaatggtttgcaaggcggatatccacgccaaggcctttggatcggccgtgggtacatccgtctgagccgttcctttccatcgcagagcggcggcctccggcggcgctctccagtcatggactaccggcggcttctcatgagccgggtggtccccgggcaattcgacgacgcggactcctctgacagtgaaaacagagacttgaagacagtcaaagagaaggatgacattctgtttgaagaccttcaagacaatgtgaatgagaatggtgaaggtgaaatagaagatgaggaggaggagggttatgatgatgatgatgatgactgggactgggatgaaggagttggaaaactcgccaagggttatgtctggaatggaggaagcaacccacagctagtgccttagactctggaattcccttctaggcaaatcgacagacctccgacagcagttcagccaaaatgtctactccagcagacaaggtcttacggaaatttgagaataaaattaatttagataagctaaatgttactgattccgtcataaataaagtcaccgaaaagtctagacaaaaggaagcagatatgtatcgcatcaagataaggaggaaagagcaaagtagaacaggtgatggatcccagaagaagaatgc

SEQ ID NO: 338587 - DNA, 991 bp, Homo sapiens
ctttgggcaatgtggagttgccttcaatctgggaaggtctctgtttctttgtgtaaggtgaagctgtggtgctgaatgaagcaggtgtcacatttgggttacatttttaaggttctctaatcggtcaaagtgctgtgtaagtttccaggggcaccgtagaacaaagcaggcttaatggattaatggacatgattgagtgagctgatgggttggtgatttcataggtgtctggctttaagccctgccttgcctttgcagttccacagccattcaggctggtcatctcttcctagggcctctggagttggcctaccttggagagatctccaatgtgccattcctcctgcagccgactctccttatccctacttcctcagtgctgagccagaggagagtaccttttatcacttctgtatcatttatttatttcgggaagggagtgtagtggctgccaggagagggaggcacacatataaattgtggacaaagcctagaaacctaggcattgcccctgctcataggaagtcatatgcatggaacatacgcactggagtgctagttagacagctgggatgatagagcaggggatccaggctgatacatcaggggaacttgcagagagaataggggatccaggatgatagagcaggataaggacagctgtggatggagcaggacgactggataatggagcatggagccaggatgatggaacaagcagccaggatgatggacagggagctgggatgatggagccgggagctgggatgatggagcagagcagctgggatgatggagcagggcagctgggatgaaacagcagggagctggaatgatagagcacggcagttgggatgatggaggagggaagctgggatgatggagcagggaagccgggatgatggagcagggaagccgggatgatggagcagggagccaggatgatggagcagggagcctagatgatggagctggcagctgggatgacaga

SEQ ID NO: 338588 - DNA, 478 bp, Homo sapiens
catgtgacgtgctggctccccctttgccttctgccgtgattgtaagtttcctgaggcctccccagaagtcgagcagacgccagcatcatacactctgtacaggctgtggaaccatgagtcaattaaatctcttttctttataaattaccccgtctcaggtgtttctttatagcaatgcaagaacagactaatgcataatcttatactatgaacattgtagtcaatatattcccttatcagggttgtttacataaattatgagctcaatgaaagataaaaatgtgaggccttttattcaaagattatgggaaaaaagtgtagatataaggcattaaaatataaagttttttgctgtcttctatagtctctctcttgccttgatatgtctttgtttaatttgccacttaatgtttttctaagtaataaaaaattttaaattattagcataaattttaacgctcacctatattattcaata

SEQ ID NO: 338589 - DNA, 317 bp, Homo sapiens
tcatgaagtctcaccaatgtagtccaggtaagctaaaataatagatgaaccctggcaggtaatccatgtagtccagggtatgaacagtgaaaaaaccacatgaaatactttggagagtgctaaccagttaaaagatagcactgttcaagaatattttctgatgaccagaatactgcttgagagatgactgctatagtctttgatgcaataagttagaatgcagttagtcctgtcaaaaagtcctacactttatccatttgtgcatctaccacttccctttcatggaaactctgcaagcaattatccaaacaagctga

SEQ ID NO: 338590 - DNA, 420 bp, Homo sapiens
tgagagggagtctcgcttatcgcccaggctggagttcagtggcgcgatctccgctcactgcaacctccacctcccgggttcatgccattctcctgtctcagcctcccgagtagctgggactacaggcgcctgccactgcgcccggctattttttgtatttttagtagagacggggtttcaccgtgttagccaggatggtctcgatctcctgacctcatgatctgcccgcctcagcctcccaaagtgctgggattacaggcgtgagccaccgcgcccggccggtaagttgattttcaataaagaggccaaggtaactaaatggggaaaagaatcatcatttcaataaatggtgctagaataactagataatcatttgagtaaaaaatgaaccctcacctctacctcacactacacacagtc

SEQ ID NO: 338591 - DNA, 1811 bp, Homo sapiens
caggcggccagcccgaagggggtttgcctgtgagccctgaaccttccctgctcactccgactgaggaagcacatccagcttcaagcctcgcttcattcccagctgctcagattcctattgctgtagaagaacctggatcatcatccagggaatcagtttccaaggctgggatgccagtttctgcagatgcagccaaagaggtggtggatgcagggttggtgggactggagaggcaggtgtcagatcttggaagcaagggagagcatccagaaggggacccgtggagaggttccggccccatcaccccaggagaggggagagcacttgaacacggagcaaagccatgaggtccaaccaggagtaccaccccctcctcttcccaaggagcaaagccatgaggtccaaccaggagcaccacccctctcctcttcccaaggcaccaagtgaaagtgccagagggccaccggggccaacggatggagccaaggtccatgaagattccacaagcccagccgtggctaaagaaggaagcagatcacctggtgacagccctggaggaaaggaggaagccccagagccacctgatggtggagacccagggaacctgcaaggagaggactctcaggctttcagcagcaagcgtgatccagaagtaggcaaagatgagctttcaaagccaagcagtgatgcagagagcagagaccatcccagctcacactcagcacagccacccagaaaggggggtgctgggcacacggacgggccccactctcagacagcagaggctgatgcatctggcctaccacacaagctgggtgaggaggaccccgtcctgccccctgtgccagatggagctggtgagcccactgttcccgaaggagccatctgggaggggtcaggattgcagcccaaatgtcctgacacccttcagagcagggaaggattgggaagaatggagtctttcctgactttagaatcagagaaatcagattttccaccaactcctgttgcagaggttgcacccaaagcccaggaaggtgagagcacattggaaataaggaagatgggcagctgtgatggggagggcttgctgacgtccccagatcaaccccgcgggccggcgtgtgatgcgtcgagacaggaatttcatgctggggtgccacatcccccccagggggagaacttggcagcagacctggggctcacggcactcatcctggaccaagatcagcagggaatcccatcctgcccaggggaaggctggataagaggagctgcatccgagtggcccctactatcttctgagaagcatttccagccatcccaggcacaaccagagacatccatctttgacgtgctcaaggagcaggcccagccacctgaaaatgggaaagagacttctccaagccatccaggttttaaggaccagggagcagattcttcccaaatccatgtacctgtggaacctcaggaagataacaatcacacatggtgattgttatcattaaccagtcttttactactaaacttaaatggccaattgaaacaaacagttctgagaccgttcttccaccactgattaagagtggggtggcaggtattagggataatattcatttagccttctgagctttctgggcagacttggtgaccttgccagctccagcagccttcttgtccactgctttgatgacacccaccgcaactgtctgtctcatatcacgaacagcaaagcgacccaaaggtggatagtctgagaagctctcaacacacatgggcttgccaggaaccatatcaacaatcacatcatg

SEQ ID NO: 338592 - DNA, 733 bp, Homo sapiens
gttggctagtcgtgcttggatcatggccgtcgtcctgagagtgtcagttgattgggacaagcacatgtgcgtgctggggtgccacatcccccccagggggagaacttggcagcagacctggggctcacggcactcatcctggaccaagatcagcagggaatcccatcctgcccaggggaaggctggataagaggagctgcatccgagtggcccctactatcttctgagaagcatttccagccatcccaggcacaaccagagacatccatctttgacgtgctcaaggagcaggcccagccacctgaaaatgggaaagagacttctccaagccatccaggttttaaggaccagggagcagattcttcccaaatccatgtacctgtggaacctcaggaagataacaatcacacatggtgattgttatcattaaccagtcttttactactaaacttaaatggccaattgaaacaaacagttctgagaccgttcttccaccactgattaagagtggggtggcaggtattagggataatattcatttagccttctgagctttctgggcagacttggtgaccttgccagctccagcagccttcttgtccactgctttgatgacacccaccgcaactgtctgtctcatatcacgaacagcaaagcgacccaaaggtggatagtctgagaagctctcaacacacatgggcttgccaggaaccatatcaacaatcacatcatg

SEQ ID NO: 338593 - DNA, 1936 bp, Homo sapiens
caggcggccagcccgaagggggtttgcctgtgagccctgaaccttccctgctcactccgactgaggaagcacatccagcttcaagcctcgcttcattcccagctgctcagattcctattgctgtagaagaacctggatcatcatccagggaatcagtttccaaggctgggatgccagtttctgcagatgcagccaaagaggtggtggatgcagggttggtgggactggagaggcaggtgtcagatcttggaagcaagggagagcatccagaaggggacccgtggagaggttccggccccatcaccccaggagaggggagagcacttgaacacggagcaaagccatgaggtccaaccaggagtaccaccccctcctcttcccaaggagcaaagccatgaggtccaaccaggagcaccacccctctcctcttcccaaggcaccaagtgaaagtgccagagggccaccggggccaacggatggagccaaggtccatgaagattccacaagcccagccgtggctaaagaaggaagcagatcacctggtgacagccctggaggaaaggaggaagccccagagccacctgatggtggagacccagggaacctgcaaggagaggactctcaggctttcagcagcaagcgtgatccagaagtaggcaaagatgagctttcaaagccaagcagtgatgcagagagcagagaccatcccagctcacactcagcacagccacccagaaaggggggtgctgggcacacggacgggccccactctcagacagcagaggctgatgcatctggcctaccacacaagctgggtgaggaggaccccgtcctgccccctgtgccagatggagctggtgagcccactgttcccgaaggagccatctgggaggggtcaggattgcagcccaaatgtcctgacacccttcagagcagggaaggattgggaagaatggagtctttcctgactttagaatcagagaaatcagattttccaccaactcctgttgcagaggttgcacccaaagcccaggaaggtgagagcacattggaaataaggaagatgggcagctgtgatggggagggcttgctgacgtccccagatcaaccccgcgggccggcgtgtgatgcgtcgagacaggaatttcatgctggggtgccacatcccccccagggggagaacttggcagcagacctggggctcacggcactcatcctggaccaagatcagcagggaatcccatcctgcccaggggaaggctggataagaggagctgcatccgagtggcccctactatcttctgagaagcatttccagccatcccaggcacaaccagagacatccatctttgacgtgctcaaggagcaggcccagccacctgaaaatgggaaagagacttctccaagccatccaggttttaaggaccagggagcagattcttcccaaatccatgtacctgtggaacctcaggaagataacaacttgcccactcatggaggacaggagcaggctttgggatcagaacttcaaagtcagctccccaaaggcaccctgtctgatactccaacttcatctcccactgacatggtttgggagagttctctgacagaagagtcagaattgtcagcaccaacgagacagaagttgcctgcactaggggagaagcggccagagggagcatgcggtgatggtcagtcctcgagggtctcgcctccagcagcagatgtcttaaaagacttttctcttgcagggaacttcagcagaaaggaaacttgctgcactgggcaggggccaaacaagtctcaacaggcattggctgatgccttggaagaaggcagccagcatgaagaagcatgtcaaaggcatccaggagcttctgaagcagctgatggttgttccccactctggggcttgagtaagagggagatggcaagt

SEQ ID NO: 338594 - DNA, 5115 bp, Homo sapiens
gaattccgggagcgggcgggctgcgaggccgcggggcatgcgggaggcggaggggtgggaccgggtggctgcgcccattccacacccgccgaaagcggacactgtcagctgaatcactccccttttaggaggagggagggggaaaaggtgtctagctaatttctgcttaaaaaagcacaggagatcgcgggtcagctttgcagtcgctgccttctcgcgcctgaccatgcacccctgcatcttcctgctgggcacaggcgagcgctttatttctggagctgagggctaaaacttttttcacttttcttctcctcaacatctgaatcatgccatgtgcccagaggagctggcttgcaaacctttccgtggtggctcagctccttaactttggggcgctttgctatgggagacagcctcagccaggcccggttcgcttcccggacaggaggcaagagcattttatcaagggcctgccagaataccacgtggtgggtccagtccgagtagatgccagtgggcattttttgtcatatggcttgcactatcccatcacgagcagcaggaggaagagagatttggatggctcagaggactgggtgtactacagaatttctcacgaggagaaggacctgttttttaacttgacggtcaatcaaggatttctttccaatagctacatcatggagaagagatatgggaacctctcccatgttaagatgatggcttcctctgcccccctctgccatctcagtggcacggttctacagcagggcaccagagttgggacggcagccctcagtgcctgccatggactgactggatttttccaactaccacatggagactttttcattgaacccgtgaagaagcatccactggttgagggagggtaccacccgcacatcgtttacaggaggcagaaagttccagaaaccaaggagccaacctgtggattaaaggacagtgttaacatctcccagaagcaagagctatggcgggagaagtgggagaggcacaacttgccaagcagaagcctctctcggcgttccatcagcaaggagagatgggtggagacactggtggtggccgacacaaagatgattgaataccatgggagtgagaatgtggagtcctacatcctcaccatcatgaacatggtcactgggttgttccataacccaagcattggcaatgcaattcacattgttgtggttcggctcattctactcgaagaagaagagcaaggactgaaaatagttcaccatgcagaaaagacactgtctagcttctgcaagtggcagaagagtatcaatcccaagagtgacctcaatcctgttcatcacgacgtggctgtccttctcaccagaaaggacatctgtgctggtttcaatcgcccctgcgagaccctgggcctgtctcacctttcaggaatgtgtcagcctcaccgcagttgtaacatcaatgaagattcgggactccctctggctttcacaattgcccatgagctaggacacagcttcggcatccagcatgatgggaaagaaaatgactgtgagcctgtgggcagacatccgtacatcatgtcccgccagctccagtacgatcccactccgctgacatggtccaagtgcagcgaggagtacatcacccgcttcttggaccgaggctgggggttctgtcttgatgacatacctaaaaagaaaggcttgaagtccaaggtcattgcccccggagtgatctatgatgttcaccaccagtgccagctacaatatggacccaatgctaccttctgccaggaagtagaaaacgtctgccagacactgtggtgctccgtgaagggcttttgtcgctctaagctggacgctgctgcagatggaactcaatgtggtgagaagaagtggtgtatggcaggcaagtgcatcacagtggggaagaaaccagagagcattcctggaggctggggccgctggtcaccctggtcccactgttccaggacctgtggggctggagtccagagcgcagagaggctctgcaacaaccccgagccaaagtttggagggaaatattgcactggagaaagaaaacgctatcgcttgtgcaacgtccacccctgtcgctcagaggcaccaacatttcggcagatgcagtgcagtgaatttgacactgttccctacaagaatgaactctaccactggtttcccatttttaacccagcacatccttgtgagctctactgccgacccatagatggccagttttctgagaaaatgctggatgctgtcattgatggtaccccttgctttgaaggcggcaacagcagaaatgtctgtattaatggcatatgtaagatggttggctgtgactatgagatcgattccaatgccaccgaggatcgctgcggtgtgtgcctgggagatggctcttcctgccagactgtgagaaagatgtttaagcagaaggaaggatctggttatgttgacattgggctcattccaaaaggagcaagggacataagagtgatggaaattgagggagctggaaacttcctggccatcaggagtgaagatcctgaaaaatattacctgaatggagggtttattatccagtggaacgggaactataagctggcagggactgtctttcagtatgacaggaaaggagacctggaaaagctgatggccacaggtcccaccaatgagtctgtgtggatccagcttctattccaggtgactaaccctggcatcaagtatgagtacacaatccagaaagatggccttgacaatgatgttgagcagatgtacttctggcagtacggccactggacagagtgcagtgtgacctgcgggacaggtatccgccgccaaactgcccattgcataaagaagggccgcgggatggtgaaagctacattctgtgacccagaaacacagcccaatgggagacagaagaagtgccatgaaaaggcttgtccacccaggtggtgggcaggggagtgggaagcatgctcggcgacatgcgggccccacggggagaagaagcgaaccgtgctgtgcatccagaccatggtctctgacgagcaggctctcccgcccacagactgccagcacctgctgaagcccaagaccctcctttcctgcaacagagacatcctgtgcccctcggactggacagtgggcaactggagtgagtgttctgtttcctgtggtggtggagtgcggattcgcagtgtcacatgtgccaagaaccatgatgaaccttgcgatgtgacaaggaaacccaacagccgagctctgtgtggcctccagcaatgcccttctagccggagagttctgaaaccaaacaaaggcactatttccaatggaaaaaacccaccaacactaaagcccgtccctccacctacatccaggcccagaatgctgaccacacccacagggcctgagtctatgagcacaagcactccagcaatcagcagccctagtcctaccacagcctccaaagaaggagacctgggtgggaaacagtggcaagatagctcaacccaacctgagctgagctctcgctatctcatttccactggaagcacttcccagcccatcctcacttcccaatccttgagcattcagccaagtgaggaaaatgtttccagttcagatactggtcctacctcggagggaggccttgtagctacaacaacaagtggttctggcttgtcatcttcccgcaaccctatcacttggcctgtgactccattttacaataccttgaccaaaggtccagaaatggagattcacagtggctcaggggaagaaagagaacagcctgaggacaaagatgaaagcaatcctgtaatatggaccaagatcagagtacctggaaatgacgctccagtggaaagtacagaaatgccacttgcacctccactaacaccagatctcagcagggagtcctggtggccacccttcagcacagtaatggaaggactgctccccagccaaaggcccactacttccgaaactgggacacccagagttgaggggatggttactgaaaagccagccaacactctgctccctctgggaggagaccaccagccagaaccctcaggaaagacggcaaaccgtaaccacctgaaacttccaaacaacatgaaccaaacaaaaagttctgaaccagtcctgactgaggaggatgcaacaagtctgattactgagggctttttgctaaatgcctccaattacaagcagctcacaaacggccacggctctgcacactggatcgtcggaaactggagcgagtgctccaccacatgtggcctgggggcctactggaaaagggtggagtgcaccacccagatggattctgactgtgcggccatccagagacctgaccctgcaaaaagatgccacctccgtccctgtgctggctggaaagtgggaaactggagcaagtgctccagaaactgcagtgggggcttcaagatacgcgagattcagtgcgtggacagccgggaccaccggaacctgaggccatttcactgccagttcctggccggcattcctcccccattgagcatgagctgtaacccggagccctgtgaggcgtggcaggtggagccttggagccagtgctccaggtcctgtggaggtggagttcaggagagaggagtgttctgtccaggaggcctctgtgattggacaaaaagacccacatccaccatgtcttgcaatgagcacctgtgctgtcactgggccactgggaactgggacctgtgttccacttcctgtggaggtggctttcagaagaggattgtccaatgtgtgccctcagagggcaataaaactgaagaccaagaccaatgtctatgtgatcacaaacccagacctccagaattcaaaaaatgcaaccagcaggcctgcaagaaaagtgccgatttactttgcactaaggacaaactgtcagccagtttctgccagacactgaaagccatgaagaaatgttctgtgcccaccgtgagggctgagtgctgcttctcgtgtccccagacacacatcacacacacccaaaggcaaagaaggcaacggttgctccaaaagtcaaaagaactctaagcccaaa

SEQ ID NO: 338595 - DNA, 1978 bp, Homo sapiens
taggatcccccttcaccttagaagttgtggacagggggcaaccggagtgagtgttctgtttcctgtggtggtggagtgcggattcgcagtgtcacatgtgccaagaaccatgatgaaccttgcgatgtgacaaggaaacccaacagccgagctctgtgtggcctccagcaatgcccttctagccggagagttctgaaaccaaacaaaggcactatttccaatggaaaaaacccaccaacactaaagcccgtccctccacctacatccaggcccagaatgctgaccacacccacagggcctgagtctatgagcacaagcactccagcaatcagcagccctagtcctaccacagcctccaaagaaggagacctgggtgggaaacagtggcaagatagctcaacccaacctgagctgagctctcgctatctcatttccactggaagcacttcccagcccatcctcacttcccaatccttgagcattcagccaagtgaggaaaatgtttccagttcagatactggtcctacctcggagggaggccttgtagctacaacaacaagtggttctggcttgtcatcttcccgcaaccctatcacttggcctgtgactccattttacaataccttgaccaaaggtccagaaatggagattcacagtggctcaggggaagaaagagaacagcctgaggacaaagatgaaagcaatcctgtaatatggaccaagatcagagtacctggaaatgacgctccagtggaaagtacagaaatgccacttgcacctccactaacaccagatctcagcagggagtcctggtggccacccttcagcacagtaatggaaggactgctccccagccaaaggcccactacttccgaaactgggacacccagagttgaggggatggttactgaaaagccagccaacactctgctccctctgggaggagaccaccagccagaaccctcaggaaagacggcaaaccgtaaccacctgaaacttccaaacaacatgaaccaaacaaaaagttctgaaccagtcctgactgaggaggatgcaacaagtctgattactgagggctttttgctaaatgcctccaattacaagcagctcacaaacggccacggctctgcacactggatcgtcggaaactggagcgagtgctccaccacatgtggcctgggggcctactggaaaagggtggagtgcaccacccagatggattctgactgtgcggccatccagagacctgaccctgcaaaaagatgccacctccgtccctgtgctggctggaaagtgggaaactggagcaagtgctccagaaactgcagtgggggcttcaagatacgcgagattcagtgcgtggacagccgggaccaccggaacctgaggccatttcactgccagttcctggccggcattcctcccccattgagcatgagctgtaacccggagccctgtgaggcgtggcaggtggagccttggagccagtgctccaggtcctgtggaggtggagttcaggagagaggagtgttctgtccaggaggcctctgtgattggacaaaaagacccacatccaccatgtcttgcaatgagcacctgtgctgtcactgggccactgggaactgggacctgtgttccacttcctgtggaggtggctttcagaagaggattgtccaatgtgtgccctcagagggcaataaaactgaagaccaagaccaatgtctatgtgatcacaaacccagacctccagaattcaaaaaatgcaaccagcaggcctgcaagaaaagtgccgatttactttgcactaaggacaaactgtcagccagtttctgccagacactgaaagccatgaagaaatgttctgtgcccaccgtgagggctgagtgctgcttctcgtgtccccagacacacatcacacacacccaaaggcaaagaaggcaacggttgctccaaaagtcaaaagaactctaagcccaaa

SEQ ID NO: 338596 - DNA, 2332 bp, Homo sapiens
tgcagaaatctctgctgattgagaccttctgatcgaaatgaaaggaataagatcgttgagactgggaaaagcccatgaaagagggaaaaggactgagcatggtgtgtgtaggggacaagaaagctagggaaaatgaggctggaggaatgggatataatgagaatatggagacaatgggtacacagagccaggaggtggtgggcaggggagtgggaagcatgctcggcgacatgcgggccccacggggagaagaagcgaaccgtgctgtgcatccagaccatggtctctgacgagcaggctctcccgcccacagactgccagcacctgctgaagcccaagaccctcctttcctgcaacagagacatcctgtgcccctcggactggacagtgggcaactggagtgagtgttctgtttcctgtggtggtggagtgcggattcgcagtgtcacatgtgccaagaaccatgatgaaccttgcgatgtgacaaggaaacccaacagccgagctctgtgtggcctccagcaatgcccttctagccggagagttctgaaaccaaacaaaggcactatttccaatggaaaaaacccaccaacactaaagcccgtccctccacctacatccaggcccagaatgctgaccacacccacagggcctgagtctatgagcacaagcactccagcaatcagcagccctagtcctaccacagcctccaaagaaggagacctgggtgggaaacagtggcaagatagctcaacccaacctgagctgagctctcgctatctcatttccactggaagcacttcccagcccatcctcacttcccaatccttgagcattcagccaagtgaggaaaatgtttccagttcagatactggtcctacctcggagggaggccttgtagctacaacaacaagtggttctggcttgtcatcttcccgcaaccctatcacttggcctgtgactccattttacaataccttgaccaaaggtccagaaatggagattcacagtggctcaggggaagaaagagaacagcctgaggacaaagatgaaagcaatcctgtaatatggaccaagatcagagtacctggaaatgacgctccagtggaaagtacagaaatgccacttgcacctccactaacaccagatctcagcagggagtcctggtggccacccttcagcacagtaatggaaggactgctccccagccaaaggcccactacttccgaaactgggacacccagagttgaggggatggttactgaaaagccagccaacactctgctccctctgggaggagaccaccagccagaaccctcaggaaagacggcaaaccgtaaccacctgaaacttccaaacaacatgaaccaaacaaaaagttctgaaccagtcctgactgaggaggatgcaacaagtctgattactgagggctttttgctaaatgcctccaattacaagcagctcacaaacggccacggctctgcacactggatcgtcggaaactggagcgagtgctccaccacatgtggcctgggggcctactggaaaagggtggagtgcaccacccagatggattctgactgtgcggccatccagagacctgaccctgcaaaaagatgccacctccgtccctgtgctggctggaaagtgggaaactggagcaagtgctccagaaactgcagtgggggcttcaagatacgcgagattcagtgcgtggacagccgggaccaccggaacctgaggccatttcactgccagttcctggccggcattcctcccccattgagcatgagctgtaacccggagccctgtgaggcgtggcaggtggagccttggagccagtgctccaggtcctgtggaggtggagttcaggagagaggagtgttctgtccaggaggcctctgtgattggacaaaaagacccacatccaccatgtcttgcaatgagcacctgtgctgtcactgggccactgggaactgggacctgtgttccacttcctgtggaggtggctttcagaagaggattgtccaatgtgtgccctcagagggcaataaaactgaagaccaagaccaatgtctatgtgatcacaaacccagacctccagaattcaaaaaatgcaaccagcaggcctgcaagaaaagtgccgatttactttgcactaaggacaaactgtcagccagtttctgccagacactgaaagccatgaagaaatgttctgtgcccaccgtgagggctgagtgctgcttctcgtgtccccagacacacatcacacacacccaaaggcaaagaaggcaacggttgctccaaaagtcaaaagaactctaagcccaaa

SEQ ID NO: 338597 - DNA, 217 bp, Homo sapiens
aaatcagcatcagtacaaattaaatgattaagcatttgctgttttaactacatatgagagagataacccagttaacttttccttttattggctcgtgccctgggcatctgtcatgttaatgcttttgacctttcttaaagattattaaaggtgaaatttcttgcaggtcagggggatttgtacttgaacaccaccaggtaccttgtggcagcgctgt

SEQ ID NO: 338598 - DNA, 756 bp, Homo sapiens
aggagtgctgagttggcttggacctgtccaacctcgtctggcctcatttaaagggcctctgagtcccccacacaagtgtccccagtgaagccaggctggctttctccctggattgagagcactgggtcattcctgactcaagtggagattcctctgctttctacccatggagacgcggttcagtcccacttagtgcatgaagctttttctgatctctgagatcattctgtctacccatccatccagttgtccatccagctattcatctgttcatctgtttgtccatcaatctatcatccttccatccatccgtccatccatgcatctgtccactcattcatccgacaacagctcccaagcacccatctgtgtcaggtactgtttttatgctgggacatggcaggatcccctggctctcagcctcatctctccctcaaatctctctggttaaggccaacagtcctttgccccagttcagtctgcagttcttccccatcccctatgtctctgcaagaaggttttctttctagtcactctcccctccttggtgtctgagactgccccctctcctcctccttggcttccctttctaccaggcccatgcccaactgctgactcccagatccccaccctgggttctgctctctgtagtctcctaattttctctgcatctgaccctcattgtgcacactcacaactgtccaggggtcttagatccctatttccagcccttacctctcttcttggctccagatt

SEQ ID NO: 338599 - DNA, 464 bp, Homo sapiens
aggagtgctgagttggcttggacctgtccaacctcgtctggcctcatttaaagggcctctgagtcccccacacaagtgtccccagtgaagccaggctggctttctccctggattgagagcactgggtcattcctgactcaagtggagattcctctgctttctacccatggagacgcggttcagtcccacttagtgcatgaagctttttctgatctctgagatcattctgtctacccatccatccagttgtccatccagctattcatctgttcatctgtttgtccatcaatctatcatccttccatccatccgtccatccatgcatctgtccactcattcatccgacaacagctcccaagcacccattaataattcttgcctggtgtaataatgggtacataatgagttccatgtcatccctacctacagccgtccttccgtacgaagggggatgaactcgggta

SEQ ID NO: 338600 - DNA, 102 bp, Homo sapiens
aattttttcaaaacaatcacatacgaaaaaaagagtagagctcatgtttcctgatgcctcctccgtccagccctcttctcactttctgttgcatcctttcca

SEQ ID NO: 338601 - DNA, 455 bp, Homo sapiens
acccaggctggtctcaaactcctaggctcaagcaacctgtccaccttggcctctgaaagtgctgggactgcaggcatgagccaccacgcccagcctgagacgtgttgttctgtgtggattgtggattcagtctttctgttccgcttgatactatttcatcccctcaatttcctcttccactcgagcccctgtaacagattgagaccatccagttctatggtgacaggaagaaactgctctccaatagcgaatgcagttactatccgtaatctattactcagtaattatcttcagataaatgcacagatgatctgttgtgaagtctctcgatgatgtgtgaaccaagggaatggaggcgccgatgcctcctggtgtgagcaggaaccacagggacagggcagtccttctggaaagtggcatgctgctgcctcgtgggtggcaccaataacctccag

SEQ ID NO: 338602 - DNA, 318 bp, Homo sapiens
taggtaacgtgagaaatgactgttactattggaaagaagctagaattattgaataactatagagtttgatggaaaatagatagaatactttaaaggtaactatcaatctatagctttcaagccagaagtgaggtggggaagaggggagaaatatgaaaaactatcaatccaacaaaaggcagaggaggaagaaagagaaaacaaaagcattataagtaaaaatacctaaataaggcagcagaactgaagaaataaactcatatatattactaatcacaaagaaatctaaatggattaaatctacctatttaaagactg

SEQ ID NO: 338603 - DNA, 323 bp, Homo sapiens
tgtaccttaccccaaagcttcccaattcccacttcatatgtcatcatgagagcacctaggtgttatcttaacagccttttgactcaggtgacctttcaagaattcttttgcagagtaaaaggagcaaagacagactcaaccaacttaatcttacatttcaagataagaaaacactctacactccatccatgggtcgactaatgcattttcaagcttcaaatatcaggtgaagtgaacgcttaataatgctttctccaacccagatgtttctgccaagcttcttatctataaactgtcccactcccacggacacctcaaaaaca

SEQ ID NO: 338604 - DNA, 112 bp, Homo sapiens
gacattttaaacctaggcctttggactggaggcagaacgatttctgcaaacctaggtcctgaaggctttggggcttattggctggttctcaacctttttgttttttcttccc

SEQ ID NO: 338605 - DNA, 749 bp, Homo sapiens
atcacttttaattctgtcatctaaaaataaccaccagttacatttataaatttcttccagtaacttttttatatgaacatgtttttaaacttgggtcaatattaaaagaccagaagttgttaaacatcattttaaatccccttatccaggaattagcattgttattcttggccgcagcagaatattattttattccctcaagctttccatggcttgggtctgccctggttttgaacattaggttaggctacagaaagcattctgggtctctggcccatttgtttctttctttgtggagacggggtctggctctgttgctcaggcctgtctggaactcctgggctcaagcgacactccacctcggcctcccgagtggctgggaccactggcgcccgccgccaccgcgccggctccgggcctctctctacgcgtggctccgcaggctccattctccacacagtcgtctaggggggcgccaggagccccgcgacgggccaggccggaagctcagcaagtgcaccaggcggcgaaacggccggctgcgcagggcagccccggacacagccacgccgcggccgcccggcgctcccccgacccagccgaccacgaagccgccctccccctcacaccgcagaacctttctgccttttactacttttcaaagtggacctaggctcctggctcgagcctgaggggatacaagggatcacgaggagcgccatcaccgtgcaaggtcgacagcttccgcc

SEQ ID NO: 338606 - DNA, 314 bp, Homo sapiens
gaattcacagaattgatatagcaggaagttgcttcgcgttggtttttcttaggtatttaaattattactattgacttcaggtcatcaaatacttgacacttcaacaaggtcagtatttttaactgaaaaaaaaagtttggttaagctcatatgattaaatccctatcattttaattttaaacttctttcagtcttgctcataaaataagttaatagaaaacccaactttgttcacttgtttatctgctgaccttccctccactattgtcctgtgaccctgccaaatccccctctacgagaaacacccaagaatg

SEQ ID NO: 338607 - DNA, 243 bp, Homo sapiens
aggatgaaagatgaatacttacctacctactgccaattgcctaccacatatcttggtagcatttgagtcatcagaattctgggtggggattcctccctcaattctggaaaggaatcctgaaccacaccttgacctcacattcctggtggtaggtttggtttaggaaaaaagaatatctaggtgaagttacatttgttttgtgaaggcaagagagacacttcattttatgcaagagatacttca

SEQ ID NO: 338608 - DNA, 887 bp, Homo sapiens
tcaggaggctgaagtgggaggatcttttgagcctggaggtcaagactgcagtgagccgtgattacgccactgtactccagcctgtatgacagagtggacacactgttttgtttgtctcaaacaaaacaaaaacaaaaaaacagattgtccatctaatcctaaaaataattacgtaagtttagttggtgggtgataaatgaagttcttcagactttaaatccagtattcatggtcaggcacagtggctcacacctgtaatctcagcactttgggaggcagacgcaggcagatcacctgaggtctagagttcgagaccagcttggccaacatggcaaaaccccatctctactaaaaatacaaaaattagccaggcacggtgattgccacctgaaatcccagctaccagggaggctgaggcaggagaattgcttggagctgggagatggaggttgcagtaagctgagatcacgccattgcactccagcctgggcaacagagcaagagcgagactccatttcaaaaaaaaaaaaaaaaatccagtattcatgcaggaaaatattttcagttcagtaacatagtcattaagtacctactttatgataggcactatagcaggagctacagacacaaagatgaacaagatctggtttctatcctcaaagtgctcatactccagtaagggggaaataaaatgcaatgtgataagaactattctaaattattcttggcaaggtggaggaaaacttgagagtaaagctgggccattagagttaggtggagttttgccaggcaaaaaagcaatggaagggaagggtattatgtttagaagagacatgagagtatatgaaaggtatcagttctagcttaatgcagactaaaataaactg

SEQ ID NO: 338609 - DNA, 644 bp, Homo sapiens
caagcgaggaggggcttctgggtcatagatagatagagacaaacagttgcattcttttgagtttctgattagcctttccaaaggaagcaatcagatacaaattaatctcagtgaccagagggatgacgttgagttctgtctgttctttgtccatgaggaatttccgtgtggacaaaatgtgagggaggtatgtagctttttaaaaaaatcttggtagctacttttttaaggactagaatgggaggcaggtttgcactaagcagttcccagcttgacttttccctttggcttagtgattttggggtcgcaagatttattttcctttcacacaggaaaggtaaccattctcctcagtgttgctcaagccagaaatttagacgaaggaaacttgaacctttccctgtctttagaattgtaccattacctcagctagttctgtgcattttctaattcgatttttccagcagtgttgtgagtctcttagaacagttattaattaatactttcactttgcagacggggacacttggagaagttgggagaatttttttcataacgaaagatgtaggcagtgtcagtgctgggaaagaatggaaatctattgtttcttacatgttacttaagaaagagaaagaaaaaaccaa

SEQ ID NO: 338610 - DNA, 335 bp, Homo sapiens
tgtgtgtgtgtgtgtgtgtgtgtgtgtgtgtatactaaagtgtctttcagggttttggttttttgattttttttttttttaatggaaggggagagattgtgggaagtggcaccataaatcttaccttgtataaagcactcttttaaaaaattaccttatgttaagcaaaatgttccataaaactctccttttcctgtcttcactgtgtgctttaaaaaacaggtctgtgtaaattctcttgtagttttgttgctactaataatgacattttgtctttttgtgtttaacagtaattgaattcttcccttagttttcacatttctcttaagtagttg

SEQ ID NO: 338611 - DNA, 267 bp, Homo sapiens
ttgggaggctgagatgggaggatctcttgagcccaggagtttgacaatagcctgggcaacaaagggagaccctgtgatatgctatggctctgtgtccccacccaaatctcatctcgatttgtaatcaccacctgtggagggagggaacctgtaatccctcccatgtgttgagtgagggaggtaactggatcatggggagtttcccccatgcggttctcatgctagtgaatgctcacgaaatccaatggttttacaagtgtttgggag

SEQ ID NO: 338612 - DNA, 323 bp, Homo sapiens
cccaccatgattgtgaggcatcgccagccatggggaactgaaaatgcaattaaacctttttttttccacagtttcacgtatgtgtttattagcagtgtgaagacaaactaatacagtaaattggtaacagtaaagtggggtgttgctgaaaagatacccaaaactgtggaagtgactttggaactgggtaacaggcagaggttggaacagtttggagagctgagaagcagacagaaaaatgtggaaaagttaggaacctcctagagacttgctgaatggctttgacaaaaatgcggaaagtgatatgaacaataaggtccagg

SEQ ID NO: 338613 - DNA, 394 bp, Homo sapiens
tgtcttcttgtagggggagaagggagacaagaagcacccagctggtggcacaggccccagaaaggggtggaaatgagacgcatcaggaggcgaggagctgtggactgagatgaaaacacaggactgtttgcaagcctatgtgtcagaagtggttaggcccctggatcccattattcactcatattcactcaagcaaagactcaggtatatctccggagaggcgagccagaggagaactggactccagaatactaggcaaagcttgggagatggtcctagaccaaaagtctacaaactgaacaatgacacccaccatccctttccctgcttgcagccaagcttataattaacaccttcagctggatgcagtgtcatgtctataatcccagcactt

SEQ ID NO: 338614 - DNA, 407 bp, Homo sapiens
  misc_feature (24)..(24): n is a, c, g, or t
ctttcgcttagaatcagaactggngctgggcatgtggctcacgcctgtaattccagcactttgggaggccgaggtgggcggatcatgaggtcaggagtttgagggcagcctggccaacatggtgaaaccgtgtctctacaaaaaaatagaaaaaaaaatccctgcatggtggtgagtacctgtagtcccagttactcaggaggctgaggcatgagaatcgcttgagcctcggaggcggaggctgcagtgagctgagatggtgccactgcactccagcctgggtgacagagctgggtggtggctcaagatatgttttgtaaacctgaagatttgagatcatataagccaaatcgaaacttaactggaattcctaacttttggttctagagactccatgatcaactaag

SEQ ID NO: 338615 - DNA, 418 bp, Homo sapiens
tacacctgagattgatcaacgaatgaggacaggccaagtatggtggctcaggcctgcaatcccaggatcttgggacgccgaagcaggcgaatcacttgacgtcaggagtttgagggcagcctggccaacatggtgaaaccgtgtctctacaaaaaaatagaaaaaaaaatccctgcatggtggtgagtacctgtagtcccagttactcaggaggctgaggcatgagaatcgcttgagcctcggaggcggaggctgcagtgagctgagatggtgccactgcactccagcctgggtgacagagctgggtggtggctcaagatatgttttgtaaacctgaagatttgagatcatataagccaaatcgaaacttaactggaattcctaacttttggttctagagactccatgatcaactaag

SEQ ID NO: 338616 - DNA, 251 bp, Homo sapiens
taatttttatagttttagtagagacggggtttcgccatgttgggcaggctgatatcaaattcctgacctcagaggatccgcccaccttggcctcccaaagtgcggggatcacaggtgtgagtcaccgtgcctggcttatagctatttattgattgactactgatatatgttagtcactgtgctgggataaagtggtggacaagacagatgaagggctggtttgctttctgtgtgggagacagacaacaaac

SEQ ID NO: 338617 - DNA, 548 bp, Homo sapiens
ctgggtgtggggagtggccagcccacaacagagtatgggcaagccaaagcccaggacagagcctggtcttgtgggggcatggagggagcccacccaggagtgcccagtaaacaagaaggagaagccaggtcatcagcccagcaggaaggggagtgaggagtttccagaagaatcctgctgagaggccaaggcataagggtttcacttgagccctcgatcctgacttggtggctccctgggggcactcttagtctgtaaaaggggctaaatgctcaaactatgacctgctacaacaagaaacagtgaggctctgtacacaaagagcttagctcaaggcctggcacatatcgcacactgaaaacattggggactttttgtgtttataaaaatcagtcctacatgctgctactaaagtcattcctccacatacagcaacccaacctgattctgtgaacccagtggatactgtgccagaggctatgggaaaggaggagaagcagttttagcagacaagagtgcagaacccaaaggggtctagtcaaggagac

SEQ ID NO: 338618 - DNA, 420 bp, Homo sapiens
  misc_feature (18)..(18): n is a, c, g, or t
  misc_feature (23)..(23): n is a, c, g, or t
  misc_feature (28)..(29): n is a, c, g, or t
  misc_feature (33)..(33): n is a, c, g, or t
gacggcccgctctagagnatccnctcgnntctngataggaaagtaaataaataaataatgtgtgggactggtaccacaacgtctaggacataggagctctgtattaagggttcctgctttattactttacttattgtcactgcattatacctttgcaaaatatagttttctgtttccaacctaaaaatcctgattaagcaactgaatttgtccttgaagaaaaaataactgctagtaatatcatcagaagccagacccaaaaaggctttataacacctatttaatccttttaaatgaaaatgtatttaaatatataacttcatgtattcatttgaaataagctgctaactctaaatatttaaatattcccaactacactcctgtaaattgtacagagcaaattttattttctacctatca

SEQ ID NO: 338619 - DNA, 1013 bp, Homo sapiens
aagctagtacgaggcctggggtaattcggccgaggggaccgagcatttcagatctgctcggtagacctggtgcaccaccaccatgttggctgcaaggctggtgtgtctccggacactaccttctagggttttccacccagctttcaccaaggcctcccctgttgtgaagaattccatcacgaagaatcaatggctgttaacacctagcagggaatatgccaccaaaacaagaattgggatccggcgtgggagaactggccaagaactcaaagaggcagcattggaaccatcgatggaaaaaatatttaaaattgatcagatgggaagatggtttgttgctggaggggctgctgttggtcttggagcattgtgctactatggcttgggactgtctaatgagattggagctattgaaaaggctgtaatttggcctcagtatgtcaaggatagaattcattccacctatatgtacttagcagggagtattggtttaacagctttgtctgccatagcaatcagcagaacgcctgttctcatgaacttcatgatgagaggctcttgggtgacaattggtgtgacctttgcagccatggttggagctggaatgctggtacgatcaataccatatgaccagagcccaggcccaaagcatcttgcttggttgctacattctggtgtgatgggtgcagtggtggctcctctgacaatattagggggtcctcttctcatcagagctgcatggtacacagctggcattgtgggaggcctctccactgtggccatgtgtgcgcccagtgaaaagtttctgaacatggggccctggatgggctggttcgcttggtcccatgggatcatgtttcactacacgtgtgggcatctttcaggatgcggggtattctgtcctctgtgtacaagtatagggattccaggtggtaaagtcctacgggcatagataatttgagactcgcgaaaactggtcatatggataaaaacctcggcgccccgcgccgggt

SEQ ID NO: 338620 - DNA, 1985 bp, Homo sapiens
cccacgcgtccgtcgacccacgcgtccggacgctaggggcccggaagggaaactgcgaggcgaaggtgaccggggaccgagcatttcagatctgctcggtagacctggtgcaccaccaccatgttggctgcaaggctggtgtgtctccggacactaccttctagggttttccacccagctttcaccaaggcctcccctgttgtgaagaattccatcacgaagaatcaatggctgttaacacctagcagggaatatgccaccaaaacaagaattgggatccggcgtgggagaactggccaagaactcaaagaggcagcattggaaccatcgatggaaaaaatatttaaaattgatcagatgggaagatggtttgttgctggaggggctgctgttggtcttggagcattgtgctactatggcttgggactgtctaatgagattggagctattgaaaaggctgtaatttggcctcagtatgtcaaggatagaattcattccacctatatgtacttagcagggagtattggtttaacagctttgtctgccatagcaatcagcagaacgcctgttctcatgaacttcatgatgagaggctcttgggtgacaattggtgtgacctttgcagccatggttggagctggaatgctggtacgatcaataccatatgaccagagcccaggcccaaagcatcttgcttggttgctacattctggtgtgatgggtgcagtggtggctcctctgacaatattagggggtcctcttctcatcagagctgcatggtacacagctggcattgtgggaggcctctccactgtggccatgtgtgcgcccagtgaaaagtttctgaacatgggtgcacccctgggagtgggcctgggtctcgtctttgtgtcctcattgggatctatgtttcttccacctaccaccgtggctggtgccactctttactcagtggcaatgtacggtggattagttcttttcagcatgttccttctgtatgatacccagaaagtaatcaagcgtgcagaagtatcaccaatgtatggagttcaaaaatatgatcccattaactcgatgctgagtatctacatggatacattaaatatatttatgcgagttgcaactatgctggcaactggaggcaacagaaagaaatgaagtgactcagcttctggcttctctgctacatcaaatatcttgtttaatggggcagatatgcattaaatagtttgtacaagcagctttcgttgaagtttagaagataagaaacatgtcatcatatttaaatgttccggtaatgtgatgcctcaggtctgcctttttttctggagaataaatgcagtaatcctctcccaaataagcacacacattttcaattctcatgtttgagtgattttaaaatgttttggtgaatgtgaaaactaaagtttgtgtcatgagaatgtaagtcttttttctactttaaaatttagtaggttcactgagtaactaaaatttagcaaacctgtgtttgcatatttttttggagtgcagaatattgtaattaatgtcataagtgatttggagctttggtaaagggaccagagagaaggagtcacctgcagtcttttgtttttttaaatacttagaacttagcacttgtgttattgattagtgaggagccagtaagaaacatctgggtatttggaaacaagtggtcattgttacattcatctgctgaacttaacaaaactgttcatcctgaaacaggcacaggtgatgcattctcctgctgttgcttctcagtgctctctttccaatatagatgtggtcatgtttgacttgtacagaatgttaatcatacagagaatccttgatggaattatatatgtgtgttttacttttgaatgttacaaaaggaaataactttaaaactattctcaagagaaaatattcaaagcatgaaatatgttgctttttccagaatacaaacagtatactcatga

SEQ ID NO: 338621 - DNA, 1940 bp, Homo sapiens
agtgtggccgcttttccgacagaggcctgcccgtgattggctgctcgtactatttacgtcctttcgatgttgcgacatgcagtgcgccggaggaactgtgctctttgaggccgacgctaggggcccggaagggaaactgcgaggcgaaggtgaccggggaccgagcatttcagatctgctcggtagacctggtgcaccaccaccatgttggctgcaaggctggtgtgtctccggacactaccttctagggttttccacccagctttcaccaaggcctcccctgttgtgaagaattccatcacgaagaatcaatggctgttaacacctagcagggaatatgccaccaaaacaagaattgggatccggcgtgggagaactggccaagaactcaaagaggcagcattggaaccatcgatggaaaaaatatttaaaattgatcagatgggaagatggtttgttgctggaggggctgctgttggtcttggagcattgtgctactatggcttgggactgtctaatgagattggagctattgaaaaggctgtaatttggcctcagtatgtcaaggatagaattcattccacctatatgtacttagcagggagtattggtttaacagctttgtctgccatagcaatcagcagaacgcctgttctcatgaacttcatgatgagaggctcttgggtgacaattggtgtgacctttgcagccatggttggagctggaatgctggtacgatcaataccatatgaccagagcccaggcccaaagcatcttgcttggttgctacattctggtgtgatgggtgcagtggtggctcctctgacaatattagggggtcctcttctcatcagagctgcatggtacacagctggcattgtgggaggcctctccactgtggccatgtgtgcgcccagtgaaaagtttctgaacatgggtgcacccctgggagtgggcctgggtctcgtctttgtgtcctcattgggatctatgtttcttccacctaccaccgtggctggtgccactctttactcagtggcaatgtacggtggattagttcttttcagcatgttccttctgtatgatacccagaaagtaatcaagcgtgcagaagtatcaccaatgtatggagttcaaaaatatgatcccattaactcgatgctgagtatctacatggatacattaaatatatttatgcgagttgcaactatgctggcaactggaggcaacagaaagaaatgaagtgactcagcttctggcttctctgctacatcaaatatcttgtttaatggggcagatatgcattaaatagtttgtacaagcagctttcgttgaagtttagaagataagaaacatgtcatcatatttaaatgttccggtaatgtgatgcctcaggtctgcctttttttctggagaataaatgcagtaatcctctcccaaataagcacacacattttcaattctcatgtttgagtgattttaaaatgttttggtgaatgtgaaaactaaagtttgtgtcatgagaatgtaagtcttttttctactttaaaatttagtaggttcactgagtaactaaaatttagcaaacctgtgtttgcatatttttttggagtgcagaatattgtaattaatgtcataagtgatttggagctttggtaaagggaccagagagaaggagtcacctgcagtcttttgtttaaacaggcacaggtgatgcattctcctgctgttgcttctcagtgctctctttccaatatagatgtggtcatgtttgacttgtacagaatgttaatcatacagagaatccttgatggaattatatatgtgtgttttacttttgaatgttacaaaaggaaataactttaaaactattctcaagagaaaatattcaaagcatgaaatatgttgctttttccagaatacaaacagtatactcatga

SEQ ID NO: 338622 - DNA, 2165 bp, Homo sapiens
  misc_feature (1752)..(1752): n is a, c, g, or t
agtgtggccgcttttccgacagaggcctgcccgtgattggctgctcgtactatttacgtcctttcgatgttgcgacatgcagtgcgccggaggaactgtgctctttgaggccgacgctaggggcccggaagggaaactgcgaggcgaaggtgaccggggaccgagcatttcagatctgctcggtagacctggtgcaccaccaccatgttggctgcaaggctggtgtgtctccggacactaccttctagggttttccacccagctttcaccaaggcctcccctgttgtgaagaattccatcacgaagaatcaatggctgttaacacctagcagggaatatgccaccaaaacaagaattgggatccggcgtgggagaactggccaagaactcaaagaggcagcattggaaccatcgatggaaaaaatatttaaaattgatcagatgggaagatggtttgttgctggaggggctgctgttggtcttggagcattgtgctactatggcttgggactgtctaatgagattggagctattgaaaaggctgtaatttggcctcagtatgtcaaggatagaattcattccacctatatgtacttagcagggagtattggtttaacagctttgtctgccatagcaatcagcagaacgcctgttctcatgaacttcatgatgagaggctcttgggtgacaattggtgtgacctttgcagccatggttggagctggaatgctggtacgatcaataccatatgaccagagcccaggcccaaagcatcttgcttggttgctacattctggtgtgatgggtgcagtggtggctcctctgacaatattagggggtcctcttctcatcagagctgcatggtacacagctggcattgtgggaggcctctccactgtggccatgtgtgcgcccagtgaaaagtttctgaacatgggtgcacccctgggagtgggcctgggtctcgtctttgtgtcctcattgggatctatgtttcttccacctaccaccgtggctggtgccactctttactcagtggcaatgtacggtggattagttcttttcagcatgttccttctgtatgatacccagaaagtaatcaagcgtgcagaagtatcaccaatgtatggagttcaaaaatatgatcccattaactcgatgctgagtatctacatggatacattaaatatatttatgcgagttgcaactatgctggcaactggaggcaacagaaagaaatgaagtgactcagcttctggcttctctgctacatcaaatatcttgtttaatggggcagatatgcattaaatagtttgtacaagcagctttcgttgaagtttagaagataagaaacatgtcatcatatttaaatgttccggtaatgtgatgcctcaggtctgcctttttttctggagaataaatgcagtaatcctctcccaaaaaaaaaaaaaaaaaaaaaaaaaaaaaaaaaaaaaaaaaaaaaaaaaaaaaaaagaggggggggggggtaaaaaatccccggggggggccaatgggccccgtttgttgtaaaggggggcccctgggggggcgcgatatataaaaaagagagacgggggcggggggtaacacacaaggctcggtgcggtagggaaaacagcgtataaagcggggacaccatcggtgggaaaaggaccccactgtgggggggcggcaactaagcggggcaacacaccccagaagaaaatagcgcgccgaggcgaaaacaaaacnttgcgggtgttctaggtgtgttacccgaggccatatcttgcggtcgaacaactggctccaggcagagtgttggcaaccattatcgccggcgggcggctggaaactaccgggcggacagaagcagacaaaggaacgacagaggaaacgaacacaagagaagacagccaaggcaatagacagcaggcgcacacgaaccagcacgaagacacagagagaccgagaagaacaaaccaaaaccatcacagaaacgccggaacgcaaaacaacagaaaaacaagaacaagagaagacagaagagcaagccaagaaacaaaagaagcaacacgaacgaaacagcactagcacgccagcacgaccgacgcaagcgagaacgacgacaacaaacacagcacaaaacgaagaagcgagagcaa

SEQ ID NO: 338623 - DNA, 1329 bp, Homo sapiens
agtgtggccgcttttccgacagaggcctgcccgtgattggctgctcgtactatttacgtcctttcgatgttgcgacatgcagtgcgccggaggaactgtgctctttgaggccgacgctaggggcccggaagggaaactgcgaggcgaaggtgaccggggaccgagcatttcagatctgctcggtagacctggtgcaccaccaccatgttggctgcaaggctggtgtgtctccggacactaccttctagggttttccacccagctttcaccaaggcctcccctgttgtgaagaattccatcacgaagaatcaatggctgttaacacctagcagggaatatgccaccaaaacaagaattgggatccggcgtgggagaactggccaagaactcaaagaggcagcattggaaccatcgatggaaaaaatatttaaaattgatcagatgggaagatggtttgttgctggaggggctgctgttggtcttggagcattgtgctactatggcttgggactgtctaatgagattggagctattgaaaaggctgtaatttggcctcagtatgtcaaggatagaattcattccacctatatgtacttagcagggagtattggtttaacagctttgtctgccatagcaatcagcagaacgcctgttctcatgaacttcatgatgagaggctcttgggtgacaattggtgtgacctttgcagccatggttggagctggaatgctggtacgatcaataccatatgaccagagcccaggcccaaagcatcttgcttggttgctacattctggtgtgatgggtgcagtggtggctcctctgacaatattagggggtcctcttctcatcagagctgcatggtacacagctggcattgtgggaggcctctccactgtggccatgtgtgcgcccagtgaaaagtttctgaacatgggtgcacccctgggagtgggcctgggtctcgtctttgtgtcctcattgggatctatgtttcttccacctaccaccgtggctggtgccactctttactcagtggcaatgtacggtggattagttcttttcagcatgttccttctgtatgatacccagaaagtaatcaagcgtgcagaagtatcaccaatgtatggagttcaaaaatatgatcccattaactcgatgctgagtatctacatggatacattaaatatatttatgcgagttgcaactatgctggcaactggaggagctatcaagtgtggaggccaggagccaatacaagtgtgagaacaggagacaacacaagtgggcggccacgtagacaaccgaatgggagaccaggaggcaacc

SEQ ID NO: 338624 - DNA, 1962 bp, Homo sapiens
ctactatggcttgggactgtttaatgagattggagctattgaaaaggctgtaatttggcctcagtatgtcaaggatagaattcattccaccaccaccatgttggctgcaaggctggtgtgtctccggacactaccttctagggttttccacccagctttcaccaaggcctcccctgttgtgaagaattccatcacgaagaatcaatggctgttaacacctagcagggaatatgccaccaaaacaagaattgggatccggcgtgggagaactggccaagaactcaaagaggcagcattggaaccatcgatggaaaaaatatttaaaattgatcagatgggaagatggtttgttgctggaggggctgctgttggtcttggagcattgtgctactatggcttgggactgtctaatgagattggagctattgaaaaggctgtaatttggcctcagtatgtcaaggatagaattcattccacctatatgtacttagcagggagtattggtttaacagctttgtctgccatagcaatcagcagaacgcctgttctcatgaacttcatgatgagaggctcttgggtgacaattggtgtgacctttgcagccatggttggagctggaatgctggtacgatcaataccatatgaccagagcccaggcccaaagcatcttgcttggttgctacattctggtgtgatgggtgcagtggtggctcctctgacaatattagggggtcctcttctcatcagagctgcatggtacacagctggcattgtgggaggcctctccactgtggccatgtgtgcgcccagtgaaaagtttctgaacatgggtgcacccctgggagtgggcctgggtctcgtctttgtgtcctcattgggatctatgtttcttccacctaccaccgtggctggtgccactctttactcagtggcaatgtacggtggattagttcttttcagcatgttccttctgtatgatacccagaaagtaatcaagcgtgcagaagtatcaccaatgtatggagttcaaaaatatgatcccattaactcgatgctgagtatctacatggatacattaaatatatttatgcgagttgcaactatgctggcaactggaggcaacagaaagaaatgaagtgactcagcttctggcttctctgctacatcaaatatcttgtttaatggggcagatatgcattaaatagtttgtacaagcagctttcgttgaagtttagaagataagaaacatgtcatcatatttaaatgttccggtaatgtgatgcctcaggtctgcctttttttctggagaataaatgcagtaatcctctcccaaataagcacacacattttcaattctcatgtttgagtgattttaaaatgttttggtgaatgtgaaaactaaagtttgtgtcatgagaatgtaagtcttttttctactttaaaatttagtaggttcactgagtaactaaaatttagcaaacctgtgtttgcatatttttttggagtgcagaatattgtaattaatgtcataagtgatttggagctttggtaaagggaccagagagaaggagtcacctgcagtcttttgtttttttaaatacttagaacttagcacttgtgttattgattagtgaggagccagtaagaaacatctgggtatttggaaacaagtggtcattgttacattcatctgctgaacttaacaaaactgttcatcctgaaacaggcacaggtgatgcattctcctgctgttgcttctcagtgctctctttccaatatagatgtggtcatgtttgacttgtacagaatgttaatcatacagagaatccttgatggaattatatatgtgtgttttacttttgaatgttacaaaaggaaataactttaaaactattctcaagagaaaatattcaaagcatgaaatatgttgctttttccagaatacaaacagtatactcatga

SEQ ID NO: 338625 - DNA, 2008 bp, Homo sapiens
gggaaccccgagcgggctatcgaggcagacctcgccacctgtctggccctcggaccttcagagccgggtgtcgccccccgtgggtagctgtggcaccgtgtgcatgcttgtcgtgcgggcactcatcgagccttgcctcaagtcggtctgtccacccaacacgactcgtgccggcaccgcgtgcctcctcagtggtccggtcgcaccgtaaattcgcctacagcgagaatcaatcacatggacgtcgcggactgagctagtatggagactatgcgcagacgaaaagcgaaggaattgggatccggcgtgggagaactggccaagaactcaaagaggcagcattggaaccatcgatggaaaaaatatttaaaattgatcagatgggaagatggtttgttgctggaggggctgctgttggtcttggagcattgtgctactatggcttgggactgtctaatgagattggagctattgaaaaggctgtaatttggcctcagtatgtcaaggatagaattcattccacctatatgtacttagcagggagtattggtttaacagctttgtctgccatagcaatcagcagaacgcctgttctcatgaacttcatgatgagaggctcttgggtgacaattggtgtgacctttgcagccatggttggagctggaatgctggtacgatcaataccatatgaccagagcccaggcccaaagcatcttgcttggttgctacattctggtgtgatgggtgcagtggtggctcctctgacaatattagggggtcctcttctcatcagagctgcatggtacacagctggcattgtgggaggcctctccactgtggccatgtgtgcgcccagtgaaaagtttctgaacatgggtgcacccctgggagtgggcctgggtctcgtctttgtgtcctcattgggatctatgtttcttccacctaccaccgtggctggtgccactctttactcagtggcaatgtacggtggattagttcttttcagcatgttccttctgtatgatacccagaaagtaatcaagcgtgcagaagtatcaccaatgtatggagttcaaaaatatgatcccattaactcgatgctgagtatctacatggatacattaaatatatttatgcgagttgcaactatgctggcaactggaggcaacagaaagaaatgaagtgactcagcttctggcttctctgctacatcaaatatcttgtttaatggggcagatatgcattaaatagtttgtacaagcagctttcgttgaagtttagaagataagaaacatgtcatcatatttaaatgttccggtaatgtgatgcctcaggtctgcctttttttctggagaataaatgcagtaatcctctcccaaataagcacacacattttcaattctcatgtttgagtgattttaaaatgttttggtgaatgtgaaaactaaagtttgtgtcatgagaatgtaagtcttttttctactttaaaatttagtaggttcactgagtaactaaaatttagcaaacctgtgtttgcatatttttttggagtgcagaatattgtaattaatgtcataagtgatttggagctttggtaaagggaccagagagaaggagtcacctgcagtcttttgtttttttaaatacttagaacttagcacttgtgttattgattagtgaggagccagtaagaaacatctgggtatttggaaacaagtggtcattgttacattcatctgctgaacttaacaaaactgttcatcctgaaacaggcacaggtgatgcattctcctgctgttgcttctcagtgctctctttccaatatagatgtggtcatgtttgacttgtacagaatgttaatcatacagagaatccttgatggaattatatatgtgtgttttacttttgaatgttacaaaaggaaataactttaaaactattctcaagagaaaatattcaaagcatgaaatatgttgctttttccagaatacaaacagtatactcatga

SEQ ID NO: 338626 - DNA, 2021 bp, Homo sapiens
agtgtggccgcttttccgacagaggcctgcccgtgattggctgctcgtactatttacgtcctttcgatgttgcgacatgcagtgcgccggaggaactgtgctctttgaggccgacgctaggggcccggaagggaaactgcgaggcgaaggtgaccggggaccgagcatttcagatctgctcggtagacctggtgcaccaccaccatgttggctgcaaggctggtgtgtctccggacactaccttctagggttttccacccagctttcaccaaggcctcccctgttgtgaagaattccatcacgaagaatcaatggctgttaacacctagcagggaatatgccaccaaaacaagaattgggatccggcgtgggagaactggccaagaactcaaagaggcagcattggaaccatcgatggaaaaaatatttaaaattggagcattgtgctactatggcttgggactgtctaatgagattggagctattgaaaaggctgtaatttggcctcagtatgtcaaggatagaattcattccacctatatgtacttagcagggagtattggtttaacagctttgtctgccatagcaatcagcagaacgcctgttctcatgaacttcatgatgagaggctcttgggtgacaattggtgtgacctttgcagccatggttggagctggaatgctggtacgatcaataccatatgaccagagcccaggcccaaagcatcttgcttggttgctacattctggtgtgatgggtgcagtggtggctcctctgacaatattagggggtcctcttctcatcagagctgcatggtacacagctggcattgtgggaggcctctccactgtggccatgtgtgcgcccagtgaaaagtttctgaacatgggtgcacccctgggagtgggcctgggtctcgtctttgtgtcctcattgggatctatgtttcttccacctaccaccgtggctggtgccactctttactcagtggcaatgtacggtggattagttcttttcagcatgttccttctgtatgatacccagaaagtaatcaagcgtgcagaagtatcaccaatgtatggagttcaaaaatatgatcccattaactcgatgctgagtatctacatggatacattaaatatatttatgcgagttgcaactatgctggcaactggaggcaacagaaagaaatgaagtgactcagcttctggcttctctgctacatcaaatatcttgtttaatggggcagatatgcattaaatagtttgtacaagcagctttcgttgaagtttagaagataagaaacatgtcatcatatttaaatgttccggtaatgtgatgcctcaggtctgcctttttttctggagaataaatgcagtaatcctctcccaaataagcacacacattttcaattctcatgtttgagtgattttaaaatgttttggtgaatgtgaaaactaaagtttgtgtcatgagaatgtaagtcttttttctactttaaaatttagtaggttcactgagtaactaaaatttagcaaacctgtgtttgcatatttttttggagtgcagaatattgtaattaatgtcataagtgatttggagctttggtaaagggaccagagagaaggagtcacctgcagtcttttgtttttttaaatacttagaacttagcacttgtgttattgattagtgaggagccagtaagaaacatctgggtatttggaaacaagtggtcattgttacattcatctgctgaacttaacaaaactgttcatcctgaaacaggcacaggtgatgcattctcctgctgttgcttctcagtgctctctttccaatatagatgtggtcatgtttgacttgtacagaatgttaatcatacagagaatccttgatggaattatatatgtgtgttttacttttgaatgttacaaaaggaaataactttaaaactattctcaagagaaaatattcaaagcatgaaatatgttgctttttccagaatacaaacagtatactcatga

SEQ ID NO: 338627 - DNA, 1645 bp, Homo sapiens
gatatcctaccatattgtgacggagtccaaatagaaaacatgcagcaacagttctcctgctttatcagctccctggaaaataaaccagtgcttcctgcttctgcccttcctgcttgcttcctgcttctgcccttcctgcttgcttcctgcttctgcccacctatatgtacttagcagggagtattggtttaacagctttgtctgccatagcaatcagcagaacgcctgttctcatgaacttcatgatgagaggctcttgggtgacaattggtgtgacctttgcagccatggttggagctggaatgctggtacgatcaataccatatgaccagagcccaggcccaaagcatcttgcttggttgctacattctggtgtgatgggtgcagtggtggctcctctgacaatattagggggtcctcttctcatcagagctgcatggtacacagctggcattgtgggaggcctctccactgtggccatgtgtgcgcccagtgaaaagtttctgaacatgggtgcacccctgggagtgggcctgggtctcgtctttgtgtcctcattgggatctatgtttcttccacctaccaccgtggctggtgccactctttactcagtggcaatgtacggtggattagttcttttcagcatgttccttctgtatgatacccagaaagtaatcaagcgtgcagaagtatcaccaatgtatggagttcaaaaatatgatcccattaactcgatgctgagtatctacatggatacattaaatatatttatgcgagttgcaactatgctggcaactggaggcaacagaaagaaatgaagtgactcagcttctggcttctctgctacatcaaatatcttgtttaatggggcagatatgcattaaatagtttgtacaagcagctttcgttgaagtttagaagataagaaacatgtcatcatatttaaatgttccggtaatgtgatgcctcaggtctgcctttttttctggagaataaatgcagtaatcctctcccaaataagcacacacattttcaattctcatgtttgagtgattttaaaatgttttggtgaatgtgaaaactaaagtttgtgtcatgagaatgtaagtcttttttctactttaaaatttagtaggttcactgagtaactaaaatttagcaaacctgtgtttgcatatttttttggagtgcagaatattgtaattaatgtcataagtgatttggagctttggtaaagggaccagagagaaggagtcacctgcagtcttttgtttttttaaatacttagaacttagcacttgtgttattgattagtgaggagccagtaagaaacatctgggtatttggaaacaagtggtcattgttacattcatctgctgaacttaacaaaactgttcatcctgaaacaggcacaggtgatgcattctcctgctgttgcttctcagtgctctctttccaatatagatgtggtcatgtttgacttgtacagaatgttaatcatacagagaatccttgatggaattatatatgtgtgttttacttttgaatgttacaaaaggaaataactttaaaactattctcaagagaaaatattcaaagcatgaaatatgttgctttttccagaatacaaacagtatactcatga

SEQ ID NO: 338628 - DNA, 1336 bp, Homo sapiens
ctggcctcccacttggttgcctggccacccacttggttgcggcctcccacttggttgcaggaagtgtgatgggtgcagtggtggctcctctgacaatattagggggtcctcttctcatcagagctgcatggtacacagctggcattgtgggaggcctctccactgtggccatgtgtgcgcccagtgaaaagtttctgaacatgggtgcacccctgggagtgggcctgggtctcgtctttgtgtcctcattgggatctatgtttcttccacctaccaccgtggctggtgccactctttactcagtggcaatgtacggtggattagttcttttcagcatgttccttctgtatgatacccagaaagtaatcaagcgtgcagaagtatcaccaatgtatggagttcaaaaatatgatcccattaactcgatgctgagtatctacatggatacattaaatatatttatgcgagttgcaactatgctggcaactggaggcaacagaaagaaatgaagtgactcagcttctggcttctctgctacatcaaatatcttgtttaatggggcagatatgcattaaatagtttgtacaagcagctttcgttgaagtttagaagataagaaacatgtcatcatatttaaatgttccggtaatgtgatgcctcaggtctgcctttttttctggagaataaatgcagtaatcctctcccaaataagcacacacattttcaattctcatgtttgagtgattttaaaatgttttggtgaatgtgaaaactaaagtttgtgtcatgagaatgtaagtcttttttctactttaaaatttagtaggttcactgagtaactaaaatttagcaaacctgtgtttgcatatttttttggagtgcagaatattgtaattaatgtcataagtgatttggagctttggtaaagggaccagagagaaggagtcacctgcagtcttttgtttttttaaatacttagaacttagcacttgtgttattgattagtgaggagccagtaagaaacatctgggtatttggaaacaagtggtcattgttacattcatctgctgaacttaacaaaactgttcatcctgaaacaggcacaggtgatgcattctcctgctgttgcttctcagtgctctctttccaatatagatgtggtcatgtttgacttgtacagaatgttaatcatacagagaatccttgatggaattatatatgtgtgttttacttttgaatgttacaaaaggaaataactttaaaactattctcaagagaaaatattcaaagcatgaaatatgttgctttttccagaatacaaacagtatactcatga

SEQ ID NO: 338629 - DNA, 1345 bp, Homo sapiens
agtcacctgattcgtgatacaactctagagatcccggctgcagaggtatatcagtatggggatcaagggcaggtgtgatgggtgcagtggtggctcctctgacaatattagggggtcctcttctcatcagagctgcatggtacacagctggcattgtgggaggcctctccactgtggccatgtgtgcgcccagtgaaaagtttctgaacatgggtgcacccctgggagtgggcctgggtctcgtctttgtgtcctcattgggatctatgtttcttccacctaccaccgtggctggtgccactctttactcagtggcaatgtacggtggattagttcttttcagcatgttccttctgtatgatacccagaaagtaatcaagcgtgcagaagtatcaccaatgtatggagttcaaaaatatgatcccattaactcgatgctgagtatctacatggatacattaaatatatttatgcgagttgcaactatgctggcaactggaggcaacagaaagaaatgaagtgactcagcttctggcttctctgctacatcaaatatcttgtttaatggggcagatatgcattaaatagtttgtacaagcagctttcgttgaagtttagaagataagaaacatgtcatcatatttaaatgttccggtaatgtgatgcctcaggtctgcctttttttctggagaataaatgcagtaatcctctcccaaataagcacacacattttcaattctcatgtttgagtgattttaaaatgttttggtgaatgtgaaaactaaagtttgtgtcatgagaatgtaagtcttttttctactttaaaatttagtaggttcactgagtaactaaaatttagcaaacctgtgtttgcatatttttttggagtgcagaatattgtaattaatgtcataagtgatttggagctttggtaaagggaccagagagaaggagtcacctgcagtcttttgtttttttaaatacttagaacttagcacttgtgttattgattagtgaggagccagtaagaaacatctgggtatttggaaacaagtggtcattgttacattcatctgctgaacttaacaaaactgttcatcctgaaacaggcacaggtgatgcattctcctgctgttgcttctcagtgctctctttccaatatagatgtggtcatgtttgacttgtacagaatgttaatcatacagagaatccttgatggaattatatatgtgtgttttacttttgaatgttacaaaaggaaataactttaaaactattctcaagagaaaatattcaaagcatgaaatatgttgctttttccagaatacaaacagtatactcatga

SEQ ID NO: 338630 - DNA, 919 bp, Homo sapiens
  misc_feature (857)..(857): n is a, c, g, or t
  misc_feature (860)..(861): n is a, c, g, or t
  misc_feature (873)..(874): n is a, c, g, or t
  misc_feature (887)..(888): n is a, c, g, or t
  misc_feature (893)..(894): n is a, c, g, or t
agtgtggccgcttttccgacagaggcctgcccgtgattggctgctcgtactatttacgtcctttcgatgttgcgacatgcagtgcgccggaggaactgtgctctttgaggccgacgctaggggcccggaagggaaactgcgaggcgaaggtgaccggggaccgagcatttcagatctgctcggtagacctggtgcaccaccaccatgttggctgcaaggctggtgtgtctccggacactaccttctagggttttccacccagctttcaccaaggcctcccctgttgtgaagaattccatcacgaagaatcaatggctgttaacacctagcagggaatatgccaccaaaacaagaattgggatccggcgtgggagaactggccaagaactcaaagaggcagcattggaaccatcgatggaaaaaatatttaaaattgatcagatgggaagatggtttgttgctggaggggctgctgttggtcttggagcattgtgctactatggcttgggactgtctaatgagattggagctattgaaaaggctgtaatttggcctcagtatgtcaaggatagaattcattccacctatatgtacttagcagggagtattggtttaacagctttgtctgccatagcaatcagcagaacgcctgttctcatgaacttcatgatgagaggctcttgggtgacaattggtgtgacctttgcagccatggttggagctggaatgctggtacgatcaataccatatgaccagagcccaggcccaaagcatcttgcttggttgctacattctggtgatgggtggcagggggtctcttgacaatatagggggtccttctcatagagggtgggacntgnntggggagccccnngggcctttgcccnnaaatnnacaggggtccccgagggcggccccg

SEQ ID NO: 338631 - DNA, 859 bp, Homo sapiens
agtgtggccgcttttccgacagaggcctgcccgtgattggctgctcgtactatttacgtcctttcgatgttgcgacatgcagtgcgccggaggaactgtgctctttgaggccgacgctaggggcccggaagggaaactgcgaggcgaaggtgaccggggaccgagcatttcagatctgctcggtagacctggtgcaccaccaccatgttggctgcaaggctggtgtgtctccggacactaccttctagggttttccacccagctttcaccaaggcctcccctgttgtgaagaattccatcacgaagaatcaatggctgttaacacctagcagggaatatgccaccaaaacaagaattgggatccggcgtgggagaactggccaagaactcaaagaggcagcattggaaccatcgatggaaaaaatatttaaaattgatcagatgggaagatggtttgttgctggaggggctgctgttggtcttggagcattgtgctactatggcttgggactgtctaatgagattggagctattgaaaaggctgtaatttggcctcagtatgtcaaggatagaattcattccacctatatgtacttagcagggagtattggtttaacagctttgtctgccatagcaatcagcagaacgcctgttctcatgaacttcatgatgagaggctcttgggtgacaattggtgtgacctttgcagccatggttggagctggaatgctggtacgatcaataccatatgaccagagcccaggcccaaagcatcttgcttggttgctacattctgggtagcaatgttgggtcttgaacataggggctcttgcaaaaatgggttacacggctggggagc

SEQ ID NO: 338632 - DNA, 992 bp, Homo sapiens
gctaggagagagaactggatgctggtgtggtgacccgcagtcgtggactgtggtggagctgtcctgcggacgaagatgtcactctcgcccgagaagggggacactgtgatggtgttcttaagctcatagagtggcaggttgtctgaaatgccaccatccacgtagcgcaccccctggagggagggagggatgagcccacagtacacggggatgaaaccgctgcagacattggcctggatgagctcgtcctttcgttgaagtttagaagataagaaacatgtcatcatatttaaatgttccggtaatgtgatgcctcaggtctgcctttttttctggagaataaatgcagtaatcctctcccaaataagcacacacattttcaattctcatgtttgagtgattttaaaatgttttggtgaatgtgaaaactaaagtttgtgtcatgagaatgtaagtcttttttctactttaaaatttagtaggttcactgagtaactaaaatttagcaaacctgtgtttgcatatttttttggagtgcagaatattgtaattaatgtcataagtgatttggagctttggtaaagggaccagagagaaggagtcacctgcagtcttttgtttttttaaatacttagaacttagcacttgtgttattgattagtgaggagccagtaagaaacatctgggtatttggaaacaagtggtcattgttacattcatctgctgaacttaacaaaactgttcatcctgaaacaggcacaggtgatgcattctcctgctgttgcttctcagtgctctctttccaatatagatgtggtcatgtttgacttgtacagaatgttaatcatacagagaatccttgatggaattatatatgtgtgttttacttttgaatgttacaaaaggaaataactttaaaactattctcaagagaaaatattcaaagcatgaaatatgttgctttttccagaatacaaacagtatactcatga

SEQ ID NO: 338633 - DNA, 603 bp, Homo sapiens
actctagagtatccccatgctcatccctccttgtgaaaactaaagtttgtgtcatgagaatgtaagtcttttttctactttaaaatttagtaggttcactgagtaactaaaatttagcaaacctgtgtttgcatatttttttggagtgcagaatattgtaattaatgtcataagtgatttggagctttggtaaagggaccagagagaaggagtcacctgcagtcttttgtttttttaaatacttagaacttagcacttgtgttattgattagtgaggagccagtaagaaacatctgggtatttggaaacaagtggtcattgttacattcatctgctgaacttaacaaaactgttcatcctgaaacaggcacaggtgatgcattctcctgctgttgcttctcagtgctctctttccaatatagatgtggtcatgtttgacttgtacagaatgttaatcatacagagaatccttgatggaattatatatgtgtgttttacttttgaatgttacaaaaggaaataactttaaaactattctcaagagaaaatattcaaagcatgaaatatgttgctttttccagaatacaaacagtatactcatga

SEQ ID NO: 338634 - DNA, 818 bp, Homo sapiens
  misc_feature (818)..(818): n is a, c, g, or t
agtgtggccgcttttccgacagaggcctgcccgtgattggctgctcgtactatttacgtcctttcgatgttgcgacatgcagtgcgccggaggaactgtgctctttgaggccgacgctaggggcccggaagggaaactgcgaggcgaaggtgaccggggaccgagcatttcagatctgctcggtagacctggtgcaccaccaccatgttggctgcaaggctggtgtgtctccggacactaccttctagggttttccacccagctttcaccaaggcctcccctgttgtgaagaattccatcacgaagaatcaatggctgttaacacctagcagggaatatgccaccaaaacaagaattgggatccggcgtgggagaactggccaagaactcaaagaggcagcattggaaccatcgatggaaaaaatatttaaaattggagcattgtgctactatggcttgggactgtctaatgagattggagctattgaaaaggctgtaatttggcctcagtatgtcaaggatagaattcattccacctatatgtacttagcagggagtattggtttaacagctttgtctgccatagcaatcagcagaacgcctgttctcatgaacttcatgatgagaggctcttgggtgacaattggtgtgacctttgcagccatggttggagctggaatgctggtacgatcaataccatatgaccagagcccaggcccaaagcatcttgcttggttgctacattctggctcaattttgcgtgaggttccatgggggttctttgccatattagggggcccttctaataaagatgatgn

SEQ ID NO: 338635 - DNA, 2069 bp, Homo sapiens
agtgtggccgcttttccgacagaggcctgcccgtgattggctgctcgtactatttacgtcctttcgatgttgcgacatgcagtgcgccggaggaactgtgctctttgaggccgacgctaggggcccggaagggaaactgcgaggcgaaggtgaccggggaccgagcatttcagatctgctcggtagacctggtgcaccaccaccatgttggctgcaaggctggtgtgtctccggacactaccttctagggttttccacccagctttcaccaaggcctcccctgttgtgaagaattccatcacgaagaatcaatggctgttaacacctagcagggaatatgccaccaaaacaagaattgggatccggcgtgggagaactggccaagaactcaaagaggcagcattggaaccatcgatggaaaaaatatttaaaattgatcagatgggaagatggtttgttgctggaggggctgctgttggtcttggagcattgtgctactatggcttgggactgtctaatgagattggagctattgaaaaggctgtaatttggcctcagtatgtcaaggatagaattcattccacctatatgtacttagcagggagtattggtttaacagctttgtctgccatagcaatcagcagaacgcctgttctcatgaacttcatgatgagaggctcttgggtgacaattggtgtgacctttgcagccatggttggagctggaatgctggtacgatcaataccatatgaccagagcccaggcccaaagcatcttgcttggttgctacattctggtgtgatgggtgcagtggtggctcctctgacaatattagggggtcctcttctcatcagagctgcatggtacacagctggcattgtgggaggcctctccactgtggccatgtgtgcgcccagtgaaaagtttctgaacatgggtgcacccctgggagtgggcctgggtctcgtctttgtgtcctcattgggatctatgtttcttccacctaccaccgtggctggtgccactctttactcagtggcaatgtacggtggattagttcttttcagcatgttccttctgtatgatacccagaaagtaatcaagcgtgcagaagtatcaccaatgtatggagttcaaaaatatgatcccattaactcgatgctgagtatctacatggatacattaaatatatttatgcgagttgcaactatgctggcaactggaggcaacagaaagaaatgaagtgactcagcttctggcttctctgctacatcaaatatcttgtttaatggggcagatatgcattaaatagtttgtacaagcagctttcgttgaagtttagaagataagaaacatgtcatcatatttaaatgttccggtaatgtgatgcctcaggtctgcctttttttctggagaataaatgcagtaatcctctcccaaataagcacacacattttcaattctcatgtttgagtgattttaaaatgttttggtgaatgtgaaaactaaagtttgtgtcatgagaatgtaagtcttttttctactttaaaatttagtaggttcactgagtaactaaaatttagcaaacctgtgtttgcatatttttttggagtgcagaatattgtaattaatgtcataagtgatttggagctttggtaaagggaccagagagaaggagtcacctgcagtcttttgtttttttaaatacttagaacttagcacttgtgttattgattagtgaggagccagtaagaaacatctgggtatttggaaacaagtggtcattgttacattcatctgctgaacttaacaaaactgttcatcctgaaacaggcacaggtgatgcattctcctgctgttgcttctcagtgctctctttccaatatagatgtggtcatgtttgacttgtacagaatgttaatcatacagagaatccttgatggaattatatatgtgtgttttacttttgaatgttacaaaaggaaataactttaaaactattctcaagagaaaatattcaaagcatgaaatatgttgctttttccagaatacaaacagtatactcatga

SEQ ID NO: 338636 - DNA, 2449 bp, Homo sapiens
agtgtggccgcttttccgacagaggcctgcccgtgattggctgctcgtactatttacgtcctttcgatgttgcgacatgcagtgcgccggaggaactgtgctctttgaggccgacgctaggggcccggaagggaaactgcgaggcgaaggtgaccggggaccgagcatttcagatctgctcggtagacctggtgcaccaccaccatgttggctgcaaggctggtgtgtctccggacactaccttctagggttttccacccagctttcaccaaggcctcccctgttgtgaagaattccatcacgaagaatcaatggctgttaacacctagcagggaatatgccaccaaaacaagaattgggatccggcgtgggagaactggccaagaactcaaagaggcagcattggaaccatcgatggaaaaaatatttaaaattgatcagatgggaagatggtttgttgctggaggggctgctgttggtcttggagcattgtgctactatggcttgggactgtctaatgagattggagctattgaaaaggctgtaatttggcctcagtatgtcaaggatagaattcattccacctatatgtacttagcagggagtattggtttaacagctttgtctgccatagcaatcagcagaacgcctgttctcatgaacttcatgatgagaggctcttgggtgacaattggtgtgacctttgcagccatggttggagctggaatgctggtacgatcaataccatatgaccagagcccaggcccaaagcatcttgcttggttgctacattctggtgtgatgggtgcagtggtggctcctctgacaatattagggggtcctcttctcatcagagctgcatggtacacagctggcattgtgggaggcctctccactgtggccatgtgtgcgcccagtgaaaagtttctgaacatgggtgcacccctgggagtgggcctgggtctcgtctttgtgtcctcattgggatctatgtttcttccacctaccaccgtggctggtgccactctttactcagtggcaatgtacggtggattagttcttttcagcatgttccttctgtatgatacccagaaagtaatcaagcgtgcagaagtatcaccaatgtatggagttcaaaaatatgatcccattaactcgatgctgagtatctacatggatacattaaatatatttatgcgagttgcaactatgctggcaactggaggcaacagaaagaaatgaagtgactcagcttctggcttctctgctacatcaaatatcttgtttaatggggcagatatgcattaaatagtttgtacaagcagctttcgttgaagtttagaagataagaaacatgtcatcatatttaaatgttccggtaatgtgatgcctcaggtctgcctttttttctggagaataaatgcagtaatcctctcccaaataagcacacacattttcaattctcatgtttgagtgattttaaaatgttttggtgaatgtgaaaactaaagtttgtgtcatgagaatgtaagtcttttttctactttaaaatttagtaggttcactgagtaactaaaatttagcaaacctgtgtttgcatatttttttggagtgcagaatattgtaattaatgtcataagtgatttggagctttggtaaagggaccagagagaaggagtcacctgcagtcttttgtttttttaaatacttagaacttagcacttgtgttattgattagtgaggagccagtaagaaacatctgggtatttggaaacaagtggtcattgttacattcatctgctgaacttaacaaaactgttcatcctgaaacaggcacaggtgatgcattctcctgctgttgcttctcagtgctctctttccaatatagatgtggtcatgtttgacttgtacagaatgttaatcatacagagaatccttgatggaattatatatgtgtgttttacttttgaatgttacaaaaggaaataactttaaaactattctcaagagaaaatattcaaagcatgaaatatgttgctttttccagaatacaaacagtatactcatgattgctaagtgtttttttatttttgcatatttattgaactgtctaattgaatacagcttgctcttgtcacctcttcaagctttcaagcctttatagaaaagcttctttgtggcttacactggaaattatgaaagcagtttttctcctaagacttttggtttctcgcattgcctctcagactaagcactaaaaagcaaagcaaaacagaactagttctgtcttaatgaaatatatcaacccaaaagtgtaatgaggaaaatgcttcattagtttcccctagcagacttttacttctcttacactgctacaccattactttcttgagacatttgtaagtcctttgatacagaagagttatatttaggaggctttaatgaaggg

SEQ ID NO: 338637 - DNA, 863 bp, Homo sapiens
  misc_feature (9)..(9): n is a, c, g, or t
  misc_feature (28)..(28): n is a, c, g, or t
  misc_feature (40)..(40): n is a, c, g, or t
  misc_feature (801)..(801): n is a, c, g, or t
  misc_feature (804)..(805): n is a, c, g, or t
  misc_feature (817)..(818): n is a, c, g, or t
  misc_feature (831)..(832): n is a, c, g, or t
  misc_feature (837)..(838): n is a, c, g, or t
tctgaactntttggcacccctactactntgctgcgagacnacgacagaagggggaggacgctaggggcccggaagggaaactgcgaggcgaaggtgaccggggaccgagcatttcagatctgctcggtagacctggtgcaccaccaccatgttggctgcaaggctggtgtgtctccggacactaccttctagggttttccacccagctttcaccaaggcctcccctgttgtgaagaattccatcacgaagaatcaatggctgttaacacctagcagggaatatgccaccaaaacaagaattgggatccggcgtgggagaactggccaagaactcaaagaggcagcattggaaccatcgatggaaaaaatatttaaaattgatcagatgggaagatggtttgttgctggaggggctgctgttggtcttggagcattgtgctactatggcttgggactgtctaatgagattggagctattgaaaaggctgtaatttggcctcagtatgtcaaggatagaattcattccacctatatgtacttagcagggagtattggtttaacagctttgtctgccatagcaatcagcagaacgcctgttctcatgaacttcatgatgagaggctcttgggtgacaattggtgtgacctttgcagccatggttggagctggaatgctggtacgatcaataccatatgaccagagcccaggcccaaagcatcttgcttggttgctacattctggtgatgggtggcagggggtctcttgacaatatagggggtccttctcatagagggtgggacntgnntggggagccccnngggcctttgcccnnaaatnnacaggggtccccgagggcggccccg

SEQ ID NO: 338638 - DNA, 2793 bp, Homo sapiens
  misc_feature (2380)..(2380): n is a, c, g, or t
agtgtggccgcttttccgacagaggcctgcccgtgattggctgctcgtactatttacgtcctttcgatgttgcgacatgcagtgcgccggaggaactgtgctctttgaggccgacgctaggggcccggaagggaaactgcgaggcgaaggtgaccggggaccgagcatttcagatctgctcggtagacctggtgcaccaccaccatgttggctgcaaggctggtgtgtctccggacactaccttctagggttttccacccagctttcaccaaggcctcccctgttgtgaagaattccatcacgaagaatcaatggctgttaacacctagcagggaatatgccaccaaaacaagaattgggatccggcgtgggagaactggccaagaactcaaagaggcagcattggaaccatcgatggaaaaaatatttaaaattgatcagatgggaagatggtttgttgctggaggggctgctgttggtcttggagcattgtgctactatggcttgggactgtctaatgagattggagctattgaaaaggctgtaatttggcctcagtatgtcaaggatagaattcattccacctatatgtacttagcagggagtattggtttaacagctttgtctgccatagcaatcagcagaacgcctgttctcatgaacttcatgatgagaggctcttgggtgacaattggtgtgacctttgcagccatggttggagctggaatgctggtacgatcaataccatatgaccagagcccaggcccaaagcatcttgcttggttgctacattctggtgtgatgggtgcagtggtggctcctctgacaatattagggggtcctcttctcatcagagctgcatggtacacagctggcattgtgggaggcctctccactgtggccatgtgtgcgcccagtgaaaagtttctgaacatgggtgcacccctgggagtgggcctgggtctcgtctttgtgtcctcattgggatctatgtttcttccacctaccaccgtggctggtgccactctttactcagtggcaatgtacggtggattagttcttttcagcatgttccttctgtatgatacccagaaagtaatcaagcgtgcagaagtatcaccaatgtatggagttcaaaaatatgatcccattaactcgatgctgagtatctacatggatacattaaatatatttatgcgagttgcaactatgctggcaactggaggcaacagaaagaaatgaagtgactcagcttctggcttctctgctacatcaaatatcttgtttaatggggcagatatgcattaaatagtttgtacaagcagctttcgttgaagtttagaagataagaaacatgtcatcatatttaaatgttccggtaatgtgatgcctcaggtctgcctttttttctggagaataaatgcagtaatcctctcccaaataagcacacacattttcaattctcatgtttgagtgattttaaaatgttttggtgaatgtgaaaactaaagtttgtgtcatgagaatgtaagtcttttttctactttaaaatttagtaggttcactgagtaactaaaatttagcaaacctgtgtttgcatatttttttggagtgcagaatattgtaattaatgtcataagtgatttggagctttggtaaagggaccagagagaaggagtcacctgcagtcttttgtttttttaaatacttagaacttagcacttgtgttattgattagtgaggagccagtaagaaacatctgggtatttggaaacaagtggtcattgttacattcatctgctgaacttaacaaaactgttcatcctgaaacaggcacaggtgatgcattctcctgctgttgcttctcagtgctctctttccaatatagatgtggtcatgtttgacttgtacagaatgttaatcatacagagaatccttgatggaattatatatgtgtgttttacttttgaatgttacaaaaggaaataactttaaaactattctcaagagaaaatattcaaagcatgaaatatgttgctttttccagaatacaaacagtatactcatgaaaaaaaaaaaaaaaaaaaaaaaaaaaaaaaaaaaaaaaaaaaaaaaaaaaaaagaggggggggggggtaaaaaatccccggggggggccaatgggccccgtttgttgtaaaggggggcccctgggggggcgcgatatataaaaaagagagacgggggcggggggtaacacacaaggctcggtgcggtagggaaaacagcgtataaagcggggacaccatcggtgggaaaaggaccccactgtgggggggcggcaactaagcggggcaacacaccccagaagaaaatagcgcgccgaggcgaaaacaaaacnttgcgggtgttctaggtgtgttacccgaggccatatcttgcggtcgaacaactggctccaggcagagtgttggcaaccattatcgccggcgggcggctggaaactaccgggcggacagaagcagacaaaggaacgacagaggaaacgaacacaagagaagacagccaaggcaatagacagcaggcgcacacgaaccagcacgaagacacagagagaccgagaagaacaaaccaaaaccatcacagaaacgccggaacgcaaaacaacagaaaaacaagaacaagagaagacagaagagcaagccaagaaacaaaagaagcaacacgaacgaaacagcactagcacgccagcacgaccgacgcaagcgagaacgacgacaacaaacacagcacaaaacgaagaagcgagagcaa

SEQ ID NO: 338639 - DNA, 2013 bp, Homo sapiens
  misc_feature (9)..(9): n is a, c, g, or t
  misc_feature (28)..(28): n is a, c, g, or t
  misc_feature (40)..(40): n is a, c, g, or t
tctgaactntttggcacccctactactntgctgcgagacnacgacagaagggggaggacgctaggggcccggaagggaaactgcgaggcgaaggtgaccggggaccgagcatttcagatctgctcggtagacctggtgcaccaccaccatgttggctgcaaggctggtgtgtctccggacactaccttctagggttttccacccagctttcaccaaggcctcccctgttgtgaagaattccatcacgaagaatcaatggctgttaacacctagcagggaatatgccaccaaaacaagaattgggatccggcgtgggagaactggccaagaactcaaagaggcagcattggaaccatcgatggaaaaaatatttaaaattgatcagatgggaagatggtttgttgctggaggggctgctgttggtcttggagcattgtgctactatggcttgggactgtctaatgagattggagctattgaaaaggctgtaatttggcctcagtatgtcaaggatagaattcattccacctatatgtacttagcagggagtattggtttaacagctttgtctgccatagcaatcagcagaacgcctgttctcatgaacttcatgatgagaggctcttgggtgacaattggtgtgacctttgcagccatggttggagctggaatgctggtacgatcaataccatatgaccagagcccaggcccaaagcatcttgcttggttgctacattctggtgtgatgggtgcagtggtggctcctctgacaatattagggggtcctcttctcatcagagctgcatggtacacagctggcattgtgggaggcctctccactgtggccatgtgtgcgcccagtgaaaagtttctgaacatgggtgcacccctgggagtgggcctgggtctcgtctttgtgtcctcattgggatctatgtttcttccacctaccaccgtggctggtgccactctttactcagtggcaatgtacggtggattagttcttttcagcatgttccttctgtatgatacccagaaagtaatcaagcgtgcagaagtatcaccaatgtatggagttcaaaaatatgatcccattaactcgatgctgagtatctacatggatacattaaatatatttatgcgagttgcaactatgctggcaactggaggcaacagaaagaaatgaagtgactcagcttctggcttctctgctacatcaaatatcttgtttaatggggcagatatgcattaaatagtttgtacaagcagctttcgttgaagtttagaagataagaaacatgtcatcatatttaaatgttccggtaatgtgatgcctcaggtctgcctttttttctggagaataaatgcagtaatcctctcccaaataagcacacacattttcaattctcatgtttgagtgattttaaaatgttttggtgaatgtgaaaactaaagtttgtgtcatgagaatgtaagtcttttttctactttaaaatttagtaggttcactgagtaactaaaatttagcaaacctgtgtttgcatatttttttggagtgcagaatattgtaattaatgtcataagtgatttggagctttggtaaagggaccagagagaaggagtcacctgcagtcttttgtttttttaaatacttagaacttagcacttgtgttattgattagtgaggagccagtaagaaacatctgggtatttggaaacaagtggtcattgttacattcatctgctgaacttaacaaaactgttcatcctgaaacaggcacaggtgatgcattctcctgctgttgcttctcagtgctctctttccaatatagatgtggtcatgtttgacttgtacagaatgttaatcatacagagaatccttgatggaattatatatgtgtgttttacttttgaatgttacaaaaggaaataactttaaaactattctcaagagaaaatattcaaagcatgaaatatgttgctttttccagaatacaaacagtatactcatga

SEQ ID NO: 338640 - DNA, 1452 bp, Homo sapiens
agtgtggccgcttttccgacagaggcctgcccgtgattggctgctcgtactatttacgtcctttcgatgttgcgacatgcagtgcgccggaggaactgtgctctttgaggccgacgctaggggcccggaagggaaactgcgaggcgaaggtgaccggggaccgagcatttcagatctgctcggtagacctggtgcaccaccaccatgttggctgcaaggctggtgtgtctccggacactaccttctagggttttccacccagctttcaccaaggcctcccctgttgtgaagaattccatcacgaagaatcaatggctgttaacacctagcagggaatatgccaccaaaacaagaattgggatccggcgtgggagaactggccaagaactcaaagaggcagcattggaaccatcgatggaaaaaatatttaaaattgatcagatgggaagatggtttgttgctggaggggctgctgttggtcttggagcattgtgctactatggcttgggactgtctaatgagattggagctattgaaaaggctgtaatttggcctcagtatgtcaaggatagaattcattccacctatatgtacttagcagggagtattggtttaacagctttgtctgccatagcaatcagcagaacgcctgttctcatgaacttcatgatgagaggctcttgggtgacaattggtgtgacctttgcagccatggttggagctggaatgctggtacgatcaataccatatgaccagagcccaggcccaaagcatcttgcttggttgctacattctggtgtgatgggtgcagtggtggctcctctgacaatattagggggtcctcttctcatcagagctgcatggtacacagctggcattgtgggaggcctctccactgtggccatgtgtgcgcccagtgaaaagtttctgaacatgggtgcacccctgggagtgggcctgggtctcgtctttgtgtcctcattgggatctatgtttcttccacctaccaccgtggctggtgccactctttactcagtggcaatgtacggtggattagttcttttcagcatgttccttctgtatgatacccagaaagtaatcaagcgtgcagaagtatcaccaatgtatggagttcaaaaatatgatcccattaactcgatgctgagtatctacatggatacattaaatatatttatgcgagttgcaactatgctggcaactggaggcaacagaaagaaatgaagtgactcagcttctggcttctctgctacatcaaatatcttgtttaatggggcagatatgcattaaatagtttgtacaagcagctttcgttgaagtttagaagataagaaacatgtcatcatatttaaatgttccggtaatgtgatgcctcaggtctgcctttttttctggagaggattactgcatttattctccgtcgacgcggcccgg

SEQ ID NO: 338641 - DNA, 1946 bp, Homo sapiens
aaggctaggtacgaggcctgggtgttgtgaccggggaccgagcatttcagatctgctcggtagacctggtgcaccaccaccatgttggctgcaaggctggtgtgtctccggacactaccttctagggttttccacccagctttcaccaaggcctcccctgttgtgaagaattccatcacgaagaatcaatggctgttaacacctagcagggaatatgccaccaaaacaagaattgggatccggcgtgggagaactggccaagaactcaaagaggcagcattggaaccatcgatggaaaaaatatttaaaattgatcagatgggaagatggtttgttgctggaggggctgctgttggtcttggagcattgtgctactatggcttgggactgtctaatgagattggagctattgaaaaggctgtaatttggcctcagtatgtcaaggatagaattcattccacctatatgtacttagcagggagtattggtttaacagctttgtctgccatagcaatcagcagaacgcctgttctcatgaacttcatgatgagaggctcttgggtgacaattggtgtgacctttgcagccatggttggagctggaatgctggtacgatcaataccatatgaccagagcccaggcccaaagcatcttgcttggttgctacattctggtgtgatgggtgcagtggtggctcctctgacaatattagggggtcctcttctcatcagagctgcatggtacacagctggcattgtgggaggcctctccactgtggccatgtgtgcgcccagtgaaaagtttctgaacatgggtgcacccctgggagtgggcctgggtctcgtctttgtgtcctcattgggatctatgtttcttccacctaccaccgtggctggtgccactctttactcagtggcaatgtacggtggattagttcttttcagcatgttccttctgtatgatacccagaaagtaatcaagcgtgcagaagtatcaccaatgtatggagttcaaaaatatgatcccattaactcgatgctgagtatctacatggatacattaaatatatttatgcgagttgcaactatgctggcaactggaggcaacagaaagaaatgaagtgactcagcttctggcttctctgctacatcaaatatcttgtttaatggggcagatatgcattaaatagtttgtacaagcagctttcgttgaagtttagaagataagaaacatgtcatcatatttaaatgttccggtaatgtgatgcctcaggtctgcctttttttctggagaataaatgcagtaatcctctcccaaataagcacacacattttcaattctcatgtttgagtgattttaaaatgttttggtgaatgtgaaaactaaagtttgtgtcatgagaatgtaagtcttttttctactttaaaatttagtaggttcactgagtaactaaaatttagcaaacctgtgtttgcatatttttttggagtgcagaatattgtaattaatgtcataagtgatttggagctttggtaaagggaccagagagaaggagtcacctgcagtcttttgtttttttaaatacttagaacttagcacttgtgttattgattagtgaggagccagtaagaaacatctgggtatttggaaacaagtggtcattgttacattcatctgctgaacttaacaaaactgttcatcctgaaacaggcacaggtgatgcattctcctgctgttgcttctcagtgctctctttccaatatagatgtggtcatgtttgacttgtacagaatgttaatcatacagagaatccttgatggaattatatatgtgtgttttacttttgaatgttacaaaaggaaataactttaaaactattctcaagagaaaatattcaaagcatgaaatatgttgctttttccagaatacaaacagtatactcatga

SEQ ID NO: 338642 - DNA, 1973 bp, Homo sapiens
  misc_feature (8)..(8): n is a, c, g, or t
cgcggccncgcgaacgctgcgaggacgacagaaggggaaactgcgaggcgaaggtgaccggggaccgagcatttcagatctgctcggtagacctggtgcaccaccaccatgttggctgcaaggctggtgtgtctccggacactaccttctagggttttccacccagctttcaccaaggcctcccctgttgtgaagaattccatcacgaagaatcaatggctgttaacacctagcagggaatatgccaccaaaacaagaattgggatccggcgtgggagaactggccaagaactcaaagaggcagcattggaaccatcgatggaaaaaatatttaaaattgatcagatgggaagatggtttgttgctggaggggctgctgttggtcttggagcattgtgctactatggcttgggactgtctaatgagattggagctattgaaaaggctgtaatttggcctcagtatgtcaaggatagaattcattccacctatatgtacttagcagggagtattggtttaacagctttgtctgccatagcaatcagcagaacgcctgttctcatgaacttcatgatgagaggctcttgggtgacaattggtgtgacctttgcagccatggttggagctggaatgctggtacgatcaataccatatgaccagagcccaggcccaaagcatcttgcttggttgctacattctggtgtgatgggtgcagtggtggctcctctgacaatattagggggtcctcttctcatcagagctgcatggtacacagctggcattgtgggaggcctctccactgtggccatgtgtgcgcccagtgaaaagtttctgaacatgggtgcacccctgggagtgggcctgggtctcgtctttgtgtcctcattgggatctatgtttcttccacctaccaccgtggctggtgccactctttactcagtggcaatgtacggtggattagttcttttcagcatgttccttctgtatgatacccagaaagtaatcaagcgtgcagaagtatcaccaatgtatggagttcaaaaatatgatcccattaactcgatgctgagtatctacatggatacattaaatatatttatgcgagttgcaactatgctggcaactggaggcaacagaaagaaatgaagtgactcagcttctggcttctctgctacatcaaatatcttgtttaatggggcagatatgcattaaatagtttgtacaagcagctttcgttgaagtttagaagataagaaacatgtcatcatatttaaatgttccggtaatgtgatgcctcaggtctgcctttttttctggagaataaatgcagtaatcctctcccaaataagcacacacattttcaattctcatgtttgagtgattttaaaatgttttggtgaatgtgaaaactaaagtttgtgtcatgagaatgtaagtcttttttctactttaaaatttagtaggttcactgagtaactaaaatttagcaaacctgtgtttgcatatttttttggagtgcagaatattgtaattaatgtcataagtgatttggagctttggtaaagggaccagagagaaggagtcacctgcagtcttttgtttttttaaatacttagaacttagcacttgtgttattgattagtgaggagccagtaagaaacatctgggtatttggaaacaagtggtcattgttacattcatctgctgaacttaacaaaactgttcatcctgaaacaggcacaggtgatgcattctcctgctgttgcttctcagtgctctctttccaatatagatgtggtcatgtttgacttgtacagaatgttaatcatacagagaatccttgatggaattatatatgtgtgttttacttttgaatgttacaaaaggaaataactttaaaactattctcaagagaaaatattcaaagcatgaaatatgttgctttttccagaatacaaacagtatactcatga

SEQ ID NO: 338643 - DNA, 2005 bp, Homo sapiens
agtgtggccgcttttccgacagaggcctgcccgtgattggctgctcgtactatttacgtcctttcgatgttgcgacatgcagtgcgccggaggaactgtgctctttgaggccgacgctaggggcccggaagggaaactgcgaggcgaaggtgaccggggaccgagcatttcagatctgctcggtagacctggtgcaccaccaccatgttggctgcaaggctggtgtgtctccggacactaccttctagggttttccacccagctttcaccaaggcctcccctgttgtgaagaattccatcacgaagaatcaatggctgttaacacctagcagggaatatgccaccaaaacaagaattgggatccggcgtgggagaactggccaagaactcaaagaggcagcattggaaccatcgatggaaaaaatatttaaaattgatcagatgggaagatggtttgttgctggaggggctgctgttggtcttggagcattgtgctactatggcttgggactgtctaatgagattggagctattgaaaaggctgtaatttggcctcagtatgtcaaggatagaattcattccacctatatgtacttagcagggagtattggtttaacagctttgtctgccatagcaatcagcagaacgcctgttctcatgaacttcatgatgagaggctcttgggtgacaattggtgtgacctttgcagccatggttggagctggaatgctggtgtgatgggtgcagtggtggctcctctgacaatattagggggtcctcttctcatcagagctgcatggtacacagctggcattgtgggaggcctctccactgtggccatgtgtgcgcccagtgaaaagtttctgaacatgggtgcacccctgggagtgggcctgggtctcgtctttgtgtcctcattgggatctatgtttcttccacctaccaccgtggctggtgccactctttactcagtggcaatgtacggtggattagttcttttcagcatgttccttctgtatgatacccagaaagtaatcaagcgtgcagaagtatcaccaatgtatggagttcaaaaatatgatcccattaactcgatgctgagtatctacatggatacattaaatatatttatgcgagttgcaactatgctggcaactggaggcaacagaaagaaatgaagtgactcagcttctggcttctctgctacatcaaatatcttgtttaatggggcagatatgcattaaatagtttgtacaagcagctttcgttgaagtttagaagataagaaacatgtcatcatatttaaatgttccggtaatgtgatgcctcaggtctgcctttttttctggagaataaatgcagtaatcctctcccaaataagcacacacattttcaattctcatgtttgagtgattttaaaatgttttggtgaatgtgaaaactaaagtttgtgtcatgagaatgtaagtcttttttctactttaaaatttagtaggttcactgagtaactaaaatttagcaaacctgtgtttgcatatttttttggagtgcagaatattgtaattaatgtcataagtgatttggagctttggtaaagggaccagagagaaggagtcacctgcagtcttttgtttttttaaatacttagaacttagcacttgtgttattgattagtgaggagccagtaagaaacatctgggtatttggaaacaagtggtcattgttacattcatctgctgaacttaacaaaactgttcatcctgaaacaggcacaggtgatgcattctcctgctgttgcttctcagtgctctctttccaatatagatgtggtcatgtttgacttgtacagaatgttaatcatacagagaatccttgatggaattatatatgtgtgttttacttttgaatgttacaaaaggaaataactttaaaactattctcaagagaaaatattcaaagcatgaaatatgttgctttttccagaatacaaacagtatactcatga

SEQ ID NO: 338644 - DNA, 1938 bp, Homo sapiens
  misc_feature (8)..(8): n is a, c, g, or t
cgcggccncgcgaacgctgcgaggacgacagaaggggaaactgcgaggcgaaggtgaccggggaccgagcatttcagatctgctcggtagacctggtgcaccaccaccatgttggctgcaaggctggtgtgtctccggacactaccttctagggttttccacccagctttcaccaaggcctcccctgttgtgaagaattccatcacgaagaatcaatggctgttaacacctagcagggaatatgccaccaaaacaagaattgggatccggcgtgggagaactggccaagaactcaaagaggcagcattggaaccatcgatggaaaaaatatttaaaattgatcagatgggaagatggtttgttgctggaggggctgctgttggtcttggagcattgtgctactatggcttgggactgtctaatgagattggagctattgaaaaggctgtccacctatatgtacttagcagggagtattggtttaacagctttgtctgccatagcaatcagcagaacgcctgttctcatgaacttcatgatgagaggctcttgggtgacaattggtgtgacctttgcagccatggttggagctggaatgctggtacgatcaataccatatgaccagagcccaggcccaaagcatcttgcttggttgctacattctggtgtgatgggtgcagtggtggctcctctgacaatattagggggtcctcttctcatcagagctgcatggtacacagctggcattgtgggaggcctctccactgtggccatgtgtgcgcccagtgaaaagtttctgaacatgggtgcacccctgggagtgggcctgggtctcgtctttgtgtcctcattgggatctatgtttcttccacctaccaccgtggctggtgccactctttactcagtggcaatgtacggtggattagttcttttcagcatgttccttctgtatgatacccagaaagtaatcaagcgtgcagaagtatcaccaatgtatggagttcaaaaatatgatcccattaactcgatgctgagtatctacatggatacattaaatatatttatgcgagttgcaactatgctggcaactggaggcaacagaaagaaatgaagtgactcagcttctggcttctctgctacatcaaatatcttgtttaatggggcagatatgcattaaatagtttgtacaagcagctttcgttgaagtttagaagataagaaacatgtcatcatatttaaatgttccggtaatgtgatgcctcaggtctgcctttttttctggagaataaatgcagtaatcctctcccaaataagcacacacattttcaattctcatgtttgagtgattttaaaatgttttggtgaatgtgaaaactaaagtttgtgtcatgagaatgtaagtcttttttctactttaaaatttagtaggttcactgagtaactaaaatttagcaaacctgtgtttgcatatttttttggagtgcagaatattgtaattaatgtcataagtgatttggagctttggtaaagggaccagagagaaggagtcacctgcagtcttttgtttttttaaatacttagaacttagcacttgtgttattgattagtgaggagccagtaagaaacatctgggtatttggaaacaagtggtcattgttacattcatctgctgaacttaacaaaactgttcatcctgaaacaggcacaggtgatgcattctcctgctgttgcttctcagtgctctctttccaatatagatgtggtcatgtttgacttgtacagaatgttaatcatacagagaatccttgatggaattatatatgtgtgttttacttttgaatgttacaaaaggaaataactttaaaactattctcaagagaaaatattcaaagcatgaaatatgttgctttttccagaatacaaacagtatactcatga

SEQ ID NO: 338645 - DNA, 1519 bp, Homo sapiens
gagaagattagagcgcggtcaccgtttgtaatttcagtaccgggactggattattggtatacagtgtgtcgctttggcagtacacaatcagcagaacgcctgttctcatgaacttcatgatgagaggctcttgggtgacaattggtgtgacctttgcagccatggttggagctggaatgctggtacgatcaataccatatgaccagagcccaggcccaaagcatcttgcttggttgctacattctggtgtgatgggtgcagtggtggctcctctgacaatattagggggtcctcttctcatcagagctgcatggtacacagctggcattgtgggaggcctctccactgtggccatgtgtgcgcccagtgaaaagtttctgaacatgggtgcacccctgggagtgggcctgggtctcgtctttgtgtcctcattgggatctatgtttcttccacctaccaccgtggctggtgccactctttactcagtggcaatgtacggtggattagttcttttcagcatgttccttctgtatgatacccagaaagtaatcaagcgtgcagaagtatcaccaatgtatggagttcaaaaatatgatcccattaactcgatgctgagtatctacatggatacattaaatatatttatgcgagttgcaactatgctggcaactggaggcaacagaaagaaatgaagtgactcagcttctggcttctctgctacatcaaatatcttgtttaatggggcagatatgcattaaatagtttgtacaagcagctttcgttgaagtttagaagataagaaacatgtcatcatatttaaatgttccggtaatgtgatgcctcaggtctgcctttttttctggagaataaatgcagtaatcctctcccaaataagcacacacattttcaattctcatgtttgagtgattttaaaatgttttggtgaatgtgaaaactaaagtttgtgtcatgagaatgtaagtcttttttctactttaaaatttagtaggttcactgagtaactaaaatttagcaaacctgtgtttgcatatttttttggagtgcagaatattgtaattaatgtcataagtgatttggagctttggtaaagggaccagagagaaggagtcacctgcagtcttttgtttttttaaatacttagaacttagcacttgtgttattgattagtgaggagccagtaagaaacatctgggtatttggaaacaagtggtcattgttacattcatctgctgaacttaacaaaactgttcatcctgaaacaggcacaggtgatgcattctcctgctgttgcttctcagtgctctctttccaatatagatgtggtcatgtttgacttgtacagaatgttaatcatacagagaatccttgatggaattatatatgtgtgttttacttttgaatgttacaaaaggaaataactttaaaactattctcaagagaaaatattcaaagcatgaaatatgttgctttttccagaatacaaacagtatactcatga

SEQ ID NO: 338646 - DNA, 1264 bp, Homo sapiens
cccacgcgtccgtcgacccacgcgtccggacgctaggggcccggaagggaaactgcgaggcgaaggtgaccggggaccgaggcctctccactgtggccatgtgtgcgcccagtgaaaagtttctgaacatgggtgcacccctgggagtgggcctgggtctcgtctttgtgtcctcattgggatctatgtttcttccacctaccaccgtggctggtgccactctttactcagtggcaatgtacggtggattagttcttttcagcatgttccttctgtatgatacccagaaagtaatcaagcgtgcagaagtatcaccaatgtatggagttcaaaaatatgatcccattaactcgatgctgagtatctacatggatacattaaatatatttatgcgagttgcaactatgctggcaactggaggcaacagaaagaaatgaagtgactcagcttctggcttctctgctacatcaaatatcttgtttaatggggcagatatgcattaaatagtttgtacaagcagctttcgttgaagtttagaagataagaaacatgtcatcatatttaaatgttccggtaatgtgatgcctcaggtctgcctttttttctggagaataaatgcagtaatcctctcccaaataagcacacacattttcaattctcatgtttgagtgattttaaaatgttttggtgaatgtgaaaactaaagtttgtgtcatgagaatgtaagtcttttttctactttaaaatttagtaggttcactgagtaactaaaatttagcaaacctgtgtttgcatatttttttggagtgcagaatattgtaattaatgtcataagtgatttggagctttggtaaagggaccagagagaaggagtcacctgcagtcttttgtttttttaaatacttagaacttagcacttgtgttattgattagtgaggagccagtaagaaacatctgggtatttggaaacaagtggtcattgttacattcatctgctgaacttaacaaaactgttcatcctgaaacaggcacaggtgatgcattctcctgctgttgcttctcagtgctctctttccaatatagatgtggtcatgtttgacttgtacagaatgttaatcatacagagaatccttgatggaattatatatgtgtgttttacttttgaatgttacaaaaggaaataactttaaaactattctcaagagaaaatattcaaagcatgaaatatgttgctttttccagaatacaaacagtatactcatga

SEQ ID NO: 338647 - DNA, 1120 bp, Homo sapiens
ggctgacctaaggacccgacattggtgtctcagtgggatctatgtttcttccacctaccaccgtggctggtgccactctttactcagtggcaatgtacggtggattagttcttttcagcatgttccttctgtatgatacccagaaagtaatcaagcgtgcagaagtatcaccaatgtatggagttcaaaaatatgatcccattaactcgatgctgagtatctacatggatacattaaatatatttatgcgagttgcaactatgctggcaactggaggcaacagaaagaaatgaagtgactcagcttctggcttctctgctacatcaaatatcttgtttaatggggcagatatgcattaaatagtttgtacaagcagctttcgttgaagtttagaagataagaaacatgtcatcatatttaaatgttccggtaatgtgatgcctcaggtctgcctttttttctggagaataaatgcagtaatcctctcccaaataagcacacacattttcaattctcatgtttgagtgattttaaaatgttttggtgaatgtgaaaactaaagtttgtgtcatgagaatgtaagtcttttttctactttaaaatttagtaggttcactgagtaactaaaatttagcaaacctgtgtttgcatatttttttggagtgcagaatattgtaattaatgtcataagtgatttggagctttggtaaagggaccagagagaaggagtcacctgcagtcttttgtttttttaaatacttagaacttagcacttgtgttattgattagtgaggagccagtaagaaacatctgggtatttggaaacaagtggtcattgttacattcatctgctgaacttaacaaaactgttcatcctgaaacaggcacaggtgatgcattctcctgctgttgcttctcagtgctctctttccaatatagatgtggtcatgtttgacttgtacagaatgttaatcatacagagaatccttgatggaattatatatgtgtgttttacttttgaatgttacaaaaggaaataactttaaaactattctcaagagaaaatattcaaagcatgaaatatgttgctttttccagaatacaaacagtatactcatga

SEQ ID NO: 338648 - DNA, 681 bp, Homo sapiens
agtgtggccgcttttccgacagaggcctgcccgtgattggctgctcgtactatttacgtcctttcgatgttgcgacatgcagtgcgccggaggaactgtgctctttgaggccgacgctaggggcccggaagggaaactgcgaggcgaaggtgaccggggaccgagcatttcagatctgctcggtagacctggtgcaccaccaccatgttggctgcaaggctggtgtgtctccggacactaccttctagggttttccacccagctttcaccaaggcctcccctgttgtgaagaattccatcacgaagaatcaatggctgttaacacctagcagggaatatgccaccaaaacaagaattgggatccggcgtgggagaactggccaagaactcaaagaggcagcattggaaccatcgatggaaaaaatatttaaaattgatcagatgggaagatggtttgttgctggaggggctgctgttggtcttggagcattgtgctactatggcttgggactgtctaatgagattggagctattgaaaaggctgtgtgtaagtaaattgttttaagtaaactgttcctaaacaactccagccttaaaacaaaaattcaaattttcttctcattcctatctttagtcactttggaatgttttgtgtctagtctttgtgtatacacacaaata

SEQ ID NO: 338649 - DNA, 489 bp, Homo sapiens
aaaaatccaagatcagaaaatatttttctctaaatttcttatgtctctctctctctctctcttttcacctgagaacagcacctacagtttccattaaaaaaaaagtcaaatctcaccagctgctggtatttcaggtttttcaagggattgtctaagatttaacactgtcctaacttaagaaggaaaaggaaaaagtaaagagaaaaaatgaacttggtcaacacttcagtacaaatttggcacttgctcaaagatgtagtgtggtgtgcaatagataaagtcctctaaagaaaataattgcttattttgtggtggatagcaaggaagttaaaaacaggctctttttccctctttcccctcatgcacagacttccatctttaaagtagagagatggagaaggtggagagaagtaaagagaaattcatttttcttttttttctgtcaggtgcattacaaagaaaaaaaatgaaaggaaagaaaaagaaaag

SEQ ID NO: 338650 - DNA, 1042 bp, Homo sapiens
cctcattagcagtcagttctcattccgtctcttcccctcttctcaaaccactaatccactttttgtctctgtagatttgcctattttggacatttcatataagtgaaatcatatgatatgtaacattttgaaactggcttctttcattttagtgtgatgttttcaaggttccttcatgctgtaccatgtatcaatacttcattcccttttatggctgaaaaatattccattgtatggatataccacattttattatccattcatcagttgttggacatttgagttgtttctactttttggctattatgaataatgctgttgtgaatatttgtgtgcaaatttttgtgagaatatgtttttatttctcttggtatatacttaatagtgtaattgctgtgtcattttgataaatttatgtttaacttttcaaggaactgttttctaaagtggctgtgctactttacattcccaccagcaatacatatgtgttctagtttttctgcatcctcaccaatacttgttattgtctttttaaagctataggcatcttattgggcgtgtctcttatacttttatccttgagtttaggtaaatgtgacaacacctaagtggacatgttctcttgacttccagaaggatggacactgttaggaccaactagtcttcgtgacagtgcaaaactaagctaaagtttagaaggataagcaaggtgcaaagataaagcagaaataagtctggttctaagactttggaaaattatttacttctttttagttccctaccttttctttaggtctgttcctctttacataatacatgttacatgttcttaaaaagctgtattaaatccaatcatatttcacataaaccagataattgctttttttgttgttgttaatttatttatttttagtttttagagacagagtttcgccacttcgtccaggctggagtgcagtggctattcataggcacagtcattatgcactacagcctcaaactcctggccttgagtggtcctcccatctcagcctcctgagta

SEQ ID NO: 338651 - DNA, 298 bp, Homo sapiens
aaaaggatttggcattgggtgtacagctagaggtggaagatcatgcaaataagaccaacaggtccctccattccccaccagcagcctgcatgtgccatttcacttcacacatctctataatgcttgcggtgctggggtgccgttacctctccagttaaataaatctcaaaccaccgacccagggttttcatagcagtgctgcagccatatatgaggaaatgcaacaaacagtccattagcactgattggatatggatttttggcctggccacctgccacttggtaattttagaatagg

SEQ ID NO: 338652 - DNA, 491 bp, Homo sapiens
catcgagccggtccctgaaatgggcacagaaattcagtacctgcttagacagcatcggtttggctgagctgagggatcataggagtgctttttatggtgttgaatttctttgaaaatttctttagaactctggagcccaggtgccagggtggagtctttgttctcccactttctagttggctgtccttcagcaagttacttaatttctgggcctcaatttcctcatctgcaaatttctgtgcccatttcaaacagaaattttcagggtatgacagctaaagggtgtttttgaagaaaagagtttttgaaggaaagagaaagttctaaaatttatcaggtgatagtcgcacaattttgtgaataaactaaaaaccactgacttgtacactttaagtgaattgtatggtacaggaattatatctcaataaagctgtacactcaccccaccccgccaaattgagatatatttctggcccatatcaggtccgagc

SEQ ID NO: 338653 - DNA, 478 bp, Homo sapiens
catcgagccggtccctgaaatgggcacagaaattcagtacctgcttagacagcatcggtttggctgagctgagggatcataggagtgctttttatggtgttgaatttctttgaaaatttctttagaactctggagcccaggtgccagggtggagtctttgttctcccactttctagttggctgtccttcagcaagttacttaatttctgggcccatttcattgaaatgggcacagaaatttccgcgacaatgatcgttgatggccgcagaagtccaatctgtataagcagagcttgcttggttaatgtcggagggataaacactacgttgctgggtgcgtcagccttccagcctctcgacgcaggtgcgatatgcaaaatattttcggtggtggcgataagtgaagcggcgactggcggaacggaagagaccatcatagttttgtctccaacaattctgactgactcatgccccggag

SEQ ID NO: 338654 - DNA, 609 bp, Homo sapiens
ttgaaatgggcacagaaattattctgtatgacaccataatagtgaatacatgtcattatacatttgtccaaacccacagcatgtacaacaccaagagagaaccctagtgtaaactatggactttaggtgatgatgtgtcaatgtcggctcatcaactgtaacaaacataccactctggtgggggatgctgatgatgagggaggctgtgcctgtgtgggggaaatacatgggaaatttctttagaactctggagcccaggtgccagggtggagtctttgttctcccactttctagttggctgtccttcagcaagttacttaatttctgggcctcaatttcctcatctgcaaatttctgtgcccatttcaaacagaaattttcagggtatgacagctaaagggtgtttttgaagaaaagagtttttgaaggaaagagaaagttctaaaatttatcaggtgatagtcgcacaattttgtgaataaactaaaaaccactgacttgtacactttaagtgaattgtatggtacaggaattatatctcaataaagctgtacactcaccccaccccgccaaattgagatatatttctggcccatatcaggtccgagc

SEQ ID NO: 338655 - DNA, 347 bp, Homo sapiens
ttctatttagttaaaatacacggttggactgagctttgatgttatattgcctgttcagaaagggataagcaatattaaaagtatataaaaaattaaaatagggaagaaaaggaaaagaaactgcttaaactacttcatagaactgcttttagaaatttctggctggatgcggtggctcacacttataatcccagcactttgggaggctgaggcaggcagagtgcttgagcccaggagttcaagtccagcctgggcaacatagtgaaatcccatctctacaaaaatacaaaaagaaaaaaaaccaaaaaaattagctgagtgtagtgacttgtgcctgcagtcccagc

SEQ ID NO: 338656 - DNA, 989 bp, Homo sapiens
atatttttttctccagttggctctctccaaaaatgccttttgtttttctctgctatacttgacttgccttcagaatattacattccagataatatgactgttcatctttttctgtctgttttgtctgctttcttaatttcttataagtcttacatgtttaggtcagataaccattttttcttcattccttgttcattactgttctatttttcatatttttcaaatgaagaagcaacacataagtttcaaaaaatatccagggtactcctggacagtgtccccttttgatggacacaactgatacctgttctttctttccaagaaatgtgaattatttgactgtgagacgtcctctagtttgtggccttcagaaatcagatcttggggagagtcccttcctacctgactgacctcccataaggctgatgctgatttggccagagatgacctcaaggcccaccaaatagagcacaacttcccattgggagctttggcttttgatcttaagcttatgggtcgattctaaccaagaaaagtccatgagatcagtgcttcaacatccaggttgacgtttaaccattttggctgctgctctttaattttcctctagcaggcatgcagtccaaggaatatcaaaattctgattgtatgggaaccaaggttactttcttgttcttggataaagaaaatttctacaattacagttcccaaagacacagttgttcatgttatttaaagttttatccagtattctaggaattttcagcaatactaatattctcatttttaaacacttctctttaccattctctactctctcgtctacactcccggctacgcctcggctcccactactcgtccccccagcatcagtgcttcaacatccaggctgacgtttagccattttggctgctgttctttaatcttcctctagcaggcatgcagtccaaggaatatcaaaattctggttgtattgggaaccaaggtta

SEQ ID NO: 338657 - DNA, 934 bp, Homo sapiens
atatttttttctccagttggctctctccaaaaatgccttttgtttttctctgctatacttgacttgccttcagaatattacattccagataatatgactgttcatctttttctgtctgttttgtctgctttcttaatttcttataagtcttacatgtttaggtcagataaccattttttcttcattccttgttcattactgttctatttttcatatttttcaaatgaagaagcaacacataagtttcaaaaaatatccagggtactcctggacagtgtccccttttgatggacacaactgatacctgttctttctttccaagaaatgtgaattatttgactgtgagacgtcctctagtttgtggccttcagaaatcagatcttggggagagtcccttcctacctgactgacctcccataaggctgatgctgatttggccagagatgacctcaaggcccaccaaatagagcacaacttcccattgggagctttggcttttgatcttaagcttatgggtcgattctaaccaagaaaagtccatgagatcagtgcttcaacatccaggttgacgtttaaccattttggctgctgctctttaattttcctctagcaggcatgcagtccaaggaatatcaaaattctgattgtatgggaaccaaggttactttcttgttcttggataaagttatccagtattctaggaattttcagcaatactaatattctcatttttaaacacttctctttaccattctctactctctcgtctacactcccggctacgcctcggctcccactactcgtccccccagcatcagtgcttcaacatccaggctgacgtttagccattttggctgctgttctttaatcttcctctagcaggcatgcagtccaaggaatatcaaaattctggttgtattgggaaccaaggtta

SEQ ID NO: 338658 - DNA, 330 bp, Homo sapiens
gggaaataagaggccaatgcccacaaaagctatcacataaaataatgcaagatacagccaagacaagaaataaggcctgccaggctagagaatgggtacttcctagcccctcctatgattcaatgtccctccctctcaggcaccagaccatgtgcaaatcaggtgccaggaataattgttagagtgcaaagggcttcagtttcccttttgcaaaatgatacattctcagaggtcattaagtcattcaacaaacttttattgattccaccccccacacccactcctggctgagccagatcctgcctgggtcacgcagacattgatgggcac

SEQ ID NO: 338659 - DNA, 583 bp, Homo sapiens
tcaccccaaacttaatgacttaaaataacaatggtttggctcacagatacgcagtttgtgcagagttctgtgggcccccaggcttctcccctcacccacttcctaaggtcgaccagggatttgcctcgtgttcctagtcttttccacacgaagctgcacctatggctgcattttatgtcgtgacaggaatagaagtcactacggcactcacgctagaggaagcaccatgcactgtagaaatcactacggcactcacgctagaggaaccaccatgcaccgtattctggaataaaacagaaaggaacacacggacattggttcaggacaaaggaagcaacaccaaaggctttgtccagacagccacgtgctgcttccgagctgactgtaaagccagcaggcccagccctcatcctccctcaccccacagagaatggacctcagacctcagacacaagcaggtgtccaaattcccaggagcacacagactgccgggacacccagagcttccgattcaggaggcctgggtagggcctgagaatgtgcttttctagcaagtttccaggtgatgctgaggctgctggtc

SEQ ID NO: 338660 - DNA, 837 bp, Homo sapiens
gcgttacagctgaatccacttagaccccagcacaggtcagacttgttctaggctctggatccatttcctatccttaagcaaaacaaataagaaaccccagtagtaggtcagtattcatcaatgtggttctgatctttcaattgaactagtccctgagctaccaatctacaaactagatttcattcccttgggtatttaaggaccgctcagtcctgtccactaccctacgggacctgagggtaacagccagcccaaaagtgcctacaagactgtgcccactgctgtacccaagcagtggttcgttctcttggtatgcctttggaaaacctgccacctgccaggcaggacaaacatctcacctagctgaacttcttcccagagctgggtctccccgacaagagttttccctaccctggtggcccctcctattctagactcaaagtcactcacgctcaagacctcaggcttctctgactcccacatcgtccctacatcaatcaataactaaactctgctgaatccttcttgcacatgtcttctgcagacactcttctttccttgtcatttgtactaccttctttatccctcatcagtctctgcctgcgtttcaaacagtgcttacaaaaaacagccagattaattagccaaaaatacagctttcatatgtcactgaattgctcaaaaagcatctgaggttctctatatccaataagacaaaatttcactttcctttgctgatattgtgaatttccctacttttgaacctttgctaataccattccttctatctaaaatattttctcttctggttgtggtggcttatgcctgtaatcacag

SEQ ID NO: 338661 - DNA, 847 bp, Homo sapiens
cagggaggcgacaggaaggaggcccagaagctcatgcccttagctgtccagtcaaagccagaaagcctgattcacccacaagggcctcagcttcctcacctgtaaaatgggaacagcacccactttattgctaacacttcctgagggctccacgaagagtagctgtgagtgttgtaattacagaaaataagagtgtgtaagagaggctgtctggtgggctgacaggccacggtcccctctggcaattccagtctctgctcatggttttctgcttgaatttaaactactcccaagtggtctcctaaactacccccaagtggcctctacctcagcttttataaatggccatttcccctcttctagatgatccagtcacgaagctccctgagaaaagacctgggccaaacccaattttcacacttttctttaaggaaaatttcaaatccacccacagagtagataatggtgtgattaactgcaggtgcttaccacccaggtccacggccatcggggaccaccctcgtgtcctccacatgccgctcctttctccttctctctcccactagcttccacgaagcaaatcctatgaaacatgcatttgtgctaaaggggtcagtatttatctctacagaacaagcatgaccacaacactatgatcccacctttgataatttcacaatcttccgtctttgttggagtcatatctggctggaatccacaggtccccttactgacacaatcgtatgctcaaagagttaggatgcttgccctgtttcccattgttggttttgcaaatggcgtccctgtggcgtaagtgcacatacccccaatttctcatgaactagac

SEQ ID NO: 338662 - DNA, 546 bp, Homo sapiens
tttgttctttttgtcatacatgcatttttaatctttatgtagccaaatttaatcttttataacttctggattttaggatgtgttatgcttagaaagaccaaattctttctgaagatcacaaaagaagttcaataatgcttccttctagtgcttttgtgtttttaacatttatattttttattcatctggaatttattttgatgactggggatccagctttatttttaccaactgacttaccattttacaaaagtatcatttgttgaatattgtaattccctcatttattgaagccaaattttacagatgctaaatcaatatagaatgctttcagattatttatttattgtttctatttagttttcttccttggttgattcaagcatatattttggcaaggttacttgactaattttcatctttttctgaagcataagactacattttatgttttaatctaaggtataggaatattcagcttttaaagattttaacaaatttaggcctaggcacagaaaaagttctgggaagatgccaacttaaagc

SEQ ID NO: 338663 - DNA, 131 bp, Homo sapiens
tttctttttgcacttagccatataccatgaatacccttacgtcagtatgtacagatcatcgggagtctccatcattttaaatggccccattaacaccccactgaatgcacataccataaccagtcctctct

SEQ ID NO: 338664 - DNA, 107 bp, Homo sapiens
caccaccaccgactcctggtctctgctatccagcagatagcacccatgaggagcatgctgacccatgaggtcacttgggttaattcaaactaggaatgttaagccca

SEQ ID NO: 338665 - DNA, 535 bp, Homo sapiens
aaaactagaactcaggattgaaaaaaaaatctagttcaaaatatgtaggcaataaagctcaaaatcttttaagtatcagacagtaactaagcacctgctgctatgtcgactgccattaataataagccagtcttccctcttaggtttctacccctccgcctaaacaacaaaaacagctttagtggccattatttcaggaggtcggagcacatgctgcacctgtgagcttcaacctgtgttcttggcttgtacctgccagcagagcaggatccctccaccatctcaccacacaccttctcaacatgaacacggacatgcacataaatctaggacattctgaaagaaggggaaatactcagccatgagaaatcctgtccatacggatgggggatctcacagtaaacaaaggtctagcccataatgactgaaagttcatttgagagttagaaggagaagataaatctttcctatttaggtaaattaggtgagataaaatatttgttagttaacacacaaaggcttcatgaaattctgg

SEQ ID NO: 338666 - DNA, 508 bp, Homo sapiens
cactctagtcaacggcacctactgagacttttattaccaatcactggcgtcatcttctgcagccccagcagtgggttaagagaaataaaaggctaaactcaggactacttgccaacaagcatttaacagcattccttaatgcttcagattaattttcatctccctcaacaccctttttaaagatcagaaacttaacatttttccttgctggacaaacttggcttgaacattgctttcgtcgcagactaaatcaacatacagctattaatgcaccacactccctactttgagtatgggtgccaccaaggttctctccaacctttggaattctacgcagtcatagctaagtagctagtttggtttggataaaagctactttaaaatctcaggggcctatgcttgccaaaatcaagttgaaaaatgttggtgtcaaacaattgggaagtatttttctaaaaataacaccctgagaatctgaggcagatatatttgcctctggactagagtg

SEQ ID NO: 338667 - DNA, 572 bp, Homo sapiens
aacagcttgcaaactaaattttaggggcagacaacaggaggtggggaactggttactttcttgccctttaaaaataattaatattttttaaaggcttctgttgtagtaactgtcaattttagaaatattacttgataacatgtctcccaaatctgacttgctacacttttttttggagactgggtctggctctactgccaaggcctgagcagtagcacaatcagagttcgactgcagccttcacttcccaggctcaagccatcctcccgcctcagccttttgcagagcagggacaacaggggcacgctaacacatccagataagctcactttttttgttgttgaggcagggtctcagtatgttgcccaggctgggtgcggtggcgtgtgcctgtaatcccagctactcgggagaaagccagtctagacaaggagctgatggcccagaagctggtgcaggctgagcgggaggcccaggcctctctgcgggagcagcgggcagctcacgaggaggactttacagcgactccagcgtgaaaaggaggcagcatggcgggagctggaggtagcact

SEQ ID NO: 338668 - DNA, 223 bp, Homo sapiens
atctgtaagggaattttaataccaagtagaaaagatggctgggaagtcctttctaataatggactcagactcaataggaaaatagagatgtcctgcttgttcttttgtggagggtcaaaggacatgtacccttgctgcaagaatagaagatgtagctgtggatcaataagaatgctcatattctgtgataataaagttcatggagggctgcttcctgtccata

SEQ ID NO: 338669 - DNA, 396 bp, Homo sapiens
gccagactgcaagatggtccccaatgatcttcaccttcctggtattcatgcccctgtgtagtcctgtcccatactgaataggatattgtggaaatgacaagactgtgactttttttttctttgagatggagtctcactttgtcacccaggctggagtgcagtagcatgatctcggctcactgcaacctccgcctcctgggttcaagcaattctcccacctcagcctcccgagtagctgggattacaggtgcatgccaccatacctggctaattttttgtatctttagtggaaatggggggtctcaccatattggccaggctggtcttgaactcctgacctcaagtgatccacctgccttggcctcccaaagtgctgggattacaggtgtgagccac

SEQ ID NO: 338670 - DNA, 212 bp, Homo sapiens
gtattgcaggtactttggattttattctgagtgagatatgaaggcagtagagggttttgaagaggagtgacgcaatccttatttttgtaaaagatgactctggagtagctgttaagaacgaagagaaggtagttgaagggagaaacagaaaattcaacaataataaatgaagacttcaatactctgctttctctctctctctcttttttttt

SEQ ID NO: 338671 - DNA, 546 bp, Homo sapiens
caacacaatctcctggaggattttgaaacatattatgactcaactcaagtgggaccggggcactgactttgtcaggagctccccgggcaattccagtgtgcagccaggttgggaactgctgactgtgcaaaatgctaaggaggtgggtgggaggagggccacggggaacaaagacacttgggagagatgcataaaggaggaagagaataccaacggtcagcctcagagatgcacccatctgttaacagagaaaggcaacttagaaagacatcagctctgcagggagagaaacagatccattttcaatgtgtcagtattagtgacagctggaactgtggtggctgcaaaaagactaagtgatcagaggccctacagacacagctgtaggaacactaggcagagaggtattggttgaaaccaagggatcacgtcagagagcttggagagctctgtgtgagtacccagaactgagcctgggagacgccagtcatataagggcaggaaaaattagggagtgggaggaaggagaggcaggaggcaggaaga

SEQ ID NO: 338672 - DNA, 326 bp, Homo sapiens
gacttttatgaaaggtgcagcaaaatggattccatcctggaccaaccacactagctcagtgtaaacagaagacacagccatcctggaccagccacactagctccatgtaaacagaagacacagcaagaattagctgctgcatattaacgacctgaaaaaggcactttagagacacataatctcatcttgactgaggttctcctagagaaaacaatccactttacatctgtgtcctcaaagaacagcacttatactagaaaaagcgcaggatgcctctgagaagcgcggtgagttcagaagtctgggcgtcatgtcctctcatcctg

SEQ ID NO: 338673 - DNA, 396 bp, Homo sapiens
gggggactccccaaagcacctgacatgcctgttttgctctttgatccgtgtggttcatagatcactcattgaggggattcaaaattaggggcttgggtgacagtcgccaactgtttggccaggtggacagtatcagcctgatggccagctggccagtgtacaccacctgtctctgtgctgtggtggtggcggcacctgtggggtttctagatcttttctcacgttctactcatttcccctgaagttctaaaattcatattgacgatcttgctgtatgtttgtgttacacatagcaccctgacaagctgaaccatcgccattacccggccctggtccaggttgatgcctgggctttccttatggcacacagctgctgtcagtctgtcattctgcagg

SEQ ID NO: 338674 - DNA, 2093 bp, Homo sapiens
tggggcctgaatcaactgctggtgtttgttgagcagaaacagtgagtctctgacttcccaccaacagctaacctgatatggaagagccaagaggcatctcagatttgtcaacattgctttaatgagctgaggaacttctcatggtaaactcagcagctgagtaacaggatgatggcaccacaacaggtagataatcaaggcaggaggtcaaagcactggagccaacacccgcccaggatggggtataaaagggttgggaggagaggaggcttcagtctcagtggctcagccttcccagctgatctgaagctcctgtgcagcctcagccctacaccatgacctccttctacagcacctcctcatgccctctgggttgcaccatggctcctggagcaagaaatgtctttgtctctcctatcgatgttgggtgccagcctgtggcagaggccaatgctgcctccatgtgcctcttggccaacgtggcacacgccaacagagtccgtgtggggtcgactcccctgggccgccccagcctctgtctgcccccaaccagtcacactgcttgtcccttgccagggacctgtcacattcccggcaacatcggaatctgtggggcctacggcaaaaacaccctgaatggccatgagaaggagaccatgaagttcctgaatgaccgcctggccaactacctggagaaggtgcgccagctggagcaggagaatgcagagctggagaccacactcctcgagaggagcaagtgccacgagtccaccgtgtgccccgactaccagtcctacttccgtacaatcgaggagctccagcagaagatcctgtgcagcaaggctgagaatgccaggctgattgtacaaattgacaacgcgaagctggctgctgatgactttaggatcaagctggagagtgagcgctcccttcaccagctggtggaggcggacaagtgcgggacgcagaagctcctggatgacgcgaccctggccaaggccgacctggaggcccagcaggagtccctgaaggaggagcagctctccctcaagagcaaccacgagcaggaagtaaagattctgaggagtcagctgggggagaagttccggatcgagctggacattgagcccaccattgacctgaacagggtgttgggggagatgcgggctcagtacgaggccatggtggagaccaaccaccaggatgtggaacagtggttccaagcccagtctgaaggcatcagcctgcaggccatgtcctgctccgaggagctgcagtgctgccagtcggagatcctggagctgagatgcacggtgaatgccctggaggtggagcgccaagcccagcacaccttgaaggactgtctgcagaactccctgtgtgaagcggaggaccgctacggcacagagctggcccagatgcagagcctcattagcaacttggaagagcagttgtctgagatccgggccgacctggagcggcagaaccaggagtaccaggtgctgctggacgtgaaggcccggttggagaacgagattgccacataccggaaccttactcccctgcaatccctgttccacgcctgcctcctgtacttcttgtccaagctgtggccctgtcaccggtgggtctccctctggccatggagccagcatggggagatgattctgaaggcccgagttaggagattgaggctggttgcactggggtcaggagtgccctcaccttgcccagtcttccttcaagactagactcactgaggcattttccctaaatcaaccggtagcagatacttccaaggagtggctccctgcctatgcctctaagctgtattttttgttgttgctaaaatgttgtaattatcttccatgaaagcaattatttttcctggtgtctcttcttggtacttttagttctattccagtgtttcagaatctccaaaaatgtaactgggttccctgcattaaatggtcaataaacctccttcctgcaccaagtgctgtctccccggtgttggttgtatgtgagatgtcggagagtcctggtcgtcaggtcctgtgtcctcactggctctgacatcttgcttccaggag

SEQ ID NO: 338675 - DNA, 598 bp, Homo sapiens
acccttgtccatcaatcactgagacatctttttaatgtaactcttctttctctccctgcagactcccctgcaatccctgttccacgcctgcctcctgtacttcttgtccaagctgtggccctgtcaccggtgggtctccctctggccatggagccagcatggggagatgattctgaaggcccgagttaggagattgaggctggttgcactggggtcaggagtgccctcaccttgcccagtcttccttcaagactagactcactgaggcattttccctaaatcaaccggtagcagatacttccaaggagtggctccctgcctatgcctctaagctgtattttttgttgttgctaaaatgttgtaattatcttccatgaaagcaattatttttcctggtgtctcttcttggtacttttagttctattccagtgtttcagaatctccaaaaatgtaactgggttccctgcattaaatggtcaataaacctccttcctgcaccaagtgctgtctccccggtgttggttgtatgtgagatgtcggagagtcctggtcgtcaggtcctgtgtcctcactggctctgacatcttgcttccaggag

SEQ ID NO: 338676 - DNA, 1676 bp, Homo sapiens
tggggcctgaatcaactgctggtgtttgttgagcagaaacagtgagtctctgacttcccaccaacagctaacctgatatggaagagccaagaggcatctcagatttgtcaacattgctttaatgagctgaggaacttctcatggtaaactcagcagctgagtaacaggatgatggcaccacaacaggtagataatcaaggcaggaggtcaaagcactggagccaacacccgcccaggatggggtataaaagggttgggaggagaggaggcttcagtctcagtggctcagccttcccagctgatctgaagctcctgtgcagcctcagccctacaccatgacctccttctacagcacctcctcatgccctctgggttgcaccatggctcctggagcaagaaatgtctttgtctctcctatcgatgttgggtgccagcctgtggcagaggccaatgctgcctccatgtgcctcttggccaacgtggcacacgccaacagagtccgtgtggggtcgactcccctgggccgccccagcctctgtctgcccccaaccagtcacactgcttgtcccttgccagggacctgtcacattcccggcaacatcggaatctgtggggcctacggcaaaaacaccctgaatggccatgagaaggagaccatgaagttcctgaatgaccgcctggccaactacctggagaaggtgcgccagctggagcaggagaatgcagagctggagaccacactcctcgagaggagcaagtgccacgagtccaccgtgtgccccgactaccagtcctacttccgtacaatcgaggagctccagcagaagatcctgtgcagcaaggctgagaatgccaggctgattgtacaaattgacaacgcgaagctggctgctgatgactttaggatcaagctggagagtgagcgctcccttcaccagctggtggaggcggacaagtgcgggacgcagaagctcctggatgacgcgaccctggccaaggccgacctggaggcccagcaggagtccctgaaggaggagcagctctccctcaagagcaaccacgagcaggaagtaaagattctgaggagtcagctgggggagaagttccggatcgagctggacattgagcccaccattgacctgaacagggtgttgggggagatgcgggctcagtacgaggccatggtggagaccaaccaccaggatgtggaacagtggttccaagcccaggtgagtgggggttacagagccagggagtacctggcctccatctgagcagggaggtgactgtgtttctctgtgctccagtctgaaggcatcagcctgcaggccatgtcctgctccgaggagctgcagtgctgccagtcggagatcctggagctgagatgcacggtgaatgccctggaggtggagcgccaagcccagcacaccttgaaggactgtctgcagaactccctgtgtgaagcggaggaccgctacggcacagagctggcccagatgcagagcctcattagcaacttggaagagcagttgtctgagatccgggccgacctggagcggcagaaccaggagtaccaggtgctgctggacgtgaaggcccggttggagaacgagattgccacataccggaaccttctggagagcgaggactgcaagtacgtgtgatctgggcaattc

SEQ ID NO: 338677 - DNA, 391 bp, Homo sapiens
tcctacttccgtacaatcgaggagctccagcagaaggtgaggtgtgggatcgcctgggcatgctgggtctgagaaggcagaagccttcgcaggaggaatctgcataaggtccagagagctttgggttcttggtttctcttggacatgagcgtaaataccacacatggagtgggagcttagagtatggtgctttgtgtgtgaaccgtctttccgttttcctcagatcctgtgcagcaaggctgagaatgccaggctgattgtacaaattgacaacgcgaagctggctgctgatgactttaggatcaagtaagtcaggatgaggagggtcagtgtgacttctctcctgctgtatttccaagggcccgccccattactcagtctatattgtagg

SEQ ID NO: 338678 - DNA, 397 bp, Homo sapiens
acattgagcccaccattgacctgaacagggtgttgggggagatgcgggctcagtacgaggccatggtggagaccaaccaccaggatgtggaacagtggttccaagcccaggtgagtgggggttacagagccagggagtacctggcctccatctgagcagggaggtgactgtgtttctctgtgctccagtctgaaggcatcagcctgcaggccatgtcctgctccgaggagctgcagtgctgccagtcggagatcctggagctgagatgcacggtgaatgccctggaggtggagcgccaagcccagcacaccttggtacgtgtccttcaccctcactgcactgcaaatgccccatgccatgtcctggtagtagcatctcttaaagtctcacaaatcag

SEQ ID NO: 338679 - DNA, 2171 bp, Homo sapiens
tggggcctgaatcaactgctggtgtttgttgagcagaaacagtgagtctctgacttcccaccaacagctaacctgatatggaagagccaagaggcatctcagatttgtcaacattgctttaatgagctgaggaacttctcatggtaaactcagcagctgagtaacaggatgatggcaccacaacaggtagataatcaaggcaggaggtcaaagcactggagccaacacccgcccaggatggggtataaaagggttgggaggagaggaggcttcagtctcagtggctcagccttcccagctgatctgaagctcctgtgcagcctcagccctacaccatgacctccttctacagcacctcctcatgccctctgggttgcaccatggctcctggagcaagaaatgtctttgtctctcctatcgatgttgggtgccagcctgtggcagaggccaatgctgcctccatgtgcctcttggccaacgtggcacacgccaacagagtccgtgtggggtcgactcccctgggccgccccagcctctgtctgcccccaaccagtcacactgcttgtcccttgccagggacctgtcacattcccggcaacatcggaatctgtggggcctacggcaaaaacaccctgaatggccatgagaaggagaccatgaagttcctgaatgaccgcctggccaactacctggagaaggtgcgccagctggagcaggagaatgcagagctggagaccacactcctcgagaggagcaagtgccacgagtccaccgtgtgccccgactaccagtcctacttccgtacaatcgaggagctccagcagaagatcctgtgcagcaaggctgagaatgccaggctgattgtacaaattgacaacgcgaagctggctgctgatgactttaggatcaagctggagagtgagcgctcccttcaccagctggtggaggcggacaagtgcgggacgcagaagctcctggatgacgcgaccctggccaaggccgacctggaggcccagcaggagtccctgaaggaggagcagctctccctcaagagcaaccacgagcaggaagtaaagattctgaggagtcagctgggggagaagttccggatcgagctggacattgagcccaccattgacctgaacagggtgttgggggagatgcgggctcagtacgaggccatggtggagaccaaccaccaggatgtggaacagtggttccaagcccaggtgagtgggggttacagagccagggagtacctggcctccatctgagcagggaggtgactgtgtttctctgtgctccagtctgaaggcatcagcctgcaggccatgtcctgctccgaggagctgcagtgctgccagtcggagatcctggagctgagatgcacggtgaatgccctggaggtggagcgccaagcccagcacaccttgaaggactgtctgcagaactccctgtgtgaagcggaggaccgctacggcacagagctggcccagatgcagagcctcattagcaacttggaagagcagttgtctgagatccgggccgacctggagcggcagaaccaggagtaccaggtgctgctggacgtgaaggcccggttggagaacgagattgccacataccggaaccttactcccctgcaatccctgttccacgcctgcctcctgtacttcttgtccaagctgtggccctgtcaccggtgggtctccctctggccatggagccagcatggggagatgattctgaaggcccgagttaggagattgaggctggttgcactggggtcaggagtgccctcaccttgcccagtcttccttcaagactagactcactgaggcattttccctaaatcaaccggtagcagatacttccaaggagtggctccctgcctatgcctctaagctgtattttttgttgttgctaaaatgttgtaattatcttccatgaaagcaattatttttcctggtgtctcttcttggtacttttagttctattccagtgtttcagaatctccaaaaatgtaactgggttccctgcattaaatggtcaataaacctccttcctgcaccaagtgctgtctccccggtgttggttgtatgtgagatgtcggagagtcctggtcgtcaggtcctgtgtcctcactggctctgacatcttgcttccaggag

SEQ ID NO: 338680 - DNA, 157 bp, Homo sapiens
ctcactgaccttcctttacctctcatttctttagtttacttatattctcttccttttcataggagccatattttcttgtatccctttaaggatgttaaaagtttcctacattttaatctgatccttaaggtagcttctgcccaaagtactgggtctt

SEQ ID NO: 338681 - DNA, 1085 bp, Homo sapiens
ttgtcctgggttttaaacttggtgaagcaggtttcattcattgagatagaaaacacagaaggagtatgctggattgaagttggggaagtgatgttttgaacttgtcgagttaaagacatttggaacacatgtcagataagatttcaaggctggagatgcagatttacaatggaatcaatggcatataggtggtagtagaagaaaacagaagatgagctgccacagggcaaacgtgcagaatgagcagagggctgagggctgaactgtaggggaggctaaggtttgagaggaagggaggacagtaaagagaagtccaaatatagagcagctggacaagaaagaaaatgaggagaaatggataactcagaaaacaggtgggcaacattttaaggagcagagagtggtcaagaacaccaaatgttgtgcaaagttcaagaaatgaaagagaatcctagataatggacctggtggtcattaggagaggacaggagtgcagggggttgaagatgaaaggaagatggcgaggtgcgggatgtgtacgaggacctgtacttcaaggagctgcctgctaagaccaggaataagatgaaacacacccaaacctagagagaagcgaccaaaagcgttcatcgttttctgttttcataaagaatatgaaagacttatgcatgtttatatgttgaaagaaaaggatcattgagaccctgaagaaaagacaatgaagcaaggtccgtgaggaagcaagagggattagcatcagactggaataagggaaaggaagacaaggagtgggaagagagcctgccatttataagggacacagattaccactgcaaaacatttttccttaattagaaatataaatgtaataatagttatccgtgaaggctttctctctctttaatagtactacttatcatgtataaaataaaataaatgctgagcatgggaagaagtcactagagctccagatctgtggtcttggtagattaccaagcctttcacacaccttcaaactgctcctaaatatcacttcaggtgatactcatcacctgcagagccacaggcgttgctgacagctctga

SEQ ID NO: 338682 - DNA, 378 bp, Homo sapiens
agctataaaatgttatttttcagagtgaagtatctgtcaagatggctagttttggtgtataatagaaatggtattttattccttttatttctgtaaacagattaagtctgtgtgtgtgtgtgtgtgtgtgtgtgtgtgtgtgtgtgtgtgtgtacatgggatataatacaaatctacctcgacttataatgagttacatcctgataaccacaggccaagatgtgttatgatggatctggatatactcataagttgaaaatattttaggtaaaaaatgcatttagtacatttaacaaaaatagtggcaaaccgagtccagcagcacatcaaaaagcttatccaccaagatcaagttggcttcatccatgggatgcaaga

SEQ ID NO: 338683 - DNA, 267 bp, Homo sapiens
agagcagtaaagagtcgacctccaccaaagccaaaaccactgagcaaggttgtagcgctgaaagcaaggagaaggttttagaaggcagcaagcttcctgatcaagagaaggcagtcagcgaacacatcccttacctctctccttaccacagctcctcatatagatatgcaaacatcccagcacacgcccggcattatcaaagctacatgcagttaattcaacagaaatctgcagtcgagtatgctcagagtcagctcagcttggtga

SEQ ID NO: 338684 - DNA, 362 bp, Homo sapiens
cacttctccatcttcatctccctcgacgcctcctctcactggcaacacagcagccacttgggtcgtaggcaaccagcagccacctcacctgtcccacctcaaagcctttggccttgcagtttcctctgcctggatttccctgccccccatctctgccctgctggcttgccttctgcctcaagtctccactgaaatgccacctcctctgagaagccttccatgctcctccaggcccattacgtccatcttaatcccttgtttctttcttggcatatatcataggcttatttgtgatactcagcgttttatttgtctgtttgcctgcagaatgtcagtctctaccaccaggatgtgatgtcagg

SEQ ID NO: 338685 - DNA, 604 bp, Homo sapiens
atgagatgtcggttcaatgactattcccttccattccctttcccgtcagtctacacatttttggttcttcaacttctttccaaccttactagaaagtaagcttcatgaaaacatagactttattttgttcaccaccatggccccagcacctagaagagcaaaggtcacataaaatgaaagggtaaatgaatgaatgaatagaatgagataagagcacgtcaagaaataaaatttattaggctcttcccacctgtttcttgatatttttatgctttcattcatttcctatacttttccatttatttgccaaatccaagctgtttcatttataaatatttttccaagtttgttagtatttaccttctattccttatctttgaattaccttttcttttctgtccactaattctgttgctttcaactgtttcaaccttacagtttcgaaccacaaggaatccgattattttttgtatgtgctcctcaaatccataaatctaattttaaattcaaaaacaaacagctctactttctttgaaatgtataaccctataaaatattcacattagtctaaattatatgattaatgtggcatcttccccatgaa

SEQ ID NO: 338686 - DNA, 360 bp, Homo sapiens
catccaatattaacacagaatttccatggtttacaatagcagtggtaatcccaaatcatcctgtgaatgtctcccggaatgactccatagccacacagaaccacatatggctttagatatccatggccctattccacttctgtgctgcaccagctgagacctcagctgtagcaaccctcctctgtccacctaatgccgtttaaagcccagcccctggatttgtgaaccaaaccacatctactatcacagatgagcatatttttcactgcccatatgcaccaggctgaatgaaactccccaggcagcaatgtgctattgaaacttctaaaactaggtgctattgaaacttctaaaactagg

SEQ ID NO: 338687 - DNA, 868 bp, Homo sapiens
tctctcttcaccctgccgtcatgtctaagtcagagtctcctaaagagcccgaacagctgaggaagctcttcattggagggttgagctttgaaacaactgatgagagcctgaggagccattttgagcaatggggaacgctcacggactgtgtggtaatgagagatccaaacaccaagcgctccaggggctttgggtttgtcacatatgccactgtggaggaggtggatgcagctatgaatgcaaggccacacaaggtggatggaagagttgtggaaccaaagagagctgtctccagagaagattctcaaagaccaggtgcccacttaactgtgaaaaagatatttgttggtggcattaaagaagacactgaagaacatcacctaagagattattttgaacagtatggaaaaattgaagtgattgaaatcatgactgaccgaggcagtggcaagaaaaggggctttgcctttgtaacctttgacgaccatgactccgtggataagattgtcattcagaaataccatactgtgaatggccacaactgtgaagttagaaaagccctgtcaaagcaagagatggctagtgcttcatccagccaaagaggtcgaagtggttctggaaactttggtggtggtcgtggaggtggtttcggtgggaatgacaacttcggtcgtggaggaaacttcagtggtcgtggtggtttggtggcagccgtggtggtggtggatatggtggcagggggatggctataatggatttggtaatgatggaggtggtggaagctacaatgattttgtcaattacaacaatcagtcttcacattttggacccatgaagggaggaaactttggaggcagaagctctggcc

SEQ ID NO: 338688 - DNA, 367 bp, Homo sapiens
tttagtttcttgaaatgcatgcacttaactcccatttaagaagtctcacctggggagacaactgtcttgcgagtcctcctgtggtttgagctacagaaagaaaattctctttcaagtacaagtgcttttacagtaaagcactgcgaattttactgggacctaactaaccagggacaaggaagggaacagctggaatgaatgtggttttcttgaatggagtcagttcaccattaaccaaagtcaatttcacaatcagctgagctgccccctcaccaaggttaaaaaaccagcaagctctgtacatagacatgaagagtaacaagaattcagtcggtacatttcttctgcaaatctctgtgaatggagt

SEQ ID NO: 338689 - DNA, 334 bp, Homo sapiens
caatggagaaaagccaccagcagcagaatttgactgaattagaagacttacttcatctcacagagcttgtcactggaggtggaaaaagaagcatctttcctgccataggccttgtggtctttaatctgcctcatttcaacaggcagcaccagggtcgtggctgcattaaaatactcaggttgtaggaaatgaaaatgcgaacatcactcggcaagtgaaaaaccgaggtgctgataaagtgacctacatagggtcacacatttagttagcaacatatctgggatggaaacctagggctcttgagttctaatcctaatgattatctcaccattag

SEQ ID NO: 338690 - DNA, 608 bp, Homo sapiens
tgacctccagtgttggaggtgagacctggtagaaggtgactggatcctggaggcagatccctcatgaatggcttagtgtcatccctccccctggtgatgagtgagttcccgctcagtcagttccaacaagatctggtcgcttaagagtctgggagcctcccccttctctgtctcttgctactgctcctgctttgccttccaccatgactgtagcttcctgaggcctcccaaggagcagatgccagcaccatgcttcctgtacagtctggagaaccgtgagccaattaagcctcttttctatataaatcatccagccctgggcatttctttatattgacacaaaagcagactaacacaatcaccaagggatgggggagagagtggggtcaggaacagtctggggtctggtcagcgagcagagcctgtgggtcaggaacagtctggggtctggtcagcgagcagggcctgttggcgtcagcagatggtaccgtcgcttcaagagcaggctcagaggcgaggctggaggcagacagaggggagatccagggaggaggcaccgcaagcctcactgccacagtctggtctgcctccctggtggggcaatgctg

SEQ ID NO: 338691 - DNA, 132 bp, Homo sapiens
tcacctaaggcaagtctgttcaacccacagcctgagggccacatgcagccctgaacagctttgcatgtgactcaacacaaattcgtaaacttccttaagacattgtgaaatttttttgtgattttgtttttt

SEQ ID NO: 338692 - DNA, 294 bp, Homo sapiens
ccctctgccagccggttttctgcatgaccttgggcaggtccctgtatctttgggctcaaacgttgtcatcgtgccagtgctcaacagcataatttatgttggattaaatgctagctctgaaaaccacaactcttctatccactgtaggccaatttggggaggaggctgaagggccaggctttcttggcaggcagcggccccacgtttgctgcaccggcctgccgagagtgaggccgtgcagagcctgcccacacagcccccggccccagccatgcccacgcgctgcctagccag

SEQ ID NO: 338693 - DNA, 187 bp, Homo sapiens
tcattcatttaatgcaaattattgtagctactgacacaaatgtattcactttctacctgattatataggaataccctaattatctatattcacatcttattgaacttataaagtgttaggagaccagtgtctgagaaaaaaagtcaaatataaatagattcatctctgagttgtaagaaccttttgt

SEQ ID NO: 338694 - DNA, 643 bp, Homo sapiens
tgccaggctgcctgatgatgtgtggcttgtgctttggatcgtaatgcttacctatgctacttaagttacataccctgtggcctttgtggccaggactgtgggctactacctggagtgattcgttaggggaaaggacccacagcctgtgcaggaggaaaaaagcatctctgagtacagggtggatgagctggatgagctgccgggcaagagccacgcacacccaggtggtgagtcttaaggataaggtggaatttgccccatagctgtcctggacagaaactgcccagagaagaatgaatggaggacatagggctctgtggtcccaccatacatggggagacctgtgactggtcctgttaccatgtcaacttagccccaaacccatctctgattgacttggttgcttattttggcacattcttgctccacacagccacatacatactggctgctcctcgaaggccaggcagatgcagcagctgttgggccagcaaagaggaaggtcctggaaggttctggcctgaacgctgcatctgttgtgtgacagccacaactgctcaggcttccttgtctgtgggtgcactgtggggaggagtgttatgataagaacattggctctcagtctccctggggagaagtttgg

SEQ ID NO: 338695 - DNA, 219 bp, Homo sapiens
atggcaccactgcactccagcctgggcgacagagtgagactctatctcaaagaaaaaaaaaaagtcacaggcatctcaaagaagttcattaagaaagggctcatgtggatcattgatttatttttattatcttaatgtgctaattgctatatataatgcctaaaaagaatagataaacatatgcagaagaattaatttggacccctgcctcacatcata

SEQ ID NO: 338696 - DNA, 657 bp, Homo sapiens
ataattttacccaaatgaatcgcagatggttcttcaatattggatcaatttttgtagaaagagaagttacttggaaaatgggaacaaaatgtcccaatgagaagagaaggttgactgtggaataaattaattttaccagtatatatacacttaattatgaacaagagaatcagaacaaggttcctgctattagagtcaattggtttatcaaattagagtttgaataatgttcttaaattttggcatagattagaatcacgcaggaaggctggttaaaaatgtagattcctgggcactacaactattatgtttcagtaaaggtctggtgtagggcctaggggtatggattttagccagcttcctagtaaattccaaagcctgtcgtctctgtaaaatcaaagcatgctgaaaggcaatatggttaaacgtccatgacaccatcgtttcataatgagattaggaataagtctatgccatttccttattatacagagatagcctccttacaaatatcatctggaacctttatcttctgctttcctgaggtcattttcaagaacatcttccatttatttctcaaccaaccagattttcatagttgcttactccgtaaaggaaaaatgcatatgtgtatgtgtgtgtgcatgtgtgtaaatg

SEQ ID NO: 338697 - DNA, 280 bp, Homo sapiens
aggttgcagtgagccgagatcacacctctgcactccagcctgggcaacgaggggagaccctgtctggaagaaaaaaaaaggcaaaacaatgattaaatagcagttacaaatttaagccttaaatttagcctggaaaaacaaacaaaaaacacctatcaaaaatccaaaagatcaacacctttctcttggcttaaaatactaaattaaaaaaagcctagctgctatgcactgcctttgtaaaaacagcactaaagtgtacctcgtgttcacagcagcagct

SEQ ID NO: 338698 - DNA, 316 bp, Homo sapiens
agcgttgtggatcctagtatttcttgccaaaaagccacaaaagtgtccacaagtctcctggcatatcccaacccccagacaatgaatctgcagcagcaacctgttttctccaccagcctagggtcctggactacctgttcataatcttctctgcctgcatggacccagaaataaatcagagtacagcgccacctgggccactgtctgtagaacaaacaatccacttacactgcattcttccccacccatggattttctttttctacacgtgtacatgtgcagggttgttatatgggtaaaattgtgtcatgggggt

SEQ ID NO: 338699 - DNA, 636 bp, Homo sapiens
acaggaagagccacaagaagtattttactaggaaaagtgcctaaactaacgttctctggccttaaagggtgccagttgagccaggaaacctgacagaaacaaatgcaaacatgtctctgggctgatgctctgtttgtagaaaacccaacatatcctgcattgctctgcattcacagtacgcaggaatcaagtcaaagaaaaaagatgaccactaccctatacttcttaactcaggaactagaccatatgagcactaacagacacacaggcagaaacaataaatatgctattcaatggttgactctgaacaggagaatctgtaaggaatggaaggaagaagactgctattcaactgtcaactgcaaaccaagcccttgatatgctcaaaacccaaatatttaagactgacacatgtccacagtaccaagtgcctcaaaacatctagttaaaaaaaaaaaacaagtacaaaaccccaaaccaaacacagcccaagagagaattcaaatgggtaatgcaaatatccaaaggcttccaaaccagaattgaaacctggttatctaatgtatgagtatgccatgttttcaacactacaccactctatccaagtacacaggaagagccacaagaagtatttta

SEQ ID NO: 338700 - DNA, 625 bp, Homo sapiens
acaggaagagccacaagaagtattttactaggaaaagtgcctaaactaacgttctctggccttaaagggtgccagttgagccaggaaacctgacagaaacaaatgcaaacatgtctctgggctgatgctctgtttgtagaaaacccaacatatcctgcattgctctgcattcacagtacgcaggaatcaagtcaaagaaaaaagatgaccactaccctatacttcttaactcaggaactagaccatatgagcactaacagacacacaggcagaaacaataaatatgctattcaatggttgactctgaacaggagaatctgtaaggaatggaaggaagaagactgctattcaactgtcaactgcaaaccaagcccttgatatgctcaaaacccaaatatttaagactgacacatgtccacagtaccaagtgcctcaaaacatctagttaaaaaaaaaaaacaagtacaaaaccccaaaccaaacacagcccaagagagaattcaaatgggtaatgcaaatatccaaaggcttccaaaccagaattgaaacctggttatctaatgtatgagtatgccatgttttcaacactacaccactccaacatggggcttactaggctacgcat

SEQ ID NO: 338701 - DNA, 490 bp, Homo sapiens
caagcaaagagacagaaaatgatttttaaaataaggccgccaggagacctcaagatcacagcagggtgtggatgctgagtatggaggtcagagccccatcaccctcactagacctgagatgggattctcacggagaggggttccatcccagggaggctgcggggacatcaaagtaaccaggaggtcttgaaaggtgtccaagaggagaagacagaagagctcctgatcagtgctgaggagtgagtgggcaggaaagaaagaagtgatcgcttgaggtcaaggggagctttatttagaatggatgaaacctgaggatgttttcaacacaaggagaagccaggagaagagcagagtggaaaataagacaaacgggagagaatggtgtaggtagagagcgggaaggggtggcatgaaaagcctagaggaacagaggagccttgaaagactccttctcctcctcggaagcccccttcgagtcccgcaccccagc

SEQ ID NO: 338702 - DNA, 867 bp, Homo sapiens
tgagacactcagtgtatatatatgtacatttgagtgactttttgtaagttttattgcaatactaatctagctagttacccacataaagttttagggagcctggtatgtactgccactgggccttggaccccatttttcccagggctcagggctcacctctgtacccagttgtcacagtaagttctttacctttattaatcaggttgattctactcttattgatagtgtaccctcttacacagctgtggttcttgccatctttaactctaatgcccttggctcaggtttccagttgcctatgtgtgtagcagagcagtcattgctactgatagtgtacccaagcagtaggactatgctgagaaggaaaactaaagtgagagatggaaccttgctatttaatatctaacctgctgttagcaggaagcttattgttgtaccctaccaaggaagtgagatagtactaaaataaatcatgggattacctcttgaatgcattgaatggccatgtgttgtcatctggttctatgtttcttctagtggaaggtgctgctttacttatttattactgtttttaccaataagaatgaaaatgggattgtgcaagttcccttgatttcaactaaacatgccatagtgatcatattttaatttatttcaggatatctaaagtcttaactagatttaaacttactgtcaaatgcccgttgtcagttcagtactggtagaaccttgcgtctgttccttatgttcttgttgacagtgcttaaatgcatcattagtacattgtgtacctgaatcatagatgtagttggcattctatgaaaaatggttaaagaaactcaggttattttggttttgcagcagtga

SEQ ID NO: 338703 - DNA, 341 bp, Homo sapiens
ccagttgggattccaaaggaagaaacacttaatgccagggtggtcagtccaaagcatttgttagggagcttatatacagagggggctgcagcgtgccctcacgagggacagccaggaaagaggttgtgcctaggcacaccgcactgagggggtggggtgtggagtttctatgagggtgcaaggaatttggctggggtgggaccagtttccacgtgcttagcaacacgtcagatctttcagtgttccaggcaacaacctaaacgtgtatcagtgtctgggaacatgcaagccccagccagggtttgagcctgcagggggaacatgtagctgattaggtcaga

SEQ ID NO: 338704 - DNA, 448 bp, Homo sapiens
catcacctgactgtgatactggttaagtctccacctgcaggggcctcctagcttatcttcactctgtcctgccctactccccttctctccccttactccccagctccactgcagtctcccaggagaagaacatcagctgtctccaccaagggtaaggggagggatgtcttctgagataacaaagcccacttgaaaattccactaaccaggtggtctcaaaactttgttgcacattaaaaccacccagggggtttaaaataatcccaatacccaggtgataccccacacaacagaattataacacaatgtctagggatgggagccaggaatcagaactgatttccaaatgactccaatatgcagtaaagtttaggaaccaatacactaatcatttaggcaggagagaatctactgggaataggaattcaaatcaaagaatcaaaactgg

SEQ ID NO: 338705 - DNA, 147 bp, Homo sapiens
ccactcagaaaacgagaagtatatggaaacttcttcaacatggcaaaagccatatatgaaatacctagagctaacatcatactcaatggtgaaagactgaaagatttttctctaagatcagggtcaaaacaaagatgtgcactttac

SEQ ID NO: 338706 - DNA, 189 bp, Homo sapiens
tcagtggggaaggtatacagaaagagcctttagcttcactgtgatagtaaaaggcagaaggtaatagagtgcattcaaaggttgttgtaatgagcaaatgtgtttttatcagagtctaaaagaaatcctggacaaggatcaacccaatttatgtgagtgtaacactgacaaggcgaatgaccaagttat

SEQ ID NO: 338707 - DNA, 353 bp, Homo sapiens
caacactaccaggatcttatttgttaggagggccagaaaaacagagctcgtcaatgtgcaagtacacagctctctggctgcttccattggtctcaaagttgccttgtccagaggggccattgactatggtgcattttaaggaggagaagagacatccaggatgccaactggggtccaggagacacagccacctgtcccacgagctccagagtgagcctgacatagggcaagtggaagccactcctcagacttcaaattcctcttgcaagacaaaggctaacatagggaagagttgtaaaagacactgtttccagaaatcctgctgaccacccacaacggtcttggcttacaga

SEQ ID NO: 338708 - DNA, 367 bp, Homo sapiens
caggcatggagtttaccagaaacatcctacatgcacagcttcagcaggacagcatgtaggtggagtcagcagatatgcacccagcgagactgaccagaggccgtgtggctcatgtgcacactctggtgtgaggctgactgtatctgagtatagtttttctgcttactgggggtgggatttcagttgcttgatcttttcagagtctcagtttcctcatctataaaatagaactggcactaatatctaaccgtagggcctggcacagtgattggcacatagcagtggctcagtatacaccagccgctgttggtgtgcctggaggtcgccccattcacagcagctgggtcagtggctcacacactcacac

SEQ ID NO: 338709 - DNA, 163 bp, Homo sapiens
tacacgctaaggacctatgactagctatgaaaaagacagcaagtgttccactctcctagctcatgatcgtaactgccacatattccattaccacctacaaacttattttaatgttaacagaatgatgtctcagtagtcacatttgtcatgctgacacaattct

SEQ ID NO: 338710 - DNA, 823 bp, Homo sapiens
  misc_feature (822)..(822): n is a, c, g, or t
ggttctgtggaaaatctgatgtgccaagaagtgttccataccattctgagaactctggatacctgctcagacagctctgtttcagctaaacagtaacatctgggagggaagcttaatgtggaatcaaggatgaagtttaacacaggaatgagaagtagagcacatagctgctaagataaggctggagtctcagctcattgcaacctttgcctgccaggttcaagtgattctcctgcctcagcttcccaagtaactgggactacagaatgtaatcatcgcaaggccaggagatgcgtttggtctgtgctgcatctcaagcaggacaatggctggaacatagtagggtctccaaaaatgtttgttgaacgttgctgatggcggcatcctggagtaggaaaaagactgaagagtggaaaaagaaatcctgacatgaattctgggcaaaggcaagcagtagctgacttggaaaatgattacactatagatggcagcacaccactacctacgatccgatcaccagcctgggtttgtaagtcagagctgttggtcaggagatggcagctaatgagtaatcagtccaaactgaatggcaaattaatgtcttcattaagtgaacaaaccagcttcctccataaacaaggtcagagtatttataacccagtgtatttcataaaagcaaaaacgcatctccatttacataactttactatggagctcatgatttatctgcacaaagcatatgcaaaatctcacttgtataccgtctttaataaggacccatgccattctgatgtaattattaataaagtcacacttgataanc

SEQ ID NO: 338711 - DNA, 596 bp, Homo sapiens
  misc_feature (595)..(595): n is a, c, g, or t
caacaataattgggttaaggcttgcagctgggatattatacagcttgctttatctaggttttgttttgcttgcaaatcaatcaatacttacaatgattttaacaaggggaaagagccgtagttgtagaccttggagtgtatttttttttgtctagctttaaaaaaaattgttaatgttttgatactgtaactctttttagtagttgtggctttgcagaccttgctgcactttgatctttttctcgttccagctatagatggcagcacaccactacctacgatccgatcaccagcctgggtttgtaagtcagagctgttggtcaggagatggcagctaatgagtaatcagtccaaactgaatggcaaattaatgtcttcattaagtgaacaaaccagcttcctccataaacaaggtcagagtatttataacccagtgtatttcataaaagcaaaaacgcatctccatttacataactttactatggagctcatgatttatctgcacaaagcatatgcaaaatctcacttgtataccgtctttaataaggacccatgccattctgatgtaattattaataaagtcacacttgataanc

SEQ ID NO: 338712 - DNA, 202 bp, Homo sapiens
aattgtctcctctaaggaatggaacttagtgagaaaaatgtattttttatatttatgactcatatctttatctcaaacttgcctggattagccacagattggctgatctgaattcccaaataaaaagcattaaatgtttacctgatagcttaagaggtttaatcacgctccatgttaagtgtaacagtaattctgacattca

SEQ ID NO: 338713 - DNA, 688 bp, Homo sapiens
agccaagagctcttcttcagctgtattcttccatcagtaacatttaactttagggacttgacatctcatagcagtgaaactctttctcccaagcagctatttttttctgttctaaagtccgttccccccaaatagcgagatgttgactctaaagtgaaacaaggcacactatagaccttgaccttccccaggaatgactcaaaagcagtttggtgtttgggccccccttcaaacctttcttctctcagacaaccttactattaccagcaaggaagaggtcacccatttcctttctgctgtagcagcactgcccaaaatatggtccgtgaaatgctaggcccatgagctgctccagaatatgtggaaacaatacatgccaggcatttcccctgccatatatcatttgcatactggtacttaattggtcaattcagcaactctttgtggcttcctcttgcttcctgccttctagtgattcagctacagaactatttaaataacagcagataagtcaaccaattcatcctggggagactttccagttactgaccagtaaggtggtttcccccgaggtcagctgttcctgaaagctgtatgtacttccgtctttctcgctacagctgaaaccaatgtcatgagtcccctatccttgagatcagggcagttgattcagttcagcccaagagga

SEQ ID NO: 338714 - DNA, 270 bp, Homo sapiens
tccattctcctatatttatttgtggtttatctgttaagtatgtttatctattaagtatgttaaatgtttcctgcatgactaatggatattcaccaagttattccacagtggtgggatgtcagctttactttcttataattttctgtattccttgattgtcctacacatagtatgtattatctttggacttacaagaaaaattccataaaaccactttcatttcagaatgaaatccaaagttaagaccttttccctgggaaaggtgctgtg

SEQ ID NO: 338715 - DNA, 386 bp, Homo sapiens
tgggctctgttttctgtctcattgatctatatatctatctttataccagtaccactctatcttgattgctgctggctttatgataagttttgaaagcaggtaatgtaaaccctccaactttgttctttttcaaaatggtttgactattcttgaatctctatatttctatataagttttaaaatcagttttcaatttctaccaaagcaaaaattttttaaagacaaaaaaacccaagccttctgggattttgattgagagaatgtgctgcattttaaaacacattgggggccaggtgcggtgcttcatgcctgtaatcccagcactttgagaggctgaggtaggcggattacttgaggtcaggagtttgagaccagcctggccaaca

SEQ ID NO: 338716 - DNA, 368 bp, Homo sapiens
ccagtccttcctccctggccgtttgggaactgtccccacccctgaggccaatctggttctgaaccttctcttccttgccttgggcagctttgggggagggttagcaaaggcacagaacagaaaggccctgggctgtgcaggctccaaagaaaagggctgctctgggactggacctcctcccaggaccaaaaagttagggagggtgagagactactttagtttatcaaggaccctgaagagacaggaaccttcatctctcatccttcctccacaccccccaccaccacccctaaagaactcccagtctcggtcctttagtgagacttgctgacaagtttgacatctaagatgttttgtcccagaaagca

SEQ ID NO: 338717 - DNA, 777 bp, Homo sapiens
tatggtgatccaagggaaaatggaccgactcttaccctaagtccccagggttgtatgtcataacatctccatggaaatcctggaaatcaaagtgacaggacaactagtcacaaggtgtgatctctgcgatttgttggggactccaagtggaagtcagttaatgactgtctcaccgttgcagcccttccctttcactttggttctgtccctttgacccacttctttcctaaccttccctgactccatagatgaaaacttgaggagtgtgtgatgctgggagaggagtggatggagccttccccaggggatgtttgatgcttcctgagccagcagcctccctaatgcaaggcaccccattttggggagcgggttttctcaaaaatggaggaaaaaaaagggtggctgtctcgaatggcatcgacacagtggaaaatcatctgattccattgttgaacttcacactccaggcacttgctcatccctaagaaagaatagtacggcattcaagtttacatttacttctgttaatgaacgacacttatttggttccagaaaagcttagaggcagccagtgtttaggaagagatgtgttctttttaagattcgagtttgttgggtcctgtcccctcccccaagaaaactctcacattgttttgtaaaactttctctggaagaggtagagactaagaagttgacatcactttaagctaaccctcttttattcaagtcatagagcttgattgcctttctgaacatgcccctgaccaggacagggtg

SEQ ID NO: 338718 - DNA, 505 bp, Homo sapiens
tctatgaaaagttcagcgcaaatacaaccaagagtccttgaagaagagccagaagtcatctctctcccacttaattttatctagaaccttgctgtgcaaaccacggttcatgggccagcagcatcaatgtcatctgggagcttgttagaaatgcagactgtcagggccctatgtagcccagacccactaaattaaaatctgcatttcaacgaaatctccaggtctgtgttcaccttacagtgtgagaaacagtgacctagaaattactaaccgaatgcttcatgatgacagggatgctgtatatatgctgtttactgcagtatctccagtactgagaacagtacctggcccacagtggacacctgacataaatatctgtcaaataaatctacatgtgcacatttatggtactattttatactctgtaatataattatatgtataaaattattatatctgcacaatggtcttaagttccttacaggtgcaaatgttatcttatccc

SEQ ID NO: 338719 - DNA, 432 bp, Homo sapiens
agacggggtttcactatgttgggcaggcgggtctccaactcctgacctcaagtgatctgcccgcctcagcctcgcaaagttctgggattacaggcgtgagccactgctccgggcccatctccggcactttctatcttccaactgaaatgcggcatccattcatctcggggcccttcttgctgtgttgccctgcgggtggccagtgagagtctaaaatcccctgcaggggccctcgtctgcttttctttgcaggcctgtgtgtcgctgacgtggataaagcctccctgactgcagccaggccctgggctgggcatcttgtaggcttcccctccccattactgctcacagtgagggccatggacatacccacattacagatgaggacagtgaggctcagagagggtaactgcgtgcctaggttcacactgccat

SEQ ID NO: 338720 - DNA, 873 bp, Homo sapiens
tgtagttagaataaaacccagacttttttttttttttttgagatggagtcttgccctgtcgcccaggctggagtgcagtaagtgtcatttcggctcactgcaacctccgcctcccgggttcaagcggttctcctgcctcaaactcctgagtagctgggattaaaggcacctgccatcacgcccagctaatttttgtatttttagtagagatggggtttcaccatgatgtccaggctggtctcgaactcctgacctcgtgatctgcccacctcagcctcccaaagtgactgggattacaggtgtgatccactgcacccagcaaaacccagacttcttaccaacctctgaggcctgtgtgatctggtcctggctgcccctccatcattctgtctctcccttactccactcaagccgcatgggttccttgctgcttctggatcctggcataacttcttcctgcccaagggcctttgtagttgctcttttctctgcctgaaatgttctgcccctagtatttcctttctgaggcctacatttggttcagcttgctggtcacctcctctgagagactttccttgaccttcagtttaaagtagccatgctatttctaaatccctctccagtcttcttgtagtttgtcatagcaacagcctctacctggaattttctttttgtttgtgtacttgtttttgtctgtctcttctattagaatataagccccatgattatagggcgtttggtttgttcatcattgtatctccagtgtctgcagctgttctttgcaggtagtaaacattcagtgaatactttttgaataaattattaaacaaatgaacaaaacctaagacatgaaaaaactgaggcccagagaag

SEQ ID NO: 338721 - DNA, 627 bp, Homo sapiens
gtgtgacgttagcatgtcagtttgtactctttcaatctttttgatgtggcacttagggctatgaactttcctcttagcaccgcctttgctgtatcacagaggtttcgataggttgtgtcattattgtcattcagtttgaagaatttttaaatttccatcttgatttcgtttttgacccaatgctcattcaggagcaggttatttaatttccatgtatttgcatggttttgaaggttccttttggagttgatttctagttttattccactgtggtctgagagagtgcttgatatagtttcaattttcttaaatttatttaggcttgttttgtggcctatcatatgatctgtcttggagaaaatcccatgcgatgttgaataaaatgtgtattctgcggttgccagatgaaatgttctgtaaatatctgttaagttcatttgttccaaggtatagcttaaatccattctttctttgttgactttctgtcttgatgacttgtctagtgctatcagtggaatactgaagccccccactattactgtgttgctgtctatctcattcttaggtctattagtaattgtttcataaatttggaaactccagtattaggtgcatatatgtttagga

SEQ ID NO: 338722 - DNA, 432 bp, Homo sapiens
gggctgggccagagagaggaagcagaggtagcagaagggcctgcctgcagaatcctcccaacctcccccttcctttctcctcgttggcccagttaaatgtgtaaattactattccctccctataaaaatagcttaactccattacaaatatttgaataataggaggaaatctcaatcaaatgactgttagcatgttggtttcttcccatttattctgccttcttatgtgtatgtcttgggcagttcccatagagacatcacagcgtaatgacgattgtgccttctgctttttcacttaccatattcacctagtcagtgaatgtcagctgctgtactgggcactagggagcaatgaaaaataaaggatggttcctgccctcaggtagcttactgtccaggagaaattgaacagcagatccaattatgatatgg

SEQ ID NO: 338723 - DNA, 269 bp, Homo sapiens
ccctttccgcagtacctgcagcaaactcctcactgtttcccatcagcacactgtccactctcaagtgttggcaaggatgatgccttcccctgtggccccagccatggtagtgtctgatacacagcaggcaatgagtaagcaaataatttggcatctatcggacacactgaaaatactcattggatttttttttttttttttttcccgagagggagtcttgctctgtcgcccagagctggagtccagtggtgtgatctcagctcactaca

SEQ ID NO: 338724 - DNA, 367 bp, Homo sapiens
tatcagtgtggcctaatgtcttgctcccaagctgtccacgttaatccctggaaaaaaataccaccagataatctccttcaagtcatctctttcattacagcacaccgcttgttcctaaaagtaaaatgcagactttggtatctgttgttctttatagtctagccttggcttttttaagtgaccttaggagaaaaatatgaatggcatttgggccttgcctttgaggctcttagcatatagtcagagaaatgagacagacagcaccctgcatagtaataggtacagccatagaaatagtgccaggcatagagaacggatgattaattctcatgtgggcgcaaggacaggcatcactgagtagatgaca

SEQ ID NO: 338725 - DNA, 109 bp, Homo sapiens
attgactgtatgagctgcagggagtcctaaattagtagtaagttggttggttggtttaaaatacactagccttcttctttagaaaatttatatgccaactcataatact

SEQ ID NO: 338726 - DNA, 972 bp, Homo sapiens
agaattcggacaggggaccgctcggatttgggggcttcctcactcgtggctttccgaaggctgctgctcctgttcgacacagtggagaccatgggaaaagactatttgtcatcagaccttctagattctatgacaggcgttttttgaagttattgagattctacattgcattgactgggattccagtagcaattttcataactctggtgaatgtattcattggtcaagctgaactagcagaaattccagaaggctatgtcccagaacactgggaatattataagcatcccatatcaagatggattgcccgtaatttctatgatagtcctgaaaagatatatgaaagaacaatggccgtccttcagattgaagctgaaaaggctgaattacgggtaaaggagctggaagtgcgaaaattgatgcatgtgagaggagatggaccctggtattactatgagacaattgacaaggaacttattgatcattctccgaaagcaactcctgacaattaagcatttttttctccaaatacaaagtatattctctttattggaaaataaattaataaatatattctgtatttttgctctccgtgaaaaacaaaagagcctctgacattactgtctctcagtgttggttcagattgaggcttttgtttgaggagtttggcttccagtccccaaagaaggtttaaaatgtactaataaaaactggagaaataggaatttgtgaactcctaaaattgtagcaactttgaaaggttagtgttttatttacctgacaaatggaagttatagaagtctaataatgttaagcaccagtaattatagtattttgtacaaatgcctgtactgtagatgtctgtattattgaggggcaactcaggattttaagttccataaagtattgaaccaactctaaaatgttaactccttaataaacagattctcagtaaacaaattttaaagttta

SEQ ID NO: 338727 - DNA, 1157 bp, Homo sapiens
ggcggtgaggagaatagaaaacttgccctcacttaagatggccacatcctgcctttgtcctcattggtaaattggctctctcagcttccgtgacccgcctcccttcttcctcctgcccgtagtagccatggcggccatgagtttgttgcggcgggtttcggttactgcggtggcagctctgtctggccggccccttggcactcgcctcggatttgggggcttcctcactcgtggctttccgaaggctgctgctcctgttcgacacagtggagaccatgggaaaagactatttgtcatcagaccttctagattctatgacaggcgttttttgaagttattgagattctacattgcattgactgggattccagtagcaattttcataactctggtgaatgtattcattggtcaagctgaactagcagaaattccagaaggctatgtcccagaacactgggaatattataagcatcccatatcaagatggattgcccgtaatttctatgatagtcctgaaaagatatatgaaagaacaatggccgtccttcagattgaagctgaaaaggctgaattacgggtaaaggagctggaagtgcgaaaattgatgcatgtgagaggagatggaccctggtattactatgagacaattgacaaggaacttattgatcattctccgaaagcaactcctgacaattaagcatttttttctccaaatacaaagtatattctctttattggaaaataaattaataaatatattctgtatttttgctctccgtgaaaaacaaaagagcctctgacattactgtctctcagtgttggttcagattgaggcttttgtttgaggagtttggcttccagtccccaaagaaggtttaaaatgtactaataaaaactggagaaataggaatttgtgaactcctaaaattgtagcaactttgaaaggttagtgttttatttacctgacaaatggaagttatagaagtctaataatgttaagcaccagtaattatagtattttgtacaaatgcctgtactgtagatgtctgtattattgaggggcaactcaggattttaagttccataaagtattgaaccaactctaaaatgttaactccttaataaacagattctcagtaaacaaattttaaagttta

SEQ ID NO: 338728 - DNA, 929 bp, Homo sapiens
ggcggtgaggagaatagaaaacttgccctcacttaagatggccacatcctgcctttgtcctcattggtaaattggctctctcagcttccgtgacccgcctcccttcttcctcctgcccgtagtagccatggcggccatgagtttgttgcggcgggtttcggttactgcggtggcagctctgtctggccggccccttggcactcgcctcggatttgggggcttcctcactcgtggctttccgaaggctgctgctcctgttcgacacagtggagaccatgggaaaagactatttgtcatcagaccttctagattctatgacaggcgttttttgaagttattgagattctacattgcattgactgggattccagtagcaattttcataactctggtgaatgtattcattggtcaagctgaactagcagaaattccagaaggctatgtcccagaacactgggaatattataagggtttgtataggacattgacaattacatactgttacatgccttgtcaacgcactagttaatgtcttaattcagcaattatgatatagtcaggttttttgttttgttttttttgagacagcatctcgctctgttgcccaggctggagtgcagtggcgcgatttcagctcactgcaacttctgcctcccgcattcaagcgattctcatgcctcagtctcccacgtcgctgggatcacaggtgtgtgctgccactcctggctaatttttgtatttttagtagagacaggatttcaccatgttggccaggcttttctggaactcctggcctcaagtgatccacccacctcagcctcccaaagtcctgggattaaatgtgtgagccactgtgaccagccatgatagagttttatatttcattttttatatcaagcagatacatttttttgcatactttttataaa

SEQ ID NO: 338729 - DNA, 1087 bp, Homo sapiens
aagagtggtatcaacgcagagtgcccattacggccgggggtagtgcccgtagtagccatggcggccatgagtttgttgcggcgggtttcggttactgcggtggcagctctgtctggccggccccttggcactcgcctcggatttgggggcttcctcactcgtggctttccgaaggctgctgctcctgttcgacacagtggagaccatgggaaaagactatttgtcatcagaccttctagattctatgacaggcgttttttgaagttattgagattctacattgcattgactgggattccagtagcaattttcataactctggtgaatgtattcattggtcaagctgaactagcagaaattccagaaggctatgtcccagaacactgggaatattataagcatcccatatcaagatggattgcccgtaatttctatgatagtcctgaaaagatatatgaaagaacaatggccgtccttcagattgaagctgaaaaggctgaattacgggtaaaggagctggaagtgcgaaaattgatgcatgtgagaggagatggaccctggtattactatgagacaattgacaaggaacttattgatcattctccgaaagcaactcctgacaattaagcatttttttctccaaatacaaagtatattctctttattggaaaataaattaataaatatattctgtatttttgctctccgtgaaaaacaaaagagcctctgacattactgtctctcagtgttggttcagattgaggcttttgtttgaggagtttggcttccagtccccaaagaaggtttaaaatgtactaataaaaactggagaaataggaatttgtgaactcctaaaattgtagcaactttgaaaggttagtgttttatttacctgacaaatggaagttatagaagtctaataatgttaagcaccagtaattatagtattttgtacaaatgcctgtactgtagatgtctgtattattgaggggcaactcaggattttaagttccataaagtattgaaccaactctaaaatgttaactccttaataaacagattctcagtaaacaaattttaaagttta

SEQ ID NO: 338730 - DNA, 1411 bp, Homo sapiens
  misc_feature (1165)..(1165): n is a, c, g, or t
ggcggtgaggagaatagaaaacttgccctcacttaagatggccacatcctgcctttgtcctcattggtaaattggctctctcagcttccgtgacccgcctcccttcttcctcctgcccgtagtagccatggcggccatgagtttgttgcggcgggtttcggttactgcggtggcagctctgtctggccggccccttggcactcgcctcggatttgggggcttcctcactcgtggctttccgaaggctgctgctcctgttcgacacagtggagaccatgggaaaagactatttgtcatcagaccttctagattctatgacaggcgttttttgaagttattgagattctacattgcattgactgggattccagtagcaattttcataactctggtgaatgtattcattggtcaagctgaactagcagaaattccagaaggctatgtcccagaacactgggaatattataagcatcccatatcaagatggattgcccgtaatttctatgatagtcctgaaaagatatatgaaagaacaatggccgtccttcagattgaagctgaaaaggctgaattacgggtaaaggagctggaagtgcgaaaattgatgcatgtgagaggagatggaccctggtattactatgagacaattgacaaggaacttattgatcattctccgaaagcaactcctgacaattaagcatttttttctccaaatacaaagtatattctctttattggaaaataaattaataaatatattctgtatttttgctctccgtgaaaaacaaaagagcctctgacattactgtctctcagtgttggttcagattgaggcttttgtttgaggagtttggcttccagtccccaaagaaggtttaaaatgtactaataaaaactggagaaataggaatttgtgaactcctaaaattgtagcaactttgaaaggttagtgttttatttacctgacaaatggaagttatagaagtctaataatgttaagcaccagtaattatagtattttgtacaaatgcctgtactgtagatgtctgtattattgaggggcaactcaggattttaagttccataaagtattgaaccaactctaaaatgttaactccttaataaacagattctcagtaaacaaattttaaagtttaaaaaaaanaacaaaaaaaaaaaaaaaaaaaaaaaaaattttggtgggggccggccccaaaaaatttttaaaccacctgtttggggcggcgccccaagtagtgtaatgacactgccaacgcgtgtccagaggagacccggcagtaaatgggtggtccccaaaaaaccggcggaccgcggtttggaaaacacaggggctcgtggctcggcctacagcccgcaccccccgccgcgcgggaaacaagaggagaacagg

SEQ ID NO: 338731 - DNA, 1119 bp, Homo sapiens
ggcggtgaggagaatagaaaacttgccctcacttaagatggccacatcctgcctttgtcctcattggtaaattggctctctcagcttccgtgacccgcctcccttcttcctcctgcccgtagtagccatggcggccatgagtttgttgcggcgggtttcggttactgcggtggcagctctgtctggccggccccttggcactcgcctcggatttgggggcttcctcactcgtggctttccgaaggctgctgctcctgttcgacacagtggagaccatgggaaaagactatttgtcatcagaccttctagattctatgacaggcgttttttgaagttattgagattctacattgcattgactgggattccagtagcaattttcataactctggtgaatgtattcattggtcaagctgaactagcagaaattccagaaggctatgtcccagaacactgggaatattataagcatcccatatcaagatggattgcccgtaatttctatgatagtcctgaaaagatatatgaaagaacaatggccgtccttcagattgaagctgaaaaggctgaattacgggtaaaggagctggaagtgcgaaaattgatgcatgtgagaggagatggaccctggtattactatgagacaattgacaaggaacttattgatcattctccgaaagcaactcctgacaattaagcatttttttctccaaatacaaagtatattctctttattggaaaataaattaataaatatattctgtatttttgctctccgtgaaaaacaaaagagcctctgacattactgtctctcagtgttggttcagattgaggcttttgtttgaggagtttggcttccagtccccaaagaaggtttaaaatgtactaataaaaactggagaaataggaatttgtgaactcctaaaattgtagcaactttgaaaggttagtgttttatttacctgacaaatggaagttatagaagtctaataatgttaagcaccagtaattatagtattttgtacaaatgcctgtactgtagatgtcgttatgggggcccacggttagtcccaaaggttgcccccttaaagtatcctataaaattcctaccatttttct

SEQ ID NO: 338732 - DNA, 1132 bp, Homo sapiens
ggcggtgaggagaatagaaaacttgccctcacttaagatggccacatcctgcctttgtcctcattggtaaattggctctctcagcttccgtgacccgcctcccttcttcctcctgcccgtagtagccatggcggccatgagtttgttgcggcgggtttcggttactgcggtggcagctctgtctggccggccccttggcactcgcctcggatttgggggcttcctcactcgtggctttccgaaggctgctgctcctgttcgacacagtggagaccatgggaaaagactatttgtcatcagaccttctagattctatgacaggcgttttttgaagttattgagattctacattgcattgactgggattccagtagcaattttcataactctggtgaatgtattcattggtcaagctgaactagcagaaattccagaaggctatgtcccagaacactgggaatattataagcatcccatatcaagatggattgcccgtaatttctatgatagtcctgaaaagatatatgaaagaacaatggccgtccttcagattgaagctgaaaaggctgaattacgggtaaaggagctggaagtgcgaaaattgatgcatgtgagaggagatggaccctggtattactatgagacaattgacaaggaacttattgatcattctccgaaagcaactcctgacaattaagcatttttttctccaaatacaaagtatattctctttattggaaaataaattaataaatatattctgtatttttgctctccgtgaaaaacaaaagagcctctgacattactgtctctcagtgttggttcagattgaggcttttgtttgaggagtttaaaatgtactaataaaaactggagaaataggaatttgtgaactcctaaaattgtagcaactttgaaaggttagtgttttatttacctgacaaatggaagttatagaagtctaataatgttaagcaccagtaattatagtattttgtacaaatgcctgtactgtagatgtctgtattattgaggggcaactcaggattttaagttccataaagtattgaaccaactctaaaatgttaactccttaataaacagattctcagtaaacaaattttaaagttta

SEQ ID NO: 338733 - DNA, 1283 bp, Homo sapiens
ggcggtgaggagaatagaaaacttgccctcacttaagatggccacatcctgcctttgtcctcattggtaaattggctctctcagcttccgtgacccgcctcccttcttcctcctgcccgtagtagccatggcggccatgagtttgttgcggcgggtttcggttactgcggtggcagctctgtctggccggccccttggcactcgcctcggatttgggggcttcctcactcgtggctttccgaaggctgctgctcctgttcgacacagtggagaccatgggaaaagactatttgtcatcagaccttctagattctatgacaggcgttttttgaagttattgagattctacattgcattgactgggattccagtagcaattttcataactctggtgaatgtattcattggtcaagctgaactagcagaaattccagaaggctatgtcccagaacactgggaatattataagcatcccatatcaagatggattgcccgtaatttctatgatagtcctgaaaagatatatgaaagaacaatggccgtccttcagattgaagctgaaaaggctgaattacgggtaaaggagctggaagtgcgaaaattgatgcatgtgagaggagatggaccctggtattactatgagacaattgacaaggaacttattgatcattctccgaaagcaactcctgacaattaagcatttttttctccaaatacaaagtatattctctttattggaaaataaattaataaatatattctgtatttttgctctccgtgaaaaacaaaagagcctctgacattactgtctctcagtgttggttcagattgaggcttttgtttgaggagtttaaaatgtactaataaaaactggagaaataggaatttgtgaactcctaaaattgtagcaactttgaaaggttagtgttttatttacctgacaaatggaagttatagaagtctaataatgttaagcaccagtaattatagtattttgtacaaatgcctgtactgtagatgtctgtattattgaggggcaactcaggattttaagttccataaagtattgaaccaactctaaaatgttaactccttaataaacagattctcagtaaacaaattttaaagtttagaaagaaaaaagcaacaggagaaagaaacttttgggggggcctgggcctgtaaaaagtttttagacccattcgtggggccgggccccatatggtatgagactgggaaaaggtgcccaggaactggggccgaacacagggcgggtttcccaa

SEQ ID NO: 338734 - DNA, 818 bp, Homo sapiens
ggcggtgaggagaatagaaaacttgccctcacttaagatggccacatcctgcctttgtcctcattggtaaattggctctctcagcttccgtgacccgcctcccttcttcctcctgcccgtagtagccatggcggccatgagtttgttgcggcgggtttcggttactgcggtggcagctctgtctggccggccccttggcactcgcctcggatttgggggcttcctcactcgtggctttccgaaggctgctgctcctgttcgacacagtggagaccatgggaaaagactatttgtcatcagaccttctagattctatgacaggcgttttttgaagttattgagattctacattgcattgactgggattccagtagcaattttcataactctggtgaatgtattcattggtcaagctgaactagcagaaattccagaaggctatgtcccagaacactgggaatattataagcatcccatatcaagatggattgcccgtaatttctatgatagtcctgaaaagatatatgaaagaacaatggccgtccttcagattgaagctgaaaaggctgaattacgggtaaaggagctggaagtgcgaaaattgatgcatgtgagaggagatggaccctggtattactatgagacaattgacaaggaacttattgatcattctccgaaagcaactcctgacaattaagcatttttttctccaaatacaaagtatattctctttattggaaaataaattaataaatatattctgtatttttgctctccgtgaaaaacttggagaagttggcctccagtccccaagaagg

SEQ ID NO: 338735 - DNA, 931 bp, Homo sapiens
aagagtggtatcaacgcagagtgcccattacggccgggggtagtgcccgtagtagccatggcggccatgagtttgttgcggcgggtttcggttactgcggtggcagctctgtctggccggccccttggcactcgcctcggatttgggggcttcctcactcgtggctttccgaaggctgctggtcaagctgaactagcagaaattccagaaggctatgtcccagaacactgggaatattataagcatcccatatcaagatggattgcccgtaatttctatgatagtcctgaaaagatatatgaaagaacaatggccgtccttcagattgaagctgaaaaggctgaattacgggtaaaggagctggaagtgcgaaaattgatgcatgtgagaggagatggaccctggtattactatgagacaattgacaaggaacttattgatcattctccgaaagcaactcctgacaattaagcatttttttctccaaatacaaagtatattctctttattggaaaataaattaataaatatattctgtatttttgctctccgtgaaaaacaaaagagcctctgacattactgtctctcagtgttggttcagattgaggcttttgtttgaggagtttggcttccagtccccaaagaaggtttaaaatgtactaataaaaactggagaaataggaatttgtgaactcctaaaattgtagcaactttgaaaggttagtgttttatttacctgacaaatggaagttatagaagtctaataatgttaagcaccagtaattatagtattttgtacaaatgcctgtactgtagatgtctgtattattgaggggcaactcaggattttaagttccataaagtattgaaccaactctaaaatgttaactccttaataaacagattctcagtaaacaaattttaaagttta

SEQ ID NO: 338736 - DNA, 1053 bp, Homo sapiens
aagagtggtatcaacgcagagtgcccattacggccgggggtagtgcccgtagtagccatggcggccatgagtttgttgcggcgggtttcggttactgcggtggcagctctgtctggccggccccttggcactcgcctcggatttgggggcttcctcactcgtggctttccgaaggctgctgcccctggtaaccaccattctgctgtctttatgattttgactactctatttctcatagattctacattgcattgactgggattccagtagcaattttcataactctggtgaatgtattcattggtcaagctgaactagcagaaattccagaaggctatgtcccagaacactgggaatattataagcatcccatatcaagatggattgcccgtaatttctatgatagtcctgaaaagatatatgaaagaacaatggccgtccttcagattgaagctgaaaaggctgaattacgggtaaaggagctggaagtgcgaaaattgatgcatgtgagaggagatggaccctggtattactatgagacaattgacaaggaacttattgatcattctccgaaagcaactcctgacaattaagcatttttttctccaaatacaaagtatattctctttattggaaaataaattaataaatatattctgtatttttgctctccgtgaaaaacaaaagagcctctgacattactgtctctcagtgttggttcagattgaggcttttgtttgaggagtttggcttccagtccccaaagaaggtttaaaatgtactaataaaaactggagaaataggaatttgtgaactcctaaaattgtagcaactttgaaaggttagtgttttatttacctgacaaatggaagttatagaagtctaataatgttaagcaccagtaattatagtattttgtacaaatgcctgtactgtagatgtctgtattattgaggggcaactcaggattttaagttccataaagtattgaaccaactctaaaatgttaactccttaataaacagattctcagtaaacaaattttaaagttta

SEQ ID NO: 338737 - DNA, 1147 bp, Homo sapiens
aagagtggtatcaacgcagagtgcccattacggccgggggtagtgcccgtagtagccatggcggccatgagtttgttgcggcgggtttcggttactgcggtggcagctctgtctggccggccccttggcactcgcctcggatttgggggcttcctcactcgtggctttccgaaggctgctgctcctgttcgacacagtggagaccatgggaaaagactatttgtcatcagaccttctagattctatgacaggcgttttttgaagttattggctctatacgaacaaagtagaggcttagaaaatgggagattgtctggaccatctgccacgagattctacattgcattgactgggattccagtagcaattttcataactctggtgaatgtattcattggtcaagctgaactagcagaaattccagaaggctatgtcccagaacactgggaatattataagcatcccatatcaagatggattgcccgtaatttctatgatagtcctgaaaagatatatgaaagaacaatggccgtccttcagattgaagctgaaaaggctgaattacgggtaaaggagctggaagtgcgaaaattgatgcatgtgagaggagatggaccctggtattactatgagacaattgacaaggaacttattgatcattctccgaaagcaactcctgacaattaagcatttttttctccaaatacaaagtatattctctttattggaaaataaattaataaatatattctgtatttttgctctccgtgaaaaacaaaagagcctctgacattactgtctctcagtgttggttcagattgaggcttttgtttgaggagtttggcttccagtccccaaagaaggtttaaaatgtactaataaaaactggagaaataggaatttgtgaactcctaaaattgtagcaactttgaaaggttagtgttttatttacctgacaaatggaagttatagaagtctaataatgttaagcaccagtaattatagtattttgtacaaatgcctgtactgtagatgtctgtattattgaggggcaactcaggattttaagttccataaagtattgaaccaactctaaaatgttaactccttaataaacagattctcagtaaacaaattttaaagttta

SEQ ID NO: 338738 - DNA, 1112 bp, Homo sapiens
gatactagccatagcattcatgagtttgtcgcgcgccggtatggtgatagtgcatgtgggcatagtctgtctggtacggagcatcttggacatcgactaagtgatttggagtggctcacctacatatacagatagagcgttcccggagagggcatcggtagctctctgtgacagacaatacgtgaatgaccgattcgttgaagagtcgacttacttggtctctccatcgacactgcgtagtactacctatgaactcggctgttctaattgaacgtccactctgaacgatgtctacattgccattgtacttggtgatttccagtagccaattttcataactcctggtgaatggtattcatttggtcaagctgaactagcagaaattccagaaggctatgtcccagaacactgggaatattataagcatcccatatcaagatggattgcccgtaatttctatgatagtcctgaaaagatatatgaaagaacaatggccgtccttcagattgaagctgaaaaggctgaattacgggtaaaggagctggaagtgcgaaaattgatgcatgtgagaggagatggaccctggtattactatgagacaattgacaaggaacttattgatcattctccgaaagcaactcctgacaattaagcatttttttctccaaatacaaagtatattctctttattggaaaataaattaataaatatattctgtatttttgctctccgtgaaaaacaaaagagcctctgacattactgtctctcagtgttggttcagattgaggcttttgtttgaggagtttggcttccagtccccaaagaaggtttaaaatgtactaataaaaactggagaaataggaatttgtgaactcctaaaattgtagcaactttgaaaggttagtgttttatttacctgacaaatggaagttatagaagtctaataatgttaagcaccagtaattatagtattttgtacaaatgcctgtactgtagatgtctgtattattgaggggcaactcaggattttaagttccataaagtattgaaccaactctaaaatgttaactccttaataaacagattctcagtaaacaaattttaaagttta

SEQ ID NO: 338739 - DNA, 980 bp, Homo sapiens
aagagtggtatcaacgcagagtgcccattacggccgggggtagtgcccgtagtagccatggcggccatgagtttgttgcggcgggtttcggttactgcggtggcagctctgtctggccggccccttggcactcgcctcggatttgggggcttcctcactcgtggctttccgaaggctgctgctcctgttcgacacagtggagaccatgggaaaagactatttgtcatcagaccttctagattctatgacaggcgttttttgaagttattgagattctacattgcattgactgggattccagtagcaattttcataactctggtgaatgtattcattggtcaagctgaactagcagaaattccagaaggctatgtcccagaacactgggaatattataagggtaaaggagctggaagtgcgaaaattgatgcatgtgagaggagatggaccctggtattactatgagacaattgacaaggaacttattgatcattctccgaaagcaactcctgacaattaagcatttttttctccaaatacaaagtatattctctttattggaaaataaattaataaatatattctgtatttttgctctccgtgaaaaacaaaagagcctctgacattactgtctctcagtgttggttcagattgaggcttttgtttgaggagtttggcttccagtccccaaagaaggtttaaaatgtactaataaaaactggagaaataggaatttgtgaactcctaaaattgtagcaactttgaaaggttagtgttttatttacctgacaaatggaagttatagaagtctaataatgttaagcaccagtaattatagtattttgtacaaatgcctgtactgtagatgtctgtattattgaggggcaactcaggattttaagttccataaagtattgaaccaactctaaaatgttaactccttaataaacagattctcagtaaacaaattttaaagttta

SEQ ID NO: 338740 - DNA, 1097 bp, Homo sapiens
aagagtggtatcaacgcagagtgcccattacggccgggggtagtgcccgtagtagccatggcggccatgagtttgttgcggcgggtttcggttactgcggtggcagctctgtctggccggccccttggcactcgcctcggatttgggggcttcctcactcgtggctttccgaaggctgctgctcctgttcgacacagtggagaccatgggaaaagactatttgtcatcagaccttctagattctatgacaggcgttttttgaagttattgagattctacattgcattgactgggattccagtagcaattttcataactctggtgaatgtattcattggtcaagctgaactagcagaaattccagaaggctatgtcccagaacactgggaatattataagctcagactcacacactaaaaacaacaaacccccacccacacaccaaacaacacaaaaccacacccagaagagataagtggggggccgtcagattgaagctgaaaaggctgaattacgggtaaaggagctggaagtgcgaaaattgatgcatgtgagaggagatggaccctggtattactatgagacaattgacaaggaacttattgatcattctccgaaagcaactcctgacaattaagcatttttttctccaaatacaaagtatattctctttattggaaaataaattaataaatatattctgtatttttgctctccgtgaaaaacaaaagagcctctgacattactgtctctcagtgttggttcagattgaggcttttgtttgaggagtttggcttccagtccccaaagaaggtttaaaatgtactaataaaaactggagaaataggaatttgtgaactcctaaaattgtagcaactttgaaaggttagtgttttatttacctgacaaatggaagttatagaagtctaataatgttaagcaccagtaattatagtattttgtacaaatgcctgtactgtagatgtctgtattattgaggggcaactcaggattttaagttccataaagtattgaaccaactctaaaatgttaactccttaataaacagattctcagtaaacaaattttaaagttta

SEQ ID NO: 338741 - DNA, 918 bp, Homo sapiens
aagagtggtatcaacgcagagtgcccattacggccgggggtagtgcccgtagtagccatggcggccatgagtttgttgcggcgggtttcggttactgcggtggcagctctgtctggccggccccttggcactcgcctcggatttgggggcttcctcactcgtggctttccgaaggctgctgctcctgttcgacacagtggagaccatgggaaaagactatttgtcatcagaccttctagattctatgacaggcgttttttgaagttattgagattctacattgcattgactgggattccagtagcaattttcataactctggtgaatgtattcattgggtaaaggagctggaagtgcgaaaattgatgcatgtgagaggagatggaccctggtattactatgagacaattgacaaggaacttattgatcattctccgaaagcaactcctgacaattaagcatttttttctccaaatacaaagtatattctctttattggaaaataaattaataaatatattctgtatttttgctctccgtgaaaaacaaaagagcctctgacattactgtctctcagtgttggttcagattgaggcttttgtttgaggagtttggcttccagtccccaaagaaggtttaaaatgtactaataaaaactggagaaataggaatttgtgaactcctaaaattgtagcaactttgaaaggttagtgttttatttacctgacaaatggaagttatagaagtctaataatgttaagcaccagtaattatagtattttgtacaaatgcctgtactgtagatgtctgtattattgaggggcaactcaggattttaagttccataaagtattgaaccaactctaaaatgttaactccttaataaacagattctcagtaaacaaattttaaagttta

SEQ ID NO: 338742 - DNA, 956 bp, Homo sapiens
ttgagacagttttgctctgtctcccaggctgaggcaggaggatcacttgagcctgggaggtagaagttgcagtgagctgagactgcgccatagcactctgacctgggcaaccgtgcaagactccgtctcaaaaaaacaaaaacaacaaaaaaactgtttgatagctatctatataagcaacataataaaagtcaaaaataagtcccaaattttggttatagatatataccagatgtatgcctacataagggtctgtggaggagcattatactttacataaaagcagactccagtgattgtcctttatggaaatggctcattaaatttataattggaagtgctggaatctcaatattgctgttccatttgttacagggtaaaggagctggaagtgcgaaaattgatgcatgtgagaggagatggaccctggtattactatgagacaattgacaaggaacttattgatcattctccgaaagcaactcctgacaattaagcatttttttctccaaatacaaagtatattctctttattggaaaataaattaataaatatattctgtatttttgctctccgtgaaaaacaaaagagcctctgacattactgtctctcagtgttggttcagattgaggcttttgtttgaggagtttggcttccagtccccaaagaaggtttaaaatgtactaataaaaactggagaaataggaatttgtgaactcctaaaattgtagcaactttgaaaggttagtgttttatttacctgacaaatggaagttatagaagtctaataatgttaagcaccagtaattatagtattttgtacaaatgcctgtactgtagatgtctgtattattgaggggcaactcaggattttaagttccataaagtattgaaccaactctaaaatgttaactccttaataaacagattctcagtaaacaaattttaaagttta

SEQ ID NO: 338743 - DNA, 895 bp, Homo sapiens
aagagtggtatcaacgcagagtgcccattacggccgggggtagtgcccgtagtagccatggcggccatgagtttgttgcggcgggtttcggttactgcggtggcagctctgtctggccggccccttggcactcgcctcggatttgggggcttcctcactcgtggctttccgaaggctgctgctcctgttcgacacagtggagaccatgggaaaagactatttgtcatcagaccttctagattctatgacaggcgttttttgaagttattgagattctacattgcattgactgggattccagtagcaattttcataactctggtgaatgtattcattgcatcccatatcaagatggattgcccgtaatttctatgatagtcctgaaaagatatatgaaagaacaatggccgtccttcagattgaagctgaaaaggctgaattacgggtaaaggagctggaagtgcgaaaattgatgcatgtgagaggagatggaccctggtattactatgagacaattgacaaggaacttattgatcattctccgaaagcaactcctgacaattaagcatttttttctccaaatacaaagtatattctctttattggaaaataaattaataaatatattctgtatttttgctctccgtgaaaaacaaaagagcctctgacattactgtctctcagtgttggttcagattgaggcttttgtttgaggagtggttcagtccccaagaagttacatgtgctattaaactgcggaaatgattggggaggcctaaatgtacacttgaagttatgtttttaccgacaagggtaaattaaaaggtggccgcatgattggaagcgtggaacgctttagggaccggaagacaatggaccatggttaaacgcgaag

SEQ ID NO: 338744 - DNA, 900 bp, Homo sapiens
aagagtggtatcaacgcagagtgcccattacggccgggggtagtgcccgtagtagccatggcggccatgagtttgttgcggcgggtttcggttactgcggtggcagctctgtctggccggccccttggcactcgcctcggatttgggggcttcctcactcgtggctttccgaaggctgctgctcctgttcgacacagtggagaccatgggaaaagactatttgtcatcagaccttctagattctatgacaggcgttttttgaagttattgagattctacattgcattgactgggattccagtagcaattttcataactctggtgaatgtattcattggtcaagctgaactagcagaaattccagaaggctatgtcccagaacactgggaatattataagcatcccatatcaagatggattgcccgtaatttctatgatagtcctgaaaagatatatgaaagaacaatggccgtccttcagattgaagctgaaaaggctgaattacgggtaaaggagctggaagtgcgaaaattgatgcatgtgagaggagatggaccctggtattactatgagacaattgacaaggaacttattgatcattctccgaaagcaactcctgacaattaagcatttttttctccaaatacaaagtatattctctttattggaaaataaattaataaatatattctgtatttttgctctccgtgaaaaacaaaagagcctctgacattactgtctctcagtgttggttcagattgaggcttttgtttgaggagtttggcttccagtccccaaagaaggtttaaaatgtactaataaaaactggagaaataggaatttgtgaactcctaaaattgtagcaactttgaaaggggggcgtacgacagggtaactcag

SEQ ID NO: 338745 - DNA, 1106 bp, Homo sapiens
aagagtggtatcaacgcagagtgcccattacggccgggggtagtgcccgtagtagccatggcggccatgagtttgttgcggcgggtttcggttactgcggtggcagctctgtctggccggccccttggcactcgcctcggatttgggggcttcctcactcgtggctttccgaaggctgctgggtaattcaatattcccagctcctgttcgacacagtggagaccatgggaaaagactatttgtcatcagaccttctagattctatgacaggcgttttttgaagttattgagattctacattgcattgactgggattccagtagcaattttcataactctggtgaatgtattcattggtcaagctgaactagcagaaattccagaaggctatgtcccagaacactgggaatattataagcatcccatatcaagatggattgcccgtaatttctatgatagtcctgaaaagatatatgaaagaacaatggccgtccttcagattgaagctgaaaaggctgaattacgggtaaaggagctggaagtgcgaaaattgatgcatgtgagaggagatggaccctggtattactatgagacaattgacaaggaacttattgatcattctccgaaagcaactcctgacaattaagcatttttttctccaaatacaaagtatattctctttattggaaaataaattaataaatatattctgtatttttgctctccgtgaaaaacaaaagagcctctgacattactgtctctcagtgttggttcagattgaggcttttgtttgaggagtttggcttccagtccccaaagaaggtttaaaatgtactaataaaaactggagaaataggaatttgtgaactcctaaaattgtagcaactttgaaaggttagtgttttatttacctgacaaatggaagttatagaagtctaataatgttaagcaccagtaattatagtattttgtacaaatgcctgtactgtagatgtctgtattattgaggggcaactcaggattttaagttccataaagtattgaaccaactctaaaatgttaactccttaataaacagattctcagtaaacaaattttaaagttta

SEQ ID NO: 338746 - DNA, 998 bp, Homo sapiens
aagagtggtatcaacgcagagtgcccattacggccgggggtagtgcccgtagtagccatggcggccatgagtttgttgcggcgggtttcggttactgcggtggcagctctgtctggccggccccttggcactcgcctcggatttgggggcttcctcactcgtggctttccgaaggctgctgagattctacattgcattgactgggattccagtagcaattttcataactctggtgaatgtattcattggtcaagctgaactagcagaaattccagaaggctatgtcccagaacactgggaatattataagcatcccatatcaagatggattgcccgtaatttctatgatagtcctgaaaagatatatgaaagaacaatggccgtccttcagattgaagctgaaaaggctgaattacgggtaaaggagctggaagtgcgaaaattgatgcatgtgagaggagatggaccctggtattactatgagacaattgacaaggaacttattgatcattctccgaaagcaactcctgacaattaagcatttttttctccaaatacaaagtatattctctttattggaaaataaattaataaatatattctgtatttttgctctccgtgaaaaacaaaagagcctctgacattactgtctctcagtgttggttcagattgaggcttttgtttgaggagtttggcttccagtccccaaagaaggtttaaaatgtactaataaaaactggagaaataggaatttgtgaactcctaaaattgtagcaactttgaaaggttagtgttttatttacctgacaaatggaagttatagaagtctaataatgttaagcaccagtaattatagtattttgtacaaatgcctgtactgtagatgtctgtattattgaggggcaactcaggattttaagttccataaagtattgaaccaactctaaaatgttaactccttaataaacagattctcagtaaacaaattttaaagttta

SEQ ID NO: 338747 - DNA, 986 bp, Homo sapiens
aagagtggtatcaacgcagagtgcccattacggccgggggtagtgcccgtagtagccatggcggccatgagtttgttgcggcgggtttcggttactgcggtggcagctctgtctggccggccccttggcactcgcctcggatttgggggcttcctcactcgtggctttccgaaggctgctgcccctggtaaccaccattctgctgtctttatgattttgactactctatttctcatgtcaagctgaactagcagaaattccagaaggctatgtcccagaacactgggaatattataagcatcccatatcaagatggattgcccgtaatttctatgatagtcctgaaaagatatatgaaagaacaatggccgtccttcagattgaagctgaaaaggctgaattacgggtaaaggagctggaagtgcgaaaattgatgcatgtgagaggagatggaccctggtattactatgagacaattgacaaggaacttattgatcattctccgaaagcaactcctgacaattaagcatttttttctccaaatacaaagtatattctctttattggaaaataaattaataaatatattctgtatttttgctctccgtgaaaaacaaaagagcctctgacattactgtctctcagtgttggttcagattgaggcttttgtttgaggagtttggcttccagtccccaaagaaggtttaaaatgtactaataaaaactggagaaataggaatttgtgaactcctaaaattgtagcaactttgaaaggttagtgttttatttacctgacaaatggaagttatagaagtctaataatgttaagcaccagtaattatagtattttgtacaaatgcctgtactgtagatgtctgtattattgaggggcaactcaggattttaagttccataaagtattgaaccaactctaaaatgttaactccttaataaacagattctcagtaaacaaattttaaagttta

SEQ ID NO: 338748 - DNA, 1044 bp, Homo sapiens
aagagtggtatcaacgcagagtgcccattacggccgggggtagtgcccgtagtagccatggcggccatgagtttgttgcggcgggtttcggttactgcggtggcagctctgtctggccggccccttggcactcgcctcggatttgggggcttcctcactcgtggctttccgaaggctgctgggtaattcaatattcccagctcctgttcgacacagtggagaccatgggaaaagactatttgtcatcagaccttctagattctatgacaggcgttttttgaagttattgagattctacattgcattgactgggattccagtagcaattttcataactctggtgaatgtattcattgcatcccatatcaagatggattgcccgtaatttctatgatagtcctgaaaagatatatgaaagaacaatggccgtccttcagattgaagctgaaaaggctgaattacgggtaaaggagctggaagtgcgaaaattgatgcatgtgagaggagatggaccctggtattactatgagacaattgacaaggaacttattgatcattctccgaaagcaactcctgacaattaagcatttttttctccaaatacaaagtatattctctttattggaaaataaattaataaatatattctgtatttttgctctccgtgaaaaacaaaagagcctctgacattactgtctctcagtgttggttcagattgaggcttttgtttgaggagtttggcttccagtccccaaagaaggtttaaaatgtactaataaaaactggagaaataggaatttgtgaactcctaaaattgtagcaactttgaaaggttagtgttttatttacctgacaaatggaagttatagaagtctaataatgttaagcaccagtaattatagtattttgtacaaatgcctgtactgtagatgtctgtattattgaggggcaactcaggattttaagttccataaagtattgaaccaactctaaaatgttaactccttaataaacagattctcagtaaacaaattttaaagttta

SEQ ID NO: 338749 - DNA, 959 bp, Homo sapiens
aagagtggtatcaacgcagagtgcccattacggccgggggtagtgcccgtagtagccatggcggccatgagtttgttgcggcgggtttcggttactgcggtggcagctctgtctggccggccccttggcactcgcctcggatttgggggcttcctcactcgtggctttccgaaggctgctggtcaagctgaactagcagaaattccagaaggctatgtcccagaacactgggaatattataagcatcccatatcaagatggattgcccgtaatttctatgatagtcctgaaaagatatatgaaagaacaatggccgtccttcagattgaagctgaaaaggctgaattacgggtaaaggagctggaagtgcgaaaattgatgcatgtgagaggagatggaccctggtattactatgagacaattgacaaggaacttattgatcattctccgaaagcaactcctgacaattaagcatttttttctccaaatacaaagtatattctctttattggaaaataaattaataaatatattctgtatttttgctctccgtgaaaaacaaaagagcctctgacattactgtctctcagtgttggttcagattgaggcttttgtttgaggagtttggcttccagtccccaaagaaggtttaaaatgtactaataaaaactggagaaataggaatttgtgaactcctaaaattgtagcaactttgaaaggttagtgttttatttacctgacaaatggaagttatagaagtctaataatgttaagcaccagtaattatagtattttgtacaaatgcctgtactgtagatgtctgtattattgaggggcaactcaggattttaagttccataaagtcctaagttggacacatctaagtatcttttaaaggttggcaaaaaaaaaaaattggcgcgaataactgcggggaagaggttggcgttgtcaagggg

SEQ ID NO: 338750 - DNA, 1703 bp, Homo sapiens
  misc_feature (1165)..(1165): n is a, c, g, or t
ggcggtgaggagaatagaaaacttgccctcacttaagatggccacatcctgcctttgtcctcattggtaaattggctctctcagcttccgtgacccgcctcccttcttcctcctgcccgtagtagccatggcggccatgagtttgttgcggcgggtttcggttactgcggtggcagctctgtctggccggccccttggcactcgcctcggatttgggggcttcctcactcgtggctttccgaaggctgctgctcctgttcgacacagtggagaccatgggaaaagactatttgtcatcagaccttctagattctatgacaggcgttttttgaagttattgagattctacattgcattgactgggattccagtagcaattttcataactctggtgaatgtattcattggtcaagctgaactagcagaaattccagaaggctatgtcccagaacactgggaatattataagcatcccatatcaagatggattgcccgtaatttctatgatagtcctgaaaagatatatgaaagaacaatggccgtccttcagattgaagctgaaaaggctgaattacgggtaaaggagctggaagtgcgaaaattgatgcatgtgagaggagatggaccctggtattactatgagacaattgacaaggaacttattgatcattctccgaaagcaactcctgacaattaagcatttttttctccaaatacaaagtatattctctttattggaaaataaattaataaatatattctgtatttttgctctccgtgaaaaacaaaagagcctctgacattactgtctctcagtgttggttcagattgaggcttttgtttgaggagtttggcttccagtccccaaagaaggtttaaaatgtactaataaaaactggagaaataggaatttgtgaactcctaaaattgtagcaactttgaaaggttagtgttttatttacctgacaaatggaagttatagaagtctaataatgttaagcaccagtaattatagtattttgtacaaatgcctgtactgtagatgtctgtattattgaggggcaactcaggattttaagttccataaagtattgaaccaactctaaaatgttaactccttaataaacagattctcagtaaacaaattttaaagtttaaaaaaaanaacaaaaaaaaaaaaaaaaaaaaaaaacaaaaacaaacacaaacaaaaaaaaaaaaaagagggggggcgcgagaggacaaaaagatatatcccactaaagaggcgagcgccgagacaaaaacgaagacacacacaaaattcgtaagaacaaaaagagagagccacaaaagagggcgaccaaataaaagacaaagacgaaggacgagaatacaaacaaaagagaaacacgagagaaaaaaatgatacaaaaaaaaggagaaatacggagaagaagaaacaccaaaacaacaccgcggcgggagacagcaaaaagatagagaggcaaagaaacgctacaccaaaaagaaagataatcaacagacgaccagatgccagaaacaaatacacacacaaatctaaaagacatgaagaagaaagaggacagacacaaaacaagcgcacaataatagtacacgcagaaggaaaaaaacggcccaccaacacgaacaccacacagaagccaaaaaaatcaacacacgcgggcacccacacccgccca

SEQ ID NO: 338751 - DNA, 1222 bp, Homo sapiens
ggcggtgaggagaatagaaaacttgccctcacttaagatggccacatcctgcctttgtcctcattggtaaattggctctctcagcttccgtgacccgcctcccttcttcctcctgcccgtagtagccatggcggccatgagtttgttgcggcgggtttcggttactgcggtggcagctctgtctggccggccccttggcactcgcctcggatttgggggcttcctcactcgtggctttccgaaggctgctgctcctgttcgacacagtggagaccatgggaaaagactatttgtcatcagaccttctagattctatgacaggcgttttttgaagttattgagattctacattgcattgactgggattccagtagcaattttcataactctggtgaatgtattcattggtcaagctgaactagcagaaattccagaaggctatgtcccagaacactgggaatattataagcatcccatatcaagatggattgcccgtaatttctatgatagtcctgaaaagatatatgaaagaacaatggccgtccttcagattgaagctgaaaaggctgaattacgggtaaaggagctggaagtgcgaaaattgatgcatgtgagaggagatggaccctggtattactatgagacaattgacaaggaacttattgatcattctccgaaagcaactcctgacaattaagcatttttttctccaaatacaaagtatattctctttattggaaaataaattaataaatatattctgtatttttgctctccgtgaaaaacaaaagagcctctgacattactgtctctcagtgttggttcagattgaggcttttgtttgaggagtttggcttccagtccccaaagaaggtttaaaatgtactaataaaaactggagaaataggaatttgtgaactcctaaaattgtagcaactttgaaaggttagtgttttatttacctgacaaatggaagttatagaagtctaataatgttaagcaccagtaattatagtattttgtacaaatgcctgtactgtagatgtctgtattattgaggggcaactcaggattttaagttccataaagtattgaaccaactctaaaatgttaactccttaataaacagattctcagtaaacaaattttaaagtttaaaaaaaaaaaacaaaaaatgaaaacaataaaagcaacatagtacacagaaaagaaacaaaagagg

SEQ ID NO: 338752 - DNA, 365 bp, Homo sapiens
gtgaggagacaaattgaagtgcttctctatattaaactgtttccccaaagggttacaccctcagggaaagggcaaattagaagtcctactccattccattcccaacaccaggggacttaaggaaatttgtctattgctgagcagattaaggaggaatgtccctgagaagttgtaactaaaaggtggtccttgagccaatgtgcagactgaatttacatcacttaaagaagggtacattcaaacacttcagatattgaatcattagacatatatggtaaaacaattatgcatactatatttaaagatagaaataaaaagtgggataaaatttaagaggaaaaaaattaacaaaatgtgccttagca

SEQ ID NO: 338753 - DNA, 1049 bp, Homo sapiens
ttaaacactgtgaggctttagaggagttggagaactgaaaactcttcttgttgaatatttcataaatataatttatttaacttgaaccttcatctgaaaagcttccctttcccccttaagaaatttttaccaagaagagtaagctaaagctattgcatatttttggcagagaaaagtagattaacttttggtatatttagtgaccaccatgagcacatctgaacgcagcagcagctaacatgtgagagggcatgatctgcccaattattacaagattgcatttcctcatgccatctctaatcagaggaaaaggtttaaattagcagcaatctcaagaatgtgaatcaagtctgggcagaacttttgtatctgactcagtgtaagactgtttagttcttgtttcaagtagtctgcacaacaaataccatgcctgcaaatatgcaacaaacactcccaggaagaatatgtttgtttcttccatggattcaggtaataggaactatgaacagatcttataaaattttgtgggcatttatgtgttgctattaaaatggaataaagattttctatttctgggggcaatgtagatacaaaattagaaagtcagacaggtagatatgtttggcctttaaataaagtttagctttaaactcctaatcttattgaggtacttaaaaatatgtaagaatcaaaatattttactgacagtggaaccatggttaagtcaagagctttagggaaaagagtatatgtatatgaatatgcctaaaagtaaatagggataatggattcaagtttttgtttcatatgatatctaagaatcagatttcttggagtagaatcccatgagtgaattcatctttccacaaactatgtcatcaggctcatttttcaaaaccaatgtgcacaacacctggtcaaacttctgcgtcaactacattccgtgtcaataaaatgtttgctttgccaagggagactctgagaaagtgaccaatatgtagcaactgagaagtcatttaaaggacatcagaaaatgactgagcctcgac

SEQ ID NO: 338754 - DNA, 350 bp, Homo sapiens
gcgacactcacgctcacacagactgcgacctaccacgccacaagagcattaagatagcctttcttcaagctcactaattctttcttctacttgatcaagtctgctattaagatacttgaaggagatgtggactgaggtacccaagagtggcaatggcaagaagaagtccacgccaatcaagaaagaccactacatctccaagacgttcctgcgtgaggacagagacatcgtggttctgaggaactcgctcatcgccagcaagaaggggccatccctccgtcgacggaactcattcccctgtcctatggaggccactgccattggtgttgagaataataaagcactgcatt

SEQ ID NO: 338755 - DNA, 622 bp, Homo sapiens
  misc_feature (603)..(603): n is a, c, g, or t
ttcgaactagaaaacacaaagtgtaaattacacacaggcaaataaaacgttttctgcctcttaggcagaaattgagtttcataaatatccattgtgtcatagatacaaatttaagacattgtgaggtctacttgttaaccttaccgtgttatgatctctactttcaagagcttcaaaggagatactttattgctactagcagaataatttaatggaactcagattcctcaaagataatgatggaatagggtaaggggctattctgtttggaaaaaactacaagagatacaaaaacttgtctatacttcgtggtagtatacagtgttactcagagtaccagtctgtgatgagataagatgcttgagggccagaatataaatcgacacacagattccttcatagagaaaaatgttgctaccggccccccgctcaaatctgagctaaaacaatgtgcctagtgacatcgttgacgtatattctgactcagcctcttcacctcacactgataaaataggtaaccacactatgagtagcactaatacaaataatactcttagcatcaagaggatattgattaatattgtctgtgaactcgacccagtntaagatcctgtaatcaccc

SEQ ID NO: 338756 - DNA, 283 bp, Homo sapiens
gggcagactggcttcccaaatctgagctgggggttggggagacacagaaggtagggtctggataaatgggagtttctcttgattctaagaaactggaagggacctggcaaccagcctctgggagagtctgggggagtcctaggcaagtcttgacagaaacgattgtcaggcaggatatgtctgagaccaacccccggggaaactgagagagatgaaagaaggctgagtacctcagatgaggaattataaggagtagcctgagctgtaacatcccccatgttgg

SEQ ID NO: 338757 - DNA, 322 bp, Homo sapiens
cctttgtgtcaaaccttagataattcaagagacataacaaacgtgatcatgttacatgcttcctcacagatttcagtgtctcccatttcttctattagtttaaaaaacatagtccaccatcacagggccctgtttaagccagctcctcctctgtggctctgcctttgtggtcaacctgtgcaaaactttgaggctgtgacatcacttagtcagtctccaacatttggaacaagagaactttttctaacaatttgatcccaattcctattttaagcttgagcattatgaaggctgtatctgtatataatattgaacacttcaa

SEQ ID NO: 338758 - DNA, 199 bp, Homo sapiens
ctttatttaccctacgcagctggaagaagagtagataccctccacaggaccaagtatacaagctcagttctgccacaacaattctatccatctctgcttctccttcctcaaaggtccagcactgtgtaatcctaaagcaggcacacccattcttatttcctctcaatccacgatgttctgtcagagaatcgctcagttg

SEQ ID NO: 338759 - DNA, 611 bp, Homo sapiens
acgtgataataaatcagccaaaaaaataattaaaaatatcgagcccgcttagatttgcattacaagaaagactgacggattttaaaccacacctaaaagaaaagaagtggtggcgaataaattgtagactctcccaactcatcatgtagatatattatacaagcaaattactagcagtcttggagaatattcaatgaatgcctttacatgtttgtaagcaaatataaattgtatcagaatgttgagagattgtaattagtggaaataactagctgaaataaaattttaaataacgtgtttctaagaagttaaacaataggcctaagacttttttcacacattattaacatctaggtagaagtgctgttaattagtagaataatgttcaaagaaacaataataggatgatacaagaaaatccttgctaatgaacactggctttgatttatgtttttgctcagagttttccaagaaatatgcacatttataagaaattgtggatcacatcattatattttcttgaattatttgtgtcctctgttatctctctgacaattccatgaagcttgaaatttactttaaagaaaaataatattacattttgtattaac

SEQ ID NO: 338760 - DNA, 616 bp, Homo sapiens
  misc_feature (38)..(38): n is a, c, g, or t
atatttacgctcagttcacacataatatacaccccgcngcgggcctggtaggaactcatttgcattacaagaaagactgacggattttaaaccacacctaaaagaaaagaagtggtggcgaataaattgtagactctcccaactcatcatgtagatatattatacaagcaaattactagcagtcttggagaatattcaatgaatgcctttacatgtttgtaagcaaatataaattgtatcagaatgttgagagattgtaattagtggaaataactagctgaaataaaattttaaataacgtgtttctaagaagttaaacaataggcctaagacttttttcacacattattaacatctaggtagaagtgctgttaattagtagaataatgttcaaagaaacaataataggatgatacaagaaaatccttgctaatgaacactggctttgatttatgtttttgctcagagttttccaagaaatatgcacatttataagaaattgtggatcacatcattatattttcttgaattatttgtgtcctctgttatctctctgacaattccatgaagcttgaaatttactttaaagaaaaataatattacattttgtattaac

SEQ ID NO: 338761 - DNA, 572 bp, Homo sapiens
ttctttcatcccacttttcaatccgactataccccccgaggacggggctgttatttgcattacaagaaagactgacggattttaaaccacacctaaaagaaaagaagtggtggcgaataaattgtagactctcccaactcatcatgtagatatattatacaagcaaattactagcagtcttggagaatattcaatgaatgcctttacatgtttgtaagcaaatataaattgtatcagaatgttgagagattgtaattagtggaaataactagctgaaataaaattttaaataacgtgtttctaagaagttaaacaataggcctaagacttttttcacacattattaacatctaggtagaagtgctgttaattagtagaataatgttcaaagaaacaataataggatgatacaagaaaatccttgctaatgaacactggctttgatttatgtttttgctcagagttttccaagaaatatgcacatttataagaaattgtggatcacatcattatattttccaaaaaataaaccaaaatgggtctctttggcctcaacggtggaacttatgtgc

SEQ ID NO: 338762 - DNA, 554 bp, Homo sapiens
acgtgataataaatcagccaaaaaaataattaaaaatatcgagcccgcttagatttgcattacaagaaagactgacggattttaaaccacacctaaaagaaaagaagtggtggcgaataaattgtagactctcccaactcatcatgtagatatattatacaagcaaattactagcagtcttggagaatattcaatgaatgcctttacatgtttgtaagcaaatataaattgtatcagaatgttgagagattgtaattagtggaaataactagctgaaataaaattttaaataacgtgtttctaagaagttaaacaataggcctaagacttttttcacacattattaacatctaggtagaagtgctgttaattagtagaataatgttcaaagaaacaataataggatgatacaagaaaatccttgctaatgaacactggctttgatttatgtttttgctcagagttttccaagaaatatgcacatttataagaaattgtggatcacatcattatattttataaagaaaaaaaaaatggccctcgttggcctcatt

SEQ ID NO: 338763 - DNA, 640 bp, Homo sapiens
  misc_feature (52)..(52): n is a, c, g, or t
  misc_feature (75)..(75): n is a, c, g, or t
gttacccatttcctccaccgaaatgtacagtaaggccacgacgccccacccntttacgtagcagacctcacaagnaaaaatatttgcattacaagaaagactgacggattttaaaccacacctaaaagaaaagaagtggtggcgaataaattgtagactctcccaactcatcatgtagatatattatacaagcaaattactagcagtcttggagaatattcaatgaatgcctttacatgtttgtaagcaaatataaattgtatcagaatgttgagagattgtaattagtggaaataactagctgaaataaaattttaaataacgtgtttctaagaagttaaacaataggcctaagacttttttcacacattattaacatctaggtagaagtgctgttaattagtagaataatgttcaaagaaacaataataggatgatacaagaaaatccttgctaatgaacactggctttgatttatgtttttgctcagagttttccaagaaatatgcacatttataagaaattgtggatcacatcattatattttcttgaattatttgtgtcctctgttatctctctgacaattccatgaagcttgaaatttactttaaagaaaaataatattacattttgtattaac

SEQ ID NO: 338764 - DNA, 623 bp, Homo sapiens
  misc_feature (53)..(53): n is a, c, g, or t
tatatatataacaacaaaaattaattataataaaaggggggaggaccctttangagtgacttacatttgcattacaagaaagactgacggattttaaaccacacctaaaagaaaagaagtggtggcgaataaattgtagactctcccaactcatcatgtagatatattatacaagcaaattactagcagtcttggagaatattcaatgaatgcctttacatgtttgtaagcaaatataaattgtatcagaatgttgagagattgtaattagtggaaataactagctgaaataaaattttaaataacgtgtttctaagaagttaaacaataggcctaagacttttttcacacattattaacatctaggtagaagtgctgttaattagtagaataatgttcaaagaaacaataataggatgatacaagaaaatccttgctaatgaacactggctttgatttatgtttttgctcagagttttccaagaaatatgcacatttataagaaattgtggatcacatcattatattttcttgaattatttgtgtcctctgttatctctctgacaattccatgaagcttgaaatttactttaaagaaaaataatattacattttgtattaac

SEQ ID NO: 338765 - DNA, 611 bp, Homo sapiens
ttctttcatcccacttttcaatccgactataccccccgaggacggggctgttatttgcattacaagaaagactgacggattttaaaccacacctaaaagaaaagaagtggtggcgaataaattgtagactctcccaactcatcatgtagatatattatacaagcaaattactagcagtcttggagaatattcaatgaatgcctttacatgtttgtaagcaaatataaattgtatcagaatgttgagagattgtaattagtggaaataactagctgaaataaaattttaaataacgtgtttctaagaagttaaacaataggcctaagacttttttcacacattattaacatctaggtagaagtgctgttaattagtagaataatgttcaaagaaacaataataggatgatacaagaaaatccttgctaatgaacactggctttgatttatgtttttgctcagagttttccaagaaatatgcacatttataagaaattgtggatcacatcattatattttcttgaattatttgtgtcctctgttatctctctgacaattccatgaagcttgaaatttactttaaagaaaaataatattacattttgtattaac

SEQ ID NO: 338766 - DNA, 613 bp, Homo sapiens
gatattaatttatctcgccgtgcacacaggcggccgcggctcactatgacttacatttgcattacaagaaagactgacggattttaaaccacacctaaaagaaaagaagtggtggcgaataaattgtagactctcccaactcatcatgtagatatattatacaagcaaattactagcagtcttggagaatattcaatgaatgcctttacatgtttgtaagcaaatataaattgtatcagaatgttgagagattgtaattagtggaaataactagctgaaataaaattttaaataacgtgtttctaagaagttaaacaataggcctaagacttttttcacacattattaacatctaggtagaagtgctgttaattagtagaataatgttcaaagaaacaataataggatgatacaagaaaatccttgctaatgaacactggctttgatttatgtttttgctcagagttttccaagaaatatgcacatttataagaaattgtggatcacatcattatattttcttgaattatttgtgtcctctgttatctctctgacaattccatgaagcttgaaatttactttaaagaaaaataatattacattttgtattaac

SEQ ID NO: 338767 - DNA, 614 bp, Homo sapiens
taaatacataccccaccacaacatcacccctttgggggccttactatgactacagatttgcattacaagaaagactgacggattttaaaccacacctaaaagaaaagaagtggtggcgaataaattgtagactctcccaactcatcatgtagatatattatacaagcaaattactagcagtcttggagaatattcaatgaatgcctttacatgtttgtaagcaaatataaattgtatcagaatgttgagagattgtaattagtggaaataactagctgaaataaaattttaaataacgtgtttctaagaagttaaacaataggcctaagacttttttcacacattattaacatctaggtagaagtgctgttaattagtagaataatgttcaaagaaacaataataggatgatacaagaaaatccttgctaatgaacactggctttgatttatgtttttgctcagagttttccaagaaatatgcacatttataagaaattgtggatcacatcattatattttcttgaattatttgtgtcctctgttatctctctgacaattccatgaagcttgaaatttactttaaagaaaaataatattacattttgtattaac

SEQ ID NO: 338768 - DNA, 614 bp, Homo sapiens
  misc_feature (55)..(55): n is a, c, g, or t
aatataaaacagggttgtattgattcttagggcggccctcagtattgcctacagnatttgcattacaagaaagactgacggattttaaaccacacctaaaagaaaagaagtggtggcgaataaattgtagactctcccaactcatcatgtagatatattatacaagcaaattactagcagtcttggagaatattcaatgaatgcctttacatgtttgtaagcaaatataaattgtatcagaatgttgagagattgtaattagtggaaataactagctgaaataaaattttaaataacgtgtttctaagaagttaaacaataggcctaagacttttttcacacattattaacatctaggtagaagtgctgttaattagtagaataatgttcaaagaaacaataataggatgatacaagaaaatccttgctaatgaacactggctttgatttatgtttttgctcagagttttccaagaaatatgcacatttataagaaattgtggatcacatcattatattttcttgaattatttgtgtcctctgttatctctctgacaattccatgaagcttgaaatttactttaaagaaaaataatattacattttgtattaac

SEQ ID NO: 338769 - DNA, 613 bp, Homo sapiens
  misc_feature (53)..(53): n is a, c, g, or t
ccacgctccttactacttctctacgccgccgaggggtcccttgttatgactancatttgcattacaagaaagactgacggattttaaaccacacctaaaagaaaagaagtggtggcgaataaattgtagactctcccaactcatcatgtagatatattatacaagcaaattactagcagtcttggagaatattcaatgaatgcctttacatgtttgtaagcaaatataaattgtatcagaatgttgagagattgtaattagtggaaataactagctgaaataaaattttaaataacgtgtttctaagaagttaaacaataggcctaagacttttttcacacattattaacatctaggtagaagtgctgttaattagtagaataatgttcaaagaaacaataataggatgatacaagaaaatccttgctaatgaacactggctttgatttatgtttttgctcagagttttccaagaaatatgcacatttataagaaattgtggatcacatcattatattttcttgaattatttgtgtcctctgttatctctctgacaattccatgaagcttgaaatttactttaaagaaaaataatattacattttgtattaac

SEQ ID NO: 338770 - DNA, 340 bp, Homo sapiens
acgtgataataaatcagccaaaaaaataattaaaaatatcgagcccgcttagatttgcattacaagaaagactgacggattttaaaccacacctaaaagaaaagaagtggtggcgaataaattgtagactctcccaactcatcatgtagatatattatacaagcaaattactagcagtcttggagaatattcaatgaatgcctttacatgtttgtaagcaaatataaattgtatcagaatgttgagagattgtaattagtggaaataactagctgattttttttttaaagggcgtggttctaagaaaagaagaaaaagaaaatggcctcggggggcctga

SEQ ID NO: 338771 - DNA, 572 bp, Homo sapiens
gtttagatgctcgttacaagagttactgacggtagtatgagaacatacctagaatagaaaaaaaagggatggaaaggtgggttgaattactctcccaactcatcatgtagatatattatacaagcaaattactagcagtcttggagaatattcaatgaatgcctttacatgtttgtaagcaaatataaattgtatcagaatgttgagagattgtaattagtggaaataactagctgaaataaaattttaaataacgtgtttctaagaagttaaacaataggcctaagacttttttcacacattattaacatctaggtagaagtgctgttaattagtagaataatgttcaaagaaacaataataggatgatacaagaaaatccttgctaatgaacactggctttgatttatgtttttgctcagagttttccaagaaatatgcacatttataagaaattgtggatcacatcattatattttcttgaattatttgtgtcctctgttatctctctgacaattccatgaagcttgaaatttactttaaagaaaaataatattacattttgtattaac

SEQ ID NO: 338772 - DNA, 276 bp, Homo sapiens
tgtctttgcagatttgcaatttgcattacaagaaagactgacggattttaaaccacacctaaaagaaaagaagtggtggcgaataaattgtagactctcccaactcatcatgtagatatattatacaagcaaattactagcagtcttggagaatattcaatgaatgcctttacatgtttgtaagcaaatataaattgtatcagaatgttgagagattgtaattagtggaaataactagctgaaataaaattttaaataacgtgtttctaagaagtt

SEQ ID NO: 338773 - DNA, 157 bp, Homo sapiens
gaatctctcatgtcacatggccaactccagaaattttcactcctctgctttattatttttgagaaacattagtctcatgctacagcattatatggcactattgatgggagttcttacacaactagtacattttttttttaaagtttgtggcttgagt

SEQ ID NO: 338774 - DNA, 207 bp, Homo sapiens
tcattgaatattcactgcaacttgattaggtttaggttttattatcacatttcacaaagagagaggggcctaggaaggaatttgatatgaatgtgaagcatgggagatttcagcagggagagaactgcagtgaagtgtggaaggaggggaagtgacaggaggtgttttctcaccaagggaatagtgtgaacaaatatggggattaca

SEQ ID NO: 338775 - DNA, 256 bp, Homo sapiens
actgtaccccgacttcacactattagcatcaggcaagttaaagctaattcctgtacaggagtccttaaacgtgtcataggaacactcacatttattttccacaacaaggaatgattacaagtgaggggagaaaaaaaggctttttattatatacaacgtcttgcctttataaaaaccaacagaccctctttttttattttttaactaagatttcaacatcctttgatctagttaaagctcagaattcatacctcct

SEQ ID NO: 338776 - DNA, 407 bp, Homo sapiens
ctgcctggtgtgggtgatgcagaacagctcttggctaataaatgtgccgcgtttcccagacaggagacgacgtggcctagtgcataaataagacaagcctttttaaaaaagaaatctgtatttaaggatgtgtttggctgtgttcttctcctcccgtaaaggtcacccagatagatttttccttctttagcattgcaggctgcgaagaactgggcatttctattctccctccatccagtgaacctggcggactaaattagattctgaaattgagtgtgcagtagagtcggtgagttaccgtaatgggagggtactgcttctcaccttgcaaggagcgaggtcatgataatatgaagcgaagtggattaaaaataaaaccaaaggtatttatttatgacctgctcaga

SEQ ID NO: 338777 - DNA, 567 bp, Homo sapiens
tattttctacttcctagatgagtttatttcctggaaggatgacatcaggttgtagttttagtcagattcctcctcacccatccccttcttctccaaacctaaacggttgaatggaaactgtcttatcagaccaacccactccctcgtggccccctaaaaggacgagctcggacctcactcccagaaaaggtacaaaatgatcacatttgctgacacgtcttccgcaaaactgccttagtgcctctgtccactctcctcgcaggagatgaatggtccacttggtcctcatttatcactcaaggcttggctaagatctgtctcgtttagttcttcccttccccactagaaagtctgcactccgacattaattcttctgtgatgacagctaattcagacttaacaggccacacttactcaagaggcaggaagattctctgtcccccaaataaataaataaaaacaggacttcatggcttatgatagtgaggctaattatcaacactgatcggtgctacttggtggctctgtttaaaacccaaattgattttttcccccttttctctggga

SEQ ID NO: 338778 - DNA, 434 bp, Homo sapiens
catgtttttctattttattcttcttcctaacacttattaataactgcattagacagaaaacaaacaggtaaacaaatgagctacatgatgacaaagtgatcaaagttatgaagaaaataaagcaaggcttaaaggagggggctactttggatgggaggtcaaaaagggcctctttgagaaggtgacttctaagatgaattttaggtgatgaaaatggcaccaatcatgcaatgattttagggaattccaagcagccagaacagctttgcagagtcccaaagtgggacggaaattcacttattagaggaacagaaagaaggtttgatttgctagaatccagtgagcaagggggtcctggagcacgagtcagatcatttgaacattatggtccattgaaaagagtgtatattttagtgtaagtgcatattggaact

SEQ ID NO: 338779 - DNA, 288 bp, Homo sapiens
agagctgtgcttcctgtagctgcttgcatcagccgccctgaagtggcctgggttcctggggctcaaaatctttaattagccaaactcaacacctgccgaggtgtgcctgatgaattctcaccaggtgatgttcgcgtgggcgggcgttacctgctgcgccatccctgtggctcctggcccctcctggcccttatctcccaggaaaacaaacaggtcccagggcaatggcctgggccattgatttactgcccgggttcacactacatccatgacagatgccattctgat

SEQ ID NO: 338780 - DNA, 464 bp, Homo sapiens
ttcttttttttttcgtttgggacagagtcttgctctgtcgcccagtctggagtgcagtggcacaatcttggctcactgcaacctccacctcctcctgggttcaagcgattctcctgcctcagcctcctgagtaactgggattacaggcgcccgccaccacacccagctaatttttgtatttttagtagagacagggtttcactatgttggccaagctggtcttgaactcctgacctcaagtgtttcacctgcctcggcttcccaaagtgctgggattacaagcgtgagtcaccatgcctggcacatatttaggtttttaatccacctggaattcattttatgtgtagtatgaacttgtatctaattattattttttaattcaatgaataaccagttgctccaatatcatgtttagaatagtccattctttccctattgacctgcaataccacttgtatgtacta

SEQ ID NO: 338781 - DNA, 415 bp, Homo sapiens
ctggggtgtagtggtgcagttacaactcattgcagccttgacttccaggctcaggtgatcctctcacctcagccttctgagcagatgggactaccagcacataccatcatgctaggctaattttttgtatttttagtggagatgaggtttcactatgttggccaagctggtcttgaactcctgacctcaagtgtttcacctgcctcggcttcccaaagtgctgggattacaagcgtgagtcaccatgcctggcacatatttaggtttttaatccacctggaattcattttatgtgtagtatgaacttgtatctaattattattttttaattcaatgaataaccagttgctccaatatcatgtttagaatagtccattctttccctattgacctgcaataccacttgtatgtacta

SEQ ID NO: 338782 - DNA, 542 bp, Homo sapiens
gggtggggtctggtaatggaaacaagttcatggaccacctttgagaagtgctagattaaaacctcatcattaccaagagggagattttgtatggatagaagagagaactttctaatagtcatatctatattctgatccaactattgctgcgtgccagcatttggattggtgctttcatatacacaatttcatctcctcttggtggctctttgagtaggtgcctgcagtttgcagatgaggataccaggctctgataccttcaagagagtattaatctctccctcctttcttctaacttggggccctgcacctgcttcatttggcattccattatgtgcttatggtgagtctccctatggaaattgtgcaccttgatgttgttgaaggcctttgagtgttgtctggcgaaggtcacagattgtatctgttgagctgaaatgccccatctgctgtgaacaggcttgagcgatgaggaactgagggacctatggagcagctgccccatgtgtcactaaggtgacatcaatcctggtatctggagc

SEQ ID NO: 338783 - DNA, 382 bp, Homo sapiens
tgtgtgtgtgtgtgtactataaattaaatacgattatatatgatcagcaaaataacagtgctctcacttctgggtagaaagaaggattacggataatttttcctctttttatttgtgtgtgttttccagattttccacagtgaacaaatactcttttatactaaaaactgtttgtttgcttgtttgcttgtagagacaggtttctcatgttgccagggatggtctcaaactcctgggctcaagcgatccgcccgtctccgcttctcaaagtgctgggattaaaggtgtgagccactgcaacgggccaagactttatattctacataaagtctctcatatttgtggctcatgtttggaatttttacttttttttttttttttt

SEQ ID NO: 338784 - DNA, 378 bp, Homo sapiens
attcaacaaacatttattcagtgcctattatgtggtatggatagatagatgaagttgacacagtgcctgtcatcaaaaaattcacagattagtggggaggccagaccatgtgttagggttgaacatttgtgaacagagatggatggtagctaggcaagggtggaggtgatgtctgagctgagtttaaaggatgattaggacgtggttagcttttcatgggtattctggtgcagaggaaagggtgggaaagtctgagaaattagaacacgtggagaatatgaggaagcagctggtagtttggagttcttggtgcttaaaggttgagacagggaggtacaaaagaagtgaccagaatgatagatggtgggggcctttagt

SEQ ID NO: 338785 - DNA, 638 bp, Homo sapiens
tggctcacgcctgtaatctcagcaccttgggaggtggaggtgggtggatcacttgaggtcaggggttcgagaccaacctggccaacatggtaaaacccggtctctactaaaaatactaaaaaaaaattagcccaacgtggtggcaggcacctgtaatcccagctacttgggaggctgaggcaggagaattgcttgaacccaggaggtggaggttgcagtgagccaaggttgcaccactgcactccagcctgagtgacagagcgagactccatctcaaataaacaaatacaataaatagaggacttagttaaatgacttctaaagtcccttttaactcttaagtctgtggttttataaatctgtagctatagtttatgtgatgctggggctttgaactggaatgtaacccccaattatagctacattttctaggactacatctaagtgaaatcaggagcagtctatattgtgtttttctaaaatacttaagttcttctttttttcatgttaagtttgagattttggtagaataggtggaactatcctacaggtaatttgaagtttgggtctaaaactgaggagagaaatcaggactagggatagatttggggtatccatgcaggtgactgttaaatgtg

SEQ ID NO: 338786 - DNA, 326 bp, Homo sapiens
cagctcccgtggcagcggcacagctccccacagcgtggacctacacagtcgagcaccatttacaacagggggccgaagctcggccgtgttgtggcagtgcttggtttggctgtgggccctgccactctcacagtgcacacagaaccggaaccaggtctcacctctgtgagcctcaaaactccctcagcctacatggggcccaacccgtggctactgcatacctcgaatgagtgaataagcaccaggagtgtggcccagtgactggtgcagttagctcccaacaatgcaggtgccgtggatgggctttttttctttttttttttttt

SEQ ID NO: 338787 - DNA, 724 bp, Homo sapiens
tctgctcacgctcagagctgctgcctgcatgcttgtctggaagccgacatcaagcccatttggccagaaatacctctagaggtggaactggcccagaagactggacccccagagtgctatggaatgtctatgggaacaaaggaggacctaatggacagcagagaaacacgatgcccagctctggtctggtaggaggtccctagaagaatggcttcaagtgagacttagaaatacacccagtcggttagcctttgggaagcgtaatgagtactacctccagtagtttttgaagaacagctacaatgcttcacgtggaccaatgcatatcccatggcgaggaagacacatatgtgattcattttcttcaggatgaagtttaaggatttacctaaggacccaagaatgttgtgagatgaggaaacagaagctgggatatgtgagtaaacatttccaaggtcctgcagctaatcaatggttgacaacttctttcctctgcctatgttgccatccatgtcatggtttgtgtcaagactctaggagaagtctaccatcagcaccacagctactgtgcacaaatccagaatgccagactgaagtcagaaggaaagagatgatgcagctcattgtgatgctgagataccacgccagtgcctgattacccccgatctgagcctagggctggactgggaaccctcgttcaaactccggctgtcctgtgtatcgg

SEQ ID NO: 338788 - DNA, 733 bp, Homo sapiens
caaatttaaattctatgattcttcaaattgaacaatgatctggacttgaaataattttaaaggcaacaaatgtccctgctgtactggactatgttttactgtctgtagaccctgaagctcaatatgaactacagaatacccaaacttgtattaatgtaaatcaagtgttgaggtttttaaaagaacactggagggaaaaactgaccagtaaaaataaaacatttcggtgtgagttcttcctttaggaagaggattggcaaatacttgaatttggcctttgtcccagagctcttatctagcagttggtaatcggaggtcttttactgtaatgcttcaattgctgataccgtatgtgcctactagggaatttctcttcaatgccattgaaacgatgccttgtgtcaagaagaaggcagactgggccttgcgctggattggggacaaagaggctacctatggtgaacgtgttgtagcctttgctgcagtggaaggcattttcttttccggttcttttgcgtcgatattctggctcaagaaacgaggactgatgcctggcctcacattttctaatgaacttattagcagagatgaggtgagtctaagtcaaataatagggtgacctaaaccccaaacacaactcgggcatgctcttgtgttcactgacggggacctgagatgctagatggcatatatccacatttaatgtgtgagttcaaccatacacatacttgac

SEQ ID NO: 338789 - DNA, 2092 bp, Homo sapiens
cccgtcccagccgtcctgtcctggctgctcgctctgcttcgctgcgccgccactatgctctccctccgtgtcccgctcgcgcccatcacggacccgcagcagctgcagctctcgccgctgaaggggctcagcttggtcgacaaggagaacacgccgccggccctgagcgggacccgcgtcctggccagcaagaccgcgaggaggatcttccaggagcccacggagccgaaaactaaagcagctgcccccggcgtggaggatgagccgctgctgagagaaaacccccgccgctttgtcatcttccccatcgagtaccatgatatctggcagatgtataagaaggcagaggcttccttttggaccgccgaggaggtggacctctccaaggacattcagcactgggaatccctgaaacccgaggagagatattttatatcccatgttctggctttctttgcagcaagcgatggcatagtaaatgaaaacttggtggagcgatttagccaagaagttcagattacagaagcccgctgtttctatggcttccaaattgccatggaaaacatacattctgaaatgtatagtcttcttattgacacttacataaaagatcccaaagaaagggaatttctcttcaatgccattgaaacgatgccttgtgtcaagaagaaggcagactgggccttgcgctggattggggacaaagaggctacctatggtgaacgtgttgtagcctttgctgcagtggaaggcattttcttttccggttcttttgcgtcgatattctggctcaagaaacgaggactgatgcctggcctcacattttctaatgaacttattagcagagatgagggtttacactgtgattttgcttgcctgatgttcaaacacctggtacacaaaccatcggaggagagagtaagagaaataattatcaatgctgttcggatagaacaggagttcctcactgaggccttgcctgtgaagctcattgggatgaattgcactctaatgaagcaatacattgagtttgtggcagacagacttatgctggaactgggttttagcaaggttttcagagtagagaacccatttgactttatggagaatatttcactggaaggaaagactaacttctttgagaagagagtaggcgagtatcagaggatgggagtgatgtcaagtccaacagagaattcttttaccttggatgctgacttctaaatgaactgaagatgtgcccttacttggctgattttttttttccatctcataagaaaaatcagctgaagtgttaccaactagccacaccatgaattgtccgtaatgttcattaacagcatctttaaaactgtgtagctacctcacaaccagtcctgtctgtttatagtgctggtagtatcaccttttgccagaaggcctggctggctgtgacttaccatagcagtgacaatggcagtcttggctttaaagtgaggggtgaccctttagtgagcttagcacagcgggattaaacagtcctttaaccagcacagccagttaaaagatgcagcctcactgcttcaacgcagattttaatgtttacttaaatataaacctggcactttacaaacaaataaacattgtttgtactcacaaggcgataatagcttgatttatttggtttctacaccaaatacattctcctgaccactaatgggagccaattcacaattcactaagtgactaaagtaagttaaacttgtgtagactaagcatgtaatttttaagttttattttaatgaattaaaatatttgttaacaactttaaagtcagtcctgtgtatacctagatattagtcagttggtgccagatagaagacaggttgtgtttttatcctgcggcttgggtagtgtcctgggattctctgccccctctgagtagagtgttgtgggataaaggaatctctcagggcaaggagcttcttaagttaaatcactagaaatttaggcgtgatctgggccttcatatgtgtgagaagccgttccattttatttctcactatattttccccaatttctagttgataagaaaaaactattgaagagtttt

SEQ ID NO: 338790 - DNA, 2033 bp, Homo sapiens
ggggttcgggcgtgcgctcctctgctgcgacccacggagtgcgacgggacagccacgttttcacatcgggccccgtgaaatttttccaatggaaaggacttggtccagaaaaacgttagtttcatatggttcgcccggtacttaaatgttttattttctcccccaaccgaaaactaaagcagctgcccccggcgtggaggatgagccgctgctgagagaaaacccccgccgctttgtcatcttccccatcgagtaccatgatatctggcagatgtataagaaggcagaggcttccttttggaccgccgaggaggtggacctctccaaggacattcagcactgggaatccctgaaacccgaggagagatattttatatcccatgttctggctttctttgcagcaagcgatggcatagtaaatgaaaacttggtggagcgatttagccaagaagttcagattacagaagcccgctgtttctatggcttccaaattgccatggaaaacatacattctgaaatgtatagtcttcttattgacacttacataaaagatcccaaagaaagggaatttctcttcaatgccattgaaacgatgccttgtgtcaagaagaaggcagactgggccttgcgctggattggggacaaagaggctacctatggtgaacgtgttgtagcctttgctgcagtggaaggcattttcttttccggttcttttgcgtcgatattctggctcaagaaacgaggactgatgcctggcctcacattttctaatgaacttattagcagagatgagggtttacactgtgattttgcttgcctgatgttcaaacacctggtacacaaaccatcggaggagagagtaagagaaataattatcaatgctgttcggatagaacaggagttcctcactgaggccttgcctgtgaagctcattgggatgaattgcactctaatgaagcaatacattgagtttgtggcagacagacttatgctggaactgggttttagcaaggttttcagagtagagaacccatttgactttatggagaatatttcactggaaggaaagactaacttctttgagaagagagtaggcgagtatcagaggatgggagtgatgtcaagtccaacagagaattcttttaccttggatgctgacttctaaatgaactgaagatgtgcccttacttggctgattttttttttccatctcataagaaaaatcagctgaagtgttaccaactagccacaccatgaattgtccgtaatgttcattaacagcatctttaaaactgtgtagctacctcacaaccagtcctgtctgtttatagtgctggtagtatcaccttttgccagaaggcctggctggctgtgacttaccatagcagtgacaatggcagtcttggctttaaagtgaggggtgaccctttagtgagcttagcacagcgggattaaacagtcctttaaccagcacagccagttaaaagatgcagcctcactgcttcaacgcagattttaatgtttacttaaatataaacctggcactttacaaacaaataaacattgtttgtactcacaaggcgataatagcttgatttatttggtttctacaccaaatacattctcctgaccactaatgggagccaattcacaattcactaagtgactaaagtaagttaaacttgtgtagactaagcatgtaatttttaagttttattttaatgaattaaaatatttgttaacaactttaaagtcagtcctgtgtatacctagatattagtcagttggtgccagatagaagacaggttgtgtttttatcctgcggcttgggtagtgtcctgggattctctgccccctctgagtagagtgttgtgggataaaggaatctctcagggcaaggagcttcttaagttaaatcactagaaatttaggcgtgatctgggccttcatatgtgtgagaagccgttccattttatttctcactatattttccccaatttctagttgataagaaaaaactattgaagagtttt

SEQ ID NO: 338791 - DNA, 1963 bp, Homo sapiens
cccgtcccagccgtcctgtcctggctgctcgctctgcttcgctgcgccgccactatgctctccctccgtgtcccgctcgcgcccatcacggacccgcagcagctgcagctctcgccgctgaaggggctcagcttggtcgacaaggagaacacgccgccggccctgagcgggacccgcgtcctggccagcaagaccgcgaggaggatcttccaggagcccacggagccgaaaactaaagcagctgcccccggcgtggaggatgagccgctgctgagagaaaacccccgccgctttgtcatcttccccatcgagtaccatgatatctggcagatgtataagaaggcagaggcttccttttggaccgccgaggaggtggacctctccaaggacattcagcactgggaatccctgaaacccgaggagagatattttatatcccatgttctggctttctttgcagcaagcgatggcatagtaaatgaaaacttggtggagcgatttagccaagaagttcagattacagaagcccgctgtttctatggcttccaaattgccatggaaaacatacattctgaaatgtatagtcttcttattgacacttacataaaagatcccaaagaaagggaatttctcttcaatgccattgaaacgatgccttgtgtcaagaagaaggcagactgggccttgcgctggattggggacaaagaggctacctatggtgaacgtgttgtagcctttgctgcagtggaaggcattttcttttccggttcttttgcgtcgatattctggctcaagaaacgaggactgatgcctggcctcacattttctaatgaacttattagcagagatgagggtttacactgtgattttgcttgcctgatgttcaaacacctggtacacaaaccatcggaggagagagtaagagaaataattatcaatgctgttcggatagaacaggagttcctcactgaggccttgcctgtgaagctcattgggatgaattgcactctaatgaagcaatacattgagtttgtggcagacagacttatgctggaactgggttttagcaaggttttcagagtagagaacccatttgactttatggagaatatttcactggaaggaaagactaacttctttgagaagagagtaggcgagtatcagaggatgggagtgatgtcaagtccaacagagaattcttttaccttggatgctgacttctaaatgaactgaagatgtgcccttacttggctgattttttttttccatctcataagaaaaatcagctgaagtgttaccaactagccacaccatgaattgtccgtaatgttctaatgggagccaattcacaattcactaagtgactaaagtaagttaaacttgtgtagactaagcatgtaatttttaagttttattttaatgaattaaaatatttgttaacaacaaaaaaaaaaaaaaaacaaaaaaaaaaaaaaaaaaaaagaagcaagaaagagcaacacaaaagcaatccacaaaggaaggaggcaccgcaggtgcggagccagagtaccccagctagtgcggaggcaacaccagggggccccatagcgcgagcattcatctgctacagagggatctgaggccacgtagcgggcgccagcttctccaccacgcatagacggccagcggaacacgaacgggcaacaccacgaggagatcacgacagaaagagagaccccctcagccaagcgtgcacccctgcgcgacagagagcggggcacaaacctccaggcagccgcgaaaccaccaacgcgcctacgaggcgcccactagcccaacacgttcaaacgcgcccacggcgagaaaaagcagtgcggacaacgagcaggatggcggacacgctgagcgcaacgggcatgcacacgagacatgaggaccaacggcacgaggaagcacgaaaccagaagacagcctagaggtg

SEQ ID NO: 338792 - DNA, 2169 bp, Homo sapiens
agggggacactagcagtacgagctggtggatcggccgagtgcctcccttccgcgtctgtctggctgctcgctctgcttcgctgcgccgccactatgctctccctccgtgtcccgctcgcgcccatcacggacccgcagcagctgcagctctcgccgctgaaggggctcagcttggtcgacaaggagaacacgccgccggccctgagcgggacccgcgtcctggccagcaagaccgcgaggaggatcttccaggagcccacggagccgaaaactaaagcagctgcccccggcgtggaggatgagccgctgctgagagaaaacccccgccgctttgtcatcttccccatcgagtaccatgatatctggcagatgtataagaaggcagaggcttccttttttttgggacccggccccggaagggggacaggggttggggaaacccccttcctttcccaaaagggaacatttcaagcacttgggaatccctgaaacccgaggagagatattttatatcccatgttctggctttctttgcagcaagcgatggcatagtaaatgaaaacttggtggagcgatttagccaagaagttcagattacagaagcccgctgtttctatggcttccaaattgccatggaaaacatacattctgaaatgtatagtcttcttattgacacttacataaaagatcccaaagaaagggaatttctcttcaatgccattgaaacgatgccttgtgtcaagaagaaggcagactgggccttgcgctggattggggacaaagaggctacctatggtgaacgtgttgtagcctttgctgcagtggaaggcattttcttttccggttcttttgcgtcgatattctggctcaagaaacgaggactgatgcctggcctcacattttctaatgaacttattagcagagatgagggtttacactgtgattttgcttgcctgatgttcaaacacctggtacacaaaccatcggaggagagagtaagagaaataattatcaatgctgttcggatagaacaggagttcctcactgaggccttgcctgtgaagctcattgggatgaattgcactctaatgaagcaatacattgagtttgtggcagacagacttatgctggaactgggttttagcaaggttttcagagtagagaacccatttgactttatggagaatatttcactggaaggaaagactaacttctttgagaagagagtaggcgagtatcagaggatgggagtgatgtcaagtccaacagagaattcttttaccttggatgctgacttctaaatgaactgaagatgtgcccttacttggctgattttttttttccatctcataagaaaaatcagctgaagtgttaccaactagccacaccatgaattgtccgtaatgttcattaacagcatctttaaaactgtgtagctacctcacaaccagtcctgtctgtttatagtgctggtagtatcaccttttgccagaaggcctggctggctgtgacttaccatagcagtgacaatggcagtcttggctttaaagtgaggggtgaccctttagtgagcttagcacagcgggattaaacagtcctttaaccagcacagccagttaaaagatgcagcctcactgcttcaacgcagattttaatgtttacttaaatataaacctggcactttacaaacaaataaacattgtttgtactcacaaggcgataatagcttgatttatttggtttctacaccaaatacattctcctgaccactaatgggagccaattcacaattcactaagtgactaaagtaagttaaacttgtgtagactaagcatgtaatttttaagttttattttaatgaattaaaatatttgttaacaactttaaagtcagtcctgtgtatacctagatattagtcagttggtgccagatagaagacaggttgtgtttttatcctgcggcttgggtagtgtcctgggattctctgccccctctgagtagagtgttgtgggataaaggaatctctcagggcaaggagcttcttaagttaaatcactagaaatttaggcgtgatctgggccttcatatgtgtgagaagccgttccattttatttctcactatattttccccaatttctagttgataagaaaaaactattgaagagtttt

SEQ ID NO: 338793 - DNA, 1832 bp, Homo sapiens
caaatttaaattctatgattcttcaaattgaacaatgatctggacttgaaataattttaaaggcaacaaatgtccctgctgtactggactatgttttactgtctgtagaccctgaagctcaatatgaactacagaatacccaaacttgtattaatgtaaatcaagtgttgaggtttttaaaagaacactggagggaaaaactgaccagtaaaaataaaacatttcggtgtgagttcttcctttaggaagaggattggcaaatacttgaatttggcctttgtcccagagctcttatctagcagttggtaatcggaggtcttttactgtaatgcttcaattgctgataccgtatgtgcctactagggaatttctcttcaatgccattgaaacgatgccttgtgtcaagaagaaggcagactgggccttgcgctggattggggacaaagaggctacctatggtgaacgtgttgtagcctttgctgcagtggaaggcattttcttttccggttcttttgcgtcgatattctggctcaagaaacgaggactgatgcctggcctcacattttctaatgaacttattagcagagatgagggtttacactgtgattttgcttgcctgatgttcaaacacctggtacacaaaccatcggaggagagagtaagagaaataattatcaatgctgttcggatagaacaggagttcctcactgaggccttgcctgtgaagctcattgggatgaattgcactctaatgaagcaatacattgagtttgtggcagacagacttatgctggaactgggttttagcaaggttttcagagtagagaacccatttgactttatggagaatatttcactggaaggaaagactaacttctttgagaagagagtaggcgagtatcagaggatgggagtgatgtcaagtccaacagagaattcttttaccttggatgctgacttctaaatgaactgaagatgtgcccttacttggctgattttttttttccatctcataagaaaaatcagctgaagtgttaccaactagccacaccatgaattgtccgtaatgttcattaacagcatctttaaaactgtgtagctacctcacaaccagtcctgtctgtttatagtgctggtagtatcaccttttgccagaaggcctggctggctgtgacttaccatagcagtgacaatggcagtcttggctttaaagtgaggggtgaccctttagtgagcttagcacagcgggattaaacagtcctttaaccagcacagccagttaaaagatgcagcctcactgcttcaacgcagattttaatgtttacttaaatataaacctggcactttacaaacaaataaacattgtttgtactcacaaggcgataatagcttgatttatttggtttctacaccaaatacattctcctgaccactaatgggagccaattcacaattcactaagtgactaaagtaagttaaacttgtgtagactaagcatgtaatttttaagttttattttaatgaattaaaatatttgttaacaactttaaagtcagtcctgtgtatacctagatattagtcagttggtgccagatagaagacaggttgtgtttttatcctgcggcttgggtagtgtcctgggattctctgccccctctgagtagagtgttgtgggataaaggaatctctcagggcaaggagcttcttaagttaaatcactagaaatttaggcgtgatctgggccttcatatgtgtgagaagccgttccattttatttctcactatattttccccaatttctagttgataagaaaaaactattgaagagtttt

SEQ ID NO: 338794 - DNA, 1636 bp, Homo sapiens
cccgtcccagccgtcctgtcctggctgctcgctctgcttcgctgcgccgccactatgctctccctccgtgtcccgctcgcgcccatcacggacccgcagcagctgcagctctcgccgctgaaggggctcagcttggtcgacaaggagaacacgccgccggccctgagcgggacccgcgtcctggccagcaagaccgcgaggaggatcttccaggagcccacggagccgaaaactaaagcagctgcccccggcgtggaggatgagccgctgctgagagaaaacccccgccgctttgtcatcttccccatcgagtaccatgatatctggcagatgtataagaaggcagaggcttccttttggaccgccgaggaggtggacctctccaaggacattcagcactgggaatccctgaaacccgaggagagatattttatatcccatgttctggctttctttgcagcaagcgatggcatagtaaatgaaaacttggtggagcgatttagccaagaagttcagattacagaagcccgctgtttctatggcttccaaattgccatggaaaacatacattctgaaatgtatagtcttcttattgacacttacataaaagatcccaaagaaagggaatttctcttcaatgccattgaaacgatgccttgtgtcaagaagaaggcagactgggccttgcgctggattggggacaaagaggctacctatggtgaacgtgttgtagcctttgctgcagtggaaggcattttcttttccggttcttttgcgtcgatattctggctcaagaaacgaggactgatgcctggcctcacattttctaatgaacttattagcagagatgagggtttacactgtgattttgcttgcctgatgttcaaacacctggtacacaaaccatcggaggagagagtaagagaaataattatcaatgctgttcggatagaacaggagttcctcactgaggccttgcctgtgaagctcattgggatgaattgcactctaatgaagcaatacattgagtttgtggcagacagacttatgctggaactgggttttagcaaggttttcagagtagagaacccatttgactttatggagaatatttcactggaaggaaagactaacttctttgagaagagagtaggcgagtatcagaggatgggagtgatgtcaagtccaacagagaattcttttaccttggatgctgacttctaaatgaactgaagatgtgcccttacttggctgattttttttttccatctcataagaaaaatcagctgaagtgttaccaactagccacaccatgaattgtccgtaatgttcattaacagcatctttaaaactgtgtagctacctcacaaccagtcctgtctgtttatagtgctggtagtatcaccttttgccagaaggcctggctggctgtgacttaccatagcagtgacaatggcagtcttggctttaaagtgaggggtgaccctttagtgagcttagcacagcgggattaaacagtcctttaaccagcacagccagttaaaagatgcagcctcactgcttcaacgcagattttaatgtttacttaaatataaacctggcactttacaaacaaataaacattgtttgtactcac

SEQ ID NO: 338795 - DNA, 2311 bp, Homo sapiens
cccgtcccagccgtcctgtcctggctgctcgctctgcttcgctgcgccgccactatgctctccctccgtgtcccgctcgcgcccatcacggacccgcagcagctgcagctctcgccgctgaaggggctcagcttggtcgacaaggagaacacgccgccggccctgagcgggacccgcgtcctggccagcaagaccgcgaggaggatcttccaggagcccacggagccgaaaactaaagcagctgcccccggcgtggaggatgagccgctgctgagagaaaacccccgccgctttgtcatcttccccatcgagtaccatgatatctggcagatgtataagaaggcagaggcttccttttggaccgccgaggaggtggacctctccaaggacattcagcactgggaatccctgaaacccgaggagagatattttatatcccatgttctggctttctttgcagcaagcgatggcatagtaaatgaaaacttggtggagcgatttagccaagaagttcagattacagaagcccgctgtttctatggcttccaaattgccatggaaaacatacattctgaaatgtatagtcttcttattgacacttacataaaagatcccaaagaaagggaatttctcttcaatgccattgaaacgatgccttgtgtcaagaagaaggcagactgggccttgcgctggattggggacaaagaggctacctatggtgaacgtgttgtagcctttgctgcagtggaaggcattttcttttccggttcttttgcgtcgatattctggctcaagaaacgaggactgatgcctggcctcacattttctaatgaacttattagcagagatgagggtttacactgtgattttgcttgcctgatgttcaaacacctggtacacaaaccatcggaggagagagtaagagaaataattatcaatgctgttcggatagaacaggagttcctcactgaggccttgcctgtgaagctcattgggatgaattgcactctaatgaagcaatacattgagtttgtggcagacagacttatgctggaactgggttttagcaaggttttcagagtagagaacccatttgactttatggagaatatttcactggaaggaaagactaacttctttgagaagagagtaggcgagtatcagaggatgggagtgatgtcaagtccaacagagaattcttttaccttggatgctgacttctaaatgaactgaagatgtgcccttacttggctgattttttttttccatctcataagaaaaatcagctgaagtgttaccaactagccacaccatgaattgtccgtaatgttcattaacagcatctttaaaactgtgtagctacctcacaaccagtcctgtctgtttatagtgctggtagtatcaccttttgccagaaggcctggctggctgtgacttaccatagcagtgacaatggcagtcttggctttaaagtgaggggtgaccctttagtgagcttagcacagcgggattaaacagtcctttaaccagcacagccagttaaaagatgcagcctcactgcttcaacgcagattttaatgtttacttaaatataaacctggcactttacaaacaaataaacattgtttgtactcacaaggcgataatagcttgatttatttggtttctacaccaaatacattctcctgaccactaatgggagccaattcacaattcactaagtgactaaagtaagttaaacttgtgtagactaagcatgtaatttttaagttttattttaatgaattaaaatatttgttaacaacaaaaaaaaaaaaaaaacaaaaaaaaaaaaaaaccggggccccgctgccccctttttttccccaccccccatttttttttaccctggccgggggccccccctttagaaaggggggccgagggattaaagggctttcggcttcagaaataaaaagggcccttacccatttttgccacaaggggccactctatacgcgcttttatcccatttgtttttttttttttcgcaacccctccggctttctttttaaaccaattagaccggggcgcgataagcataacgggataaatatgtggggggccccctcctcttcgccttatggggaggcgcccccctttatagtacaacccatagaacttcccctacagttattcattctcccctcatgctgtgggcctaccaagagagccgggggcttgcaaccaccagtttacctattgttgggctccgctcgaacgttgtcccccactgtctttttgttaccgccgccccagcgccgcccatgag

SEQ ID NO: 338796 - DNA, 1801 bp, Homo sapiens
ttgtcaattcagtcacgcagggtctagcgatgtgcagagtacttccctttggcatcggcgaacgaatggaccgccgaggaggtggacctctccaaggacattcagcactgggaatccctgaaacccgaggagagatattttatatcccatgttctggctttctttgcagcaagcgatggcatagtaaatgaaaacttggtggagcgatttagccaagaagttcagattacagaagcccgctgtttctatggcttccaaattgccatggaaaacatacattctgaaatgtatagtcttcttattgacacttacataaaagatcccaaagaaagggaatttctcttcaatgccattgaaacgatgccttgtgtcaagaagaaggcagactgggccttgcgctggattggggacaaagaggctacctatggtgaacgtgttgtagcctttgctgcagtggaaggcattttcttttccggttcttttgcgtcgatattctggctcaagaaacgaggactgatgcctggcctcacattttctaatgaacttattagcagagatgagggtttacactgtgattttgcttgcctgatgttcaaacacctggtacacaaaccatcggaggagagagtaagagaaataattatcaatgctgttcggatagaacaggagttcctcactgaggccttgcctgtgaagctcattgggatgaattgcactctaatgaagcaatacattgagtttgtggcagacagacttatgctggaactgggttttagcaaggttttcagagtagagaacccatttgactttatggagaatatttcactggaaggaaagactaacttctttgagaagagagtaggcgagtatcagaggatgggagtgatgtcaagtccaacagagaattcttttaccttggatgctgacttctaaatgaactgaagatgtgcccttacttggctgattttttttttccatctcataagaaaaatcagctgaagtgttaccaactagccacaccatgaattgtccgtaatgttcattaacagcatctttaaaactgtgtagctacctcacaaccagtcctgtctgtttatagtgctggtagtatcaccttttgccagaaggcctggctggctgtgacttaccatagcagtgacaatggcagtcttggctttaaagtgaggggtgaccctttagtgagcttagcacagcgggattaaacagtcctttaaccagcacagccagttaaaagatgcagcctcactgcttcaacgcagattttaatgtttacttaaatataaacctggcactttacaaacaaataaacattgtttgtactcacaaggcgataatagcttgatttatttggtttctacaccaaatacattctcctgaccactaatgggagccaattcacaattcactaagtgactaaagtaagttaaacttgtgtagactaagcatgtaatttttaagttttattttaatgaattaaaatatttgttaacaactttaaagtcagtcctgtgtatacctagatattagtcagttggtgccagatagaagacaggttgtgtttttatcctgcggcttgggtagtgtcctgggattctctgccccctctgagtagagtgttgtgggataaaggaatctctcagggcaaggagcttcttaagttaaatcactagaaatttaggcgtgatctgggccttcatatgtgtgagaagccgttccattttatttctcactatattttccccaatttctagttgataagaaaaaactattgaagagtttt

SEQ ID NO: 338797 - DNA, 1621 bp, Homo sapiens
gaaaacatacattcttttatgtaagtgtcaataagaagactatacatttcagaatgtatgttttccatggcaatttggaagccatagaaacagcgggattctgaaatgtatagtcttcttattgacacttacataaaagatcccaaagaaagggaatttctcttcaatgccattgaaacgatgccttgtgtcaagaagaaggcagactgggccttgcgctggattggggacaaagaggctacctatggtgaacgtgttgtagcctttgctgcagtggaaggcattttcttttccggttcttttgcgtcgatattctggctcaagaaacgaggactgatgcctggcctcacattttctaatgaacttattagcagagatgagggtttacactgtgattttgcttgcctgatgttcaaacacctggtacacaaaccatcggaggagagagtaagagaaataattatcaatgctgttcggatagaacaggagttcctcactgaggccttgcctgtgaagctcattgggatgaattgcactctaatgaagcaatacattgagtttgtggcagacagacttatgctggaactgggttttagcaaggttttcagagtagagaacccatttgactttatggagaatatttcactggaaggaaagactaacttctttgagaagagagtaggcgagtatcagaggatgggagtgatgtcaagtccaacagagaattcttttaccttggatgctgacttctaaatgaactgaagatgtgcccttacttggctgattttttttttccatctcataagaaaaatcagctgaagtgttaccaactagccacaccatgaattgtccgtaatgttcattaacagcatctttaaaactgtgtagctacctcacaaccagtcctgtctgtttatagtgctggtagtatcaccttttgccagaaggcctggctggctgtgacttaccatagcagtgacaatggcagtcttggctttaaagtgaggggtgaccctttagtgagcttagcacagcgggattaaacagtcctttaaccagcacagccagttaaaagatgcagcctcactgcttcaacgcagattttaatgtttacttaaatataaacctggcactttacaaacaaataaacattgtttgtactcacaaggcgataatagcttgatttatttggtttctacaccaaatacattctcctgaccactaatgggagccaattcacaattcactaagtgactaaagtaagttaaacttgtgtagactaagcatgtaatttttaagttttattttaatgaattaaaatatttgttaacaactttaaagtcagtcctgtgtatacctagatattagtcagttggtgccagatagaagacaggttgtgtttttatcctgcggcttgggtagtgtcctgggattctctgccccctctgagtagagtgttgtgggataaaggaatctctcagggcaaggagcttcttaagttaaatcactagaaatttaggcgtgatctgggccttcatatgtgtgagaagccgttccattttatttctcactatattttccccaatttctagttgataagaaaaaactattgaagagtttt

SEQ ID NO: 338798 - DNA, 1434 bp, Homo sapiens
cccgtcccagccgtcctgtcctggctgctcgctctgcttcgctgcgccgccactatgctctccctccgtgtcccgctcgcgcccatcacggacccgcagcagctgcagctctcgccgctgaaggggctcagcttggtcgacaaggagaacacgccgccggccctgagcgggacccgcgtcctggccagcaagaccgcgaggaggatcttccaggagcccacggagccgaaaactaaagcagctgcccccggcgtggaggatgagccgctgctgagagaaaacccccgccgctttgtcatcttccccatcgagtaccatgatatctggcagatgtataagaaggcagaggcttccttttggaccgccgaggaggtggacctctccaaggacattcagcactgggaatccctgaaacccgaggagagatattttatatcccatgttctggctttctttgcagcaagcgatggcatagtaaatgaaaacttggtggagcgatttagccaagaagttcagattacagaagcccgctgtttctatggcttccaaattgccatggaaaacatacattctgaaatgtatagtcttcttattgacacttacataaaagatcccaaagaaagggaatttctcttcaatgccattgaaacgatgccttgtgtcaagaagaaggcagactgggccttgcgctggattggggacaaagaggctacctatggtgaacgtgttgtagcctttgctgcagtggaaggcattttcttttccggttcttttgcgtcgatattctggctcaagaaacgaggactgatgcctggcctcacattttctaatgaacttattagcagagatgagggtttacactgtgattttgcttgcctgatgttcaaacacctggatttgtttttctaaataaagttggaaaagcaaaaaaaaaaaaaaaaaaacaaaaaaaaaaaaaaaccggggccccgctgccccctttttttccccaccccccatttttttttaccctggccgggggccccccctttagaaaggggggccgagggattaaagggctttcggcttcagaaataaaaagggcccttacccatttttgccacaaggggccactctatacgcgcttttatcccatttgtttttttttttttcgcaacccctccggctttctttttaaaccaattagaccggggcgcgataagcataacgggataaatatgtggggggccccctcctcttcgccttatggggaggcgcccccctttatagtacaacccatagaacttcccctacagttattcattctcccctcatgctgtgggcctaccaagagagccgggggcttgcaaccaccagtttacctattgttgggctccgctcgaacgttgtcccccactgtctttttgttaccgccgccccagcgccgcccatgag

SEQ ID NO: 338799 - DNA, 1314 bp, Homo sapiens
tttgtagtccctgtttctcaggaggctgaggtgggaggatcacatgggcccaggaggctgcagtgagctatcacctgggagcttgttagaaatgcaactttcatgggccccactccagacctagggaatcagaaacgctggggatggggccccgccatctgtgtcctaacaaggtcctctctcaggagattttgaggcacaataaagtctgacaattacaggctataggaatttgggtcagtggttctcagcctctgccatacaatagattcatctgggggaactttgttgggggtggggcgctgactttgtttgtgctgctgtaacagaatatctgagactggataccttataaagaacagaaatctatttctcacggttctggagactgggaagtcccaagatcaaggtgcaaacaggttcgattgttaagggctgctctctgcttccaagatgacactttagttctccagcctccagaggggaggaacgccctgccctcatgtggcggaaggcagaagggcaagagagccaaaggctctgttgaagctttaatcccatccaccagggaggagctctcccggtttaatcaccccacctcttagaggccccacctctcaataccatcacattgtccattaagattcaacacctgaatcttggacacatgaaaaccgtagcaggcacccaggcatcactagttgctttggctctccaggtgccgccaattttgagaatcactggtttaggggaaagtggcatgaaccaagacttctgtcattctctagctgcaatgaacgtcagatgcagggagtcagccaaagccagaggcttgaatttcactcaaagaaacttggcctttagattacaatggagaaaggtttttggcaatgggagtgatacatccgaggtggaacatttgagagatgattctgatgctagctatgtgaagaagagggcatacccatagttaagaaatctgatgaaatagtctggtgtgaagtgataatgggccaaattaggaccttagaaatgaaattataaggaagaaaatgtatgaaagctcttttgcaggaaaaatgggcagggtttggcgatggttgctggggtgacagcaatgttagaatgtctttggttcaggagtacctctcagacttctgggagggccagtgctctctagatgcatctggcaaaattgtcatgtatggatctgtacaattctttgttttttgttgctttgatttaggagttataatgcggaggtgacccacagcaagttatagaaaaatacagaattacagtcacctcaaaagc

SEQ ID NO: 338800 - DNA, 605 bp, Homo sapiens
tctcgctctgtcgcccaggatggagtgcagtggcgcgatctcggttcactgccagctccgcctcctgggttcacgccattctcctgcctcagcctcccgagtagctgggactacaggtgcccaccaccacgcctggctaattttttttgtatttttagtagagacagggtttcaccatgttagccaagatggtctcgatctcctgacttcgtgatccgcccgcctcgtgctcccgaagtgctgggattacaggcgtgagccaccgtgcctggcaaaaacagcctcatgttttaaaaaattatctggtctttatcatatgtcattccttcagaccctccattatgatgtcagtgaaggttatgggcatcacagcattagtagctgaagttattaattaggttcacaaaacttcaagtcaatagtttttatatcacatgtagaatgtacatgatatattagtattggtatcttttaatgaaggtgtatgttctacagtatacaaatacattacaggtatattttatattatttattatatggctccatattatataccatattgggtatgtaaatatgaatgctttatacagtgataaataaacaaa

SEQ ID NO: 338801 - DNA, 186 bp, Homo sapiens
ctgctggcctggactgctcctccgatcaccagacctgaggatctacctgcctgcttgaagaaagcatctcaaacttcaacgtgcccaaaaccgagctcctgagtgtctgctcaacctgcttcctgagaaccctgcctgtctccattagggtcaccccatccttccaggtacagacaaaagatcagg

SEQ ID NO: 338802 - DNA, 85 bp, Homo sapiens
tgaaccaatctctgtagccagggggccagaggatatgggattctctgattggccaggcctgtgtcaagttgccaattcctgaagg

SEQ ID NO: 338803 - DNA, 667 bp, Homo sapiens
ggagctgtcagcaggctccagagaccatggccataaagcactgacactgacacggccccagcaagcccttggggaagggcagccaccaccgttgctgctgctgtcacttactgttgctgttgatttaaggcagtacatactcaggtctcatagcttgtaaaacaaaggaaaaatgaaaagtcaccatcatcccagcaaaatgtaaggctcccctgctgcccagattggaatgtgctcgggagggccctggcagtctgggctccagcaggcctgggtgggcctgggtgcctgtgcgtctcacccactcccagggcgtgtggatgcaactcctcagggtcacactttgaataacaaggagctaatgagtagccttcccaaaaatgggggccaaatccctcaccttcctgagccctcccacggggagagggagggtcttttatggagcgtggtgcttcatgcttcatcgttcagaagggagcgtggtatccagaaacagggaaagcattgctgagtaacgtggcggagtgagcaggctccagacaacgcatccaccaagagttcttccatgcgctggtgattccccatccagcagtaaatgttgttcatgtttacagatgatagctatggaatacaggcctttcgtgagtggcaaatttcttattcttta

SEQ ID NO: 338804 - DNA, 89 bp, Homo sapiens
accggaaggcaacacaaaatcaagtcagttctgtcaaatcatggggaaggtacctcctgtgaaatgtttggaagttaaataatgggaag

SEQ ID NO: 338805 - DNA, 403 bp, Homo sapiens
atcctcaggttcactctcaaacccatacagagatactcacacttaggcacacacacacacacacacacacatgcatgctcactcacccacacatgcacagctcataagcccagggcacaggcccaactggggatgcctcaacagcagccctatgccctctctggagccctagcatcccccatggctgcctggagcccagacaggttttaggaagggtggagacccagcccgtctccacgcccttagccaagggaagcaggtacagtttccagcagcacccctgtcctccttccagctcctcagactttcttcccacactgtgggaacactccttggcactttgagggtctcccttcacctcctagcccagggaggaccaccagccccgacaatgcactgcagt

SEQ ID NO: 338806 - DNA, 398 bp, Homo sapiens
atcctcgagcaatgtacttccttcactagaacaaaaacaaaaatctttccaactgaattctaagcttaggagtcacatacaaataaatcaatgaaaataaattttaagacatcacgaagttaccgtaagtttaaaatagcataacacaatgaaagcacaaggatgcttctcaaagcatcccttctacatttatttccagaattctaaatttgaattcagcaacttatctaatctagcaaagagttaataagcacctccagaaagcctgagtgatacagaagaatcaaaaagcatgagttcaggctgggtgtggtggctcatgcctataatcccagcacttccggaggctgaggtgggaggatcacctgaggtcagcagtttgagaccagcctggtcaa

SEQ ID NO: 338807 - DNA, 256 bp, Homo sapiens
ggagactatagcaaatcatgcctgggtagccacatgtcactgaggcctgtgtgtcactgtggggccctggccaggttgctgacagtctgttaacctcagtctcctcattggaagcctggctgtgtgagccctgctaggtaaacgtaaaggacataggagaggctcaagttcagccttggcataggggccaagctgggcctggatccgggttccatcctgccccatcatgactctgtgcagtcgacacctgtcacca

SEQ ID NO: 338808 - DNA, 310 bp, Homo sapiens
ctgggcatggtggttcatgcctgtagtcccagctacttgggctgaggtgggaggatcacctgagcccagggaggttgaggccgtagtgagttgtgattgcctgacttcactccagcctaagcaacagtgagactgaaaaaaaaatagagagagagagagtgacagagctgagtgccaaagtctttagtgagtaaggactatgtttgtcagatggcacaatgaagacggttggatagctccatagtcaaatggcctggacttcaacagaataggaagagtgcattatataagagggtaggttagtaatggt

SEQ ID NO: 338809 - DNA, 344 bp, Homo sapiens
gatgtgagtcagcttcatctagcagagctctaacttcaactaagacaaaagtgtatttttcacagaaaccaaagctggagcttgacagtctagtgtgtatacaaaatttgagggaccctgttttttttccagtgaactgttctgcacttcctaggatgtgaatctcaccttcacagaacaaattgatgggaagagcaccaaccatcacatccataggccaaggaggagagaggaaacaaaaaaataagaaatgaggcagaagatagatgtaaggtttcaaaaaatgccacacaacactttcattactttgcattggtcagaatctggtcacatggtcacagctt

SEQ ID NO: 338810 - DNA, 304 bp, Homo sapiens
ctgagctctgtcttatggaagagaaattgacacatcaaggggttcagtaacttgcccaagatgaaacagccagtaaggagtagaaatgggatttaagccctggcatctgactccagagcctgtattcccttctttccttccttctttctttttcttttgttttaaatttggaaattatttcaaatttacaaaaaagtgcaatgataaaaatagaacaaaggacatagatttgcaaaatcacctgttaccatttttctgccatttgcttgttctcttgctctctctcttttgctcccgttctctc

SEQ ID NO: 338811 - DNA, 489 bp, Homo sapiens
cattttatgtacttcaataaattaaaagtataaattaatacttaaggttctccaaaacatctaatttttcatctattgtgtgccaagtcgtatgataaggactttacaatatttgtactgtcagttaaacctaccacacttccttaaattcccattccagactttttctcattttcatgttcaaaatgtttaaataggccaggcacagtggctcatgcctgtaatcccagcactttgggaggccgagacaggtggatcacctgaggtcaggagttcaagaccagcctggccaatattgtgaacccctgtcacaactgaaaatagaaaaattagccgggtgtggtggtatgcacctgtagtttcagctactcaggaggctgagacgggataagtgcttgaacctgggaggaggaggttgcagtgagccaagatcacaccactgcactccagcctgggggacagaatgagactctgtctcaaaacagaaaa

SEQ ID NO: 338812 - DNA, 439 bp, Homo sapiens
aatggagaagaactttctgggggcagagaacagcagatgcaaaagcccaaaggcaggaaagagtttgggttgtttaggaagtgccagaccagtaagttggagtgtcacgggcaagggcagagtggcatgtgacgaggctgggaaaggcaccgggtgaacacgaggctcccctcccaattcccctcttcttaggatcacagccttgcattgcctatttctgctgcctagaaacagttggctcataaattatttccagttttatagttgtttacagagacagggcttgtctggatacgtcatggccagaggctcatccagttgttttgaagattaactgagataatacatgtaaactgtgcagtacagttgctggcacatagttaatgcccagtaaaaagcaggaaagatgtcttgaaagaatgagtgtgaaaatgagatg

SEQ ID NO: 338813 - DNA, 633 bp, Homo sapiens
cgcccaggctggagtgcagtggcgcaatctcgggtcactgcaacctttgcctcccgggttcaagcaattgtctgcctcagcctcccgagtagctgggattacaggcacccgccaccgtgccaggctattttttgttttttgtatttttaatagaaacgggatttcaccttcttggccaggctgctcttgaattcctgacctcgtgatccacccgccttggcttcccaaagtgctgggattacaggcgtgagccaccatgcccggccagtttgtgtttttaatccctatgtttttctagcatctaagaaggaccaactccacgtaaacatcacccagttgacttgtgactcttgtcaactgtatcactgcctcaatcatagcacaatacaaacacacaacatatccactctaataattctgggtcgtatccctggattatggatccctgtcaatttgtgcaaaccttgggctgccacccctgctttacattttgtaaaactccttcttacccagctcactcatcgtgcacgtaaagccttaaacatagtaatttttactgtaatctccttagtcacactaataacctcggttgtagtgtcctcagtagcactacatagttctattcaaacagcc

SEQ ID NO: 338814 - DNA, 184 bp, Homo sapiens
gaagtaatgaaagaggaagaacaggatagggatggacagtcaacagaacggtgcttaaataacgttatcataacaagctttacttccaggaaactcccctggaagaaagagagtactagtatattctctgctataaaactcagccaattatattccagaatcaggaactcttgtatttagatgt

SEQ ID NO: 338815 - DNA, 537 bp, Homo sapiens
gttgcacatacaaaatgcagttgggagaagctgatgtatctgagatacttcaatagcaaagagtgattgtaactatataagttacgatagtgacaataatgagaaagatggcatccttcttcaaggaaggccaaattgacaaaaagctgagcagacctggcttcagaaaagaaacagtctaagtagagaaaaggaaatcctgcatcaatgtgggaagcgatctgatttaaatattttctttcagcaattacaagaaacacacaggaacatgatttaaaccaaaggaagagcaatcatgtttcctttaaaatcaatgctaatcacaaccacatatgcaatagcccctaggaccttggctagccacagaccaatgaatgaaagccacttttccaaagtaagaacacaaagcatcaacaagtagctcttactattcttctgcttaatctcactcacccttattttatcatgggcttgcttcatatgtagggcaaaggacaacttaaaaatcattattgtaaatcaacaagctataagtca

SEQ ID NO: 338816 - DNA, 264 bp, Homo sapiens
gcagacattagagtaaagggcctccaccacctgctgcctccacccccaagtcctctcctgtggttcctgcccttcctgggatctggtggttgagatttttcttggctcctggggcacacattttcgtgacaacctctgtattggcgagggctctttagttgcaaagaaatccacactggcttgagccaaaggaggaatggttggctcatgtaaccggcaaaccaaagcgtgctgacttgaggcatggctggatctaggtggttg

SEQ ID NO: 338817 - DNA, 285 bp, Homo sapiens
cccctggcaaacttctgtctttcaagtcctagctcagaagctccttcctctgaggagcctttcctgatgaccacagcacaggagccccatctgctagctggattcagactccctcatagcacttacactccagacggtagctactctgcttttatgtgtttgtgaattcttccctatacacacaatgtctagtctagcagatggttaaaatatgcttgaataaatgaactaaagagttaaaggacagagtgatctccaagcatagtgattcacactgggctttgg

SEQ ID NO: 338818 - DNA, 436 bp, Homo sapiens
ggtgcttggctgttgggttcagtgatccttacatctagccccagctagtggtgttctggtaaatcgttaaccaccaactctttgagcctcccggggtaatgaaagttacacctctagttagcatgtttatgaaatagatcccttctgcacgcgaagacctgcatgtagggcagtatggtggaaatggtcctgaatactgttgacggtccacctagaaggaacccgcccagaccaagtcttagcagtggggttcttactgaccaccttcttccctggctctcctcagtggagggaatggaaggctgtgccagctgtttcagagctttctcctctctgctcccttctctatagatgcagatgccttggctctacctgccactaatgatctcattgggtatgactttagatttttttttttttttttttttttcttttg

SEQ ID NO: 338819 - DNA, 407 bp, Homo sapiens
acattgaatcaggaaatttttctgagaaaggcaggtgggtatgggcaatctgacacgatccaaaaggcttactgccttgcacccctccccgcaaaaaggaagtagagaccaagatcttgggctttaattttatttttaattgtaaaaagatttcaaataagccaccatttgaactgggaagggaaactagggatggtcttgggggaaaatgtcattctctctaagaaagggaccccggggatgtgggtcgttttgagggtcctagaagttgaccccaattctcacctctcctgctgcactgcaggattgcccagggtaggtctagtcccctaggttcttcagaccactccaggtcaggtttggttgggtggctgccagtggtcttccactactgttcctgtctaggg

SEQ ID NO: 338820 - DNA, 261 bp, Homo sapiens
gggaatgtggaagtaggaggggatagcaagaaaagagactggaaaagtaaatgggggccagatcatggaaagcctagtactctgggaatttaaatttcatccttgtaaggactgggaagttactaaaaagttttaagcaaatgactgatacagtaaagcttgtgacactgaaagatttctctttgaagattccactgctaagaaaggtttgaggagttgtaaggctgaccagttaaaatcctattgacttaatccaggtga

SEQ ID NO: 338821 - DNA, 201 bp, Homo sapiens
cacaggacaggtccggcagaagggagggaggacaaagagccaaaagccccggctgcacctcctagcagggaaatggagctggctgtgagccaggttttcctctaaatcagaagcaaatgcaccaaagctgcaaccttaccccttgaccgaggacgggaaagtgcctgtctgacctcacgttattggtgctattatcatcat

SEQ ID NO: 338822 - DNA, 458 bp, Homo sapiens
ggtggctcacgcctgtaatctcagcactttgggaggccgaggcagacggattgcatgaggtcaggagttcgagaccagtctgaccaacatggtgataacctgtctctaataaaaatacagaaataaaattagccaggtgttgtggtgtgcacctgcaatcccaggtacttgggaggctgaggcaggggaattgcttgagcctgggaggcagaggttgcagtgagctcagatgttgcctctacactccagcctgggtgacaagatgacgctgtgtctccctgtccccttccaaaaaaaaaattgtgggcctttattttctgcctggaccatcaccttaagcttgatggatggaactcctggcacatttctacccaggatcctcccagtactcagttgttttacctgggagaagataccctccctgtcctcatcattggctgcttccagcctgagtcagc

SEQ ID NO: 338823 - DNA, 483 bp, Homo sapiens
taggcatgaaggaagaaaatgcgcctgaggacacagccagcacaaatgcagaggcatacaagtgcctggtacagctggcatgcagggatggctgaggaactgcgggggcagccggtgggatccatccgaggtgagtgatgagagctgcacggcaatttaggggatgacactagccacagcgtgatgaataaatcttaaatgcagaggtagcgcctggtggtgagcagttagaggctgagacaatagctgagaacacatgacaagttcagcaactaggagagtttctagttaattggaaggaagagttggaagcacattctagagggccgtggaagaataaacacaatccactaactgccgggaatgggagtgaagagtccaagatcacagggtcctccctggctgcctgatggggcagtggtgttgagtaacagaaatggaacaaaagaggggcaagagattattctttgtagcatgagtatt

SEQ ID NO: 338824 - DNA, 707 bp, Homo sapiens
gctgtactgagaaggatacaacatcacttctgtagtattcctgccaaaaatgtatactctaaatgattatatatgtctaatcatgagggaacatcagacaaaaccatactgaaggacatatatacaaaataactggcctgtgctcttcaaaaataccaaggtcatagaaaagaaagactgaagaactattctggatcataggagactaaaacacaaacatgatagctaaataattcaatgtatgattctagattcgattctggaccagaaaaaagaggttgttttgctacacaattcctttgtgacaattagcaaaatttgaaataaagtttacacattagacaatagtactatatcactgttatttttctaattttgatcattgcactgtgtaagagaacgcctttttttttttttttttttttgagacagagcttctttgctcttgttgcccaggctggagtgcagtggtgcgatctcgactcactgcaacctccacctccagggtccaagtgactctcttgcctcagcctcccaagtagctgggattacaggaatgcaccatcacgcccagctaattttttgggttttttttgtgtatgtgaatgtgtgtaatgtgaatatgtaccacatttttcctatccattcatccactgatgaacacttaggttgattccatatctcaggtattgtgaataatgctgcaa

SEQ ID NO: 338825 - DNA, 333 bp, Homo sapiens
caaaaagcaaaacttgaatttgtcacacactgaatactatgttgaatccatgaatctgaagagatgtgtaggcattgtattagatatcaaaagtcatctagagataatacatgggaaaatgtgggtagtttatatgtaaaactatgtcattttatataaggaatttgaacatccatgaattttggtacccatcgggggtcctggaaccaatcccccacagataccaagagatgactgtacttactataattacactaaactgaacccaaccatctgaagaaagatcacatctctacatattttcctatcactcccaaagttctattatgcttt

SEQ ID NO: 338826 - DNA, 446 bp, Homo sapiens
gctgccattgtgacattacattttgttaaaaatcaaagagagcaaagaaaggaggagagaaagtgttttgtgtgagactcccgtacccctcactttccagacaggtaatacagtactgtagtcccactgaagataacatagagacccaagttcctataggagctgtccaccaatcaaggtgacagaaagatgccatggaactctgggaaaaggattgctaaatgttggtcaaatctgtggaaaagccacagaataaagtcaggtgaccacagtggatttgtgttgtctctgaagaggctgagctatgtaacttactcatatgctggagcctcttctcctctgcagaaggattccattgatctctttgccctttttctgaaatatgaacagccaggtctgctggctacatgcctgcctgggctgacatgggcatcttttgtgcatca

SEQ ID NO: 338827 - DNA, 575 bp, Homo sapiens
aaatgattattttcataagactgaacaaaaagttaactaagagattcaaaatgatcaacaatcttagcagagttcacttaaagagtcaaaattatcaagcaggctatttgaaatatgaatactcatcaaaccttgcaccaaatgtatgttacccttcccaaggtgaaccagcgatggtagcacatgtgtgcgatttataaatgaatgcaagtacattgaaggagcctgctcaaaaatgtttacagaaagggcgtgcaatcaaaaatggttccagaacccggctctaattatgtgaaccctgaattgtgaagccaagacaaattgggattctcaattatttcagtacgtgtcggtcagactgcaagtatcttaagaggtggagtgactctcccaagttctcatggcgaatcctgcatttgattcagtcctggctccccacaagtctgcaagaatgggcaagtccattccctgtctgaactttattttctcacctttaccaaaagaagtttgaaagaggtgatcaggaagggttcttctgactcgaatgtttcataatcaggggtttcccaagaata

SEQ ID NO: 338828 - DNA, 233 bp, Homo sapiens
ctcatcacccactatgggatatttaggttgttctttacattttattactataaacagttctgcaatgaacatcttcacagatttatgtttactcagatccgtccctgtccctttataatatattctggagcacatttggaaggcctggacacacactgtcaggctgcccttctcacagattttatgaaatttcattcccagtaggactaattactaatgcatgggaaacaggt

SEQ ID NO: 338829 - DNA, 263 bp, Homo sapiens
ctgatgtcccctctgctgcactcctgccaggctctggagtcagaaggacccaggtccagtctcccctttgccttttactggccaggagtgcatgggtggccctttccttgttccctgtccatttcctttctcttatctgtaaaataaggaatgaggaggattcctgcttcagagtgagaattaaagggcccccaagaacgagaactggcatacagtaggtacatggtaagtagcagtcatagatttctgaaaagggatctttg

SEQ ID NO: 338830 - DNA, 679 bp, Homo sapiens
tctcgctctctctctcttgctgtctctctcgctctcttgctgtctctctttctcactcgctctctcttgctgtctctctcgcttttgctctcgctctcactctgtagccacatgacagtgtttaatcacagacctctccatcccttactgggattattgcaccagcctctgccagaattccctgaccccaggctcgccctgcttctctaaacttctcggcagtcagggtgagcttgcaaaagtggcaagtccaaccgtatgactgtgtccctttagcctgacgcccttccccagctccctatataatgcagagaaagttccagctccttagccgcgtagtcaaggttcctggagtcctggcccctaaggcattggtgctctctggttccctctccctgtgcacctcacctgccttccaggtgaggtgattcctggaaagtcttggccgtttggcagtgcccctgcagcccaggcctgaatagccttctctcaagatttggccaaaacatccccatctccatgaagtgtccacactgcctccccactttctcccagcctgggggagttgaccaccccctcgaggctgccccacttaggctgctgtgcaccaatgtgacactggtgtgacattgactgttacactgggggcaccgatttgggtcttagcctgtcttctcca

SEQ ID NO: 338831 - DNA, 188 bp, Homo sapiens
agaaggaaaaacaggccttaggaacttaagatttttgtctaaagtcatacagctgattagagtttgagatctcaattcaacaagctgatggaagcaatggctaatttttgttgggcattttactctgatccagagtaagcactaagcactttacaaacacaatcttaattaattttcacaatgatcct

SEQ ID NO: 338832 - DNA, 693 bp, Homo sapiens
gaggtgatgggagaagaaatgtgaaagaggaggacagtactacattcatccaacgtggacaaaaatccttgaggctagaaagaattcagtttcctatagtagaaagatataagacaataacagtggtttgacacataccaagaacttaaagtaaatgtaaagtatctaaaacttactttgtcacttcatgaaaggcttccatttaattgacagtcatgcacaagctcgggaatgaaaaggacataatcttaggaaaaccaaatgattttacctaaaagccagtcatcagaaatctgcaaaacacaattagagtgaaaaagaaatctactttgtttttaccctaaatatgttggttctgagatagatttacagagagatagtataaaattactagtatccacagaaaagaagccagacctagcttttcagacacatcatgaattgactattaaacataatattcattttgataagtgctttaaattgtttctctgttatagccacatgtgttcttagtcctcagagtatattggcattttacattattgatcctcccccctcttttaaacttctgtgcagcccattatcctgattcttctaactctatgagttatactccaaaccacgagccctagagcagtcaacccccaagaacttgttcactcagttttacttccacacagatgactccca

SEQ ID NO: 338833 - DNA, 490 bp, Homo sapiens
ccaggatacctgttagacaagtcttcagtatattcttttggctttgtcatgtcaaccacataccttggccaggtctctgatgatttccaaatgtttaatcatcctaatttgtgatatccttgttctgtcacttttttagtatcttcagcctaacgtgtcttgaataggtctttggtctgtgcttataatcaggttagtagtcctgtcgtttttccctcctccaataaatctttcatattttaaaggaaaagcagcttccttgttaaaccaatcataacaaaagccccacacccttatcccaaaccttcgtggttaagattaatgatagctgaaaatcatatacccgtttaataattatcttggtaatgttaataaaaattttaattgttttcattgaaaaaaatcaaatatgaacaatccctccctgcctgtgccatttaggtcacttactcatcctggaatcccctgatcttcttcctgtccccatctc

SEQ ID NO: 338834 - DNA, 240 bp, Homo sapiens
tttggtctcctacaagggcaactgattatgttcagcattaactattactatccagcagtaaagaattcagtattcccatgagatacttttcttcctgaaaggcacctagacctccttccaactttaaaagagaagggaggtatatgtatgtttttaatcttctcctttacagtcttaactaaaaaagcctaactactatttacatggaccacgtgccttacctagaaacaatctgcagaa

SEQ ID NO: 338835 - DNA, 542 bp, Homo sapiens
tgagtgaagccctcgaagtgagttccttttctctttcagttcaaaaatttctctttatcttcaccttctccttccttccctccagtttctgagaaggatgcattctccctgcttacaaggcaaatctccctcaacccttgctcttgttcctaccctgcttctaggttctcacttcatccatcatccctttctgacttgcctcgtaagagtcaaatcatgcccttgtctctccattctggaaaagattctcattcccctttgtattcccctagtctttctccttcccttcatgcccagacttcttgaaagaatagtgtctctacatgtagcctccacttcttcttcacttgctcatttcttcatcccttcccatcataaaaataatagataacatttattgcacacttactgtgagccacgctctgtacagttgacccttgaacaacataggtttgaactacacaggtccacttatatacagattattttcagtaaaagttacagcaagtgtgcctgactctcctatctccctttccaccacc

SEQ ID NO: 338836 - DNA, 163 bp, Homo sapiens
ccactcagtccagccttcctttgtctttctcttagatccccaggaaaaccttctaatttgtctctgctttcactccacttgtcagtcagtctttttataaaaccactgtgattttgcccaccacttaactagaactttttggtgacttgaacttcaaaaatct

SEQ ID NO: 338837 - DNA, 401 bp, Homo sapiens
acaaaattgctttgggtaaaatggtgcaaaggtctcattcatttcaatgagctgttgcttattaaaaataaaatgcatttacaatatcaacaagctcctttttaacaagggatgctgttatctttaaaatttcaagaaattataacacttatttgcaagttacattcactattcttaaacaatcctaggttctattttactttaaattcaaacgttattgtgaatattatttatgaaattctattgtacatataatgaagaggcttgataaattaactaaacattacaccacagattttcagaaacatattgtcctaagcagtgtcaaaccaagggtggaggggcaggaccaagagaacagttttactctgcttgtgggaaataagggagtgtgttttagg

SEQ ID NO: 338838 - DNA, 569 bp, Homo sapiens
agcctcctgatatttcttggaaatgccaagattcacccaccttaaaaaccactttgtttttctgtctttgaaagagacatgcgctgtagatatttgcttgctactctacttaattctagacatctcagcagaattcttttgagaggcagacagtcactctggatctgcattcaaatttcaccctagaacttatccgcatgttaatactgcgtttctttttttaatttttcactgcctttctcgcccaaaaagaaagaacgtaagctcttcctgtcagggacagctatttttttttctgttttctctttttcttaacctggcatgaagacacatttctggcatagagcaaataaataataaatatttgttgaatctagtaggtttgaagaggcagctcattatacgtttcgtttgcatttctttaataactaatgatgtcgagtatgtcgagaatgttttcttcagtattctcagtcaaatcttgcataagttaatccttaatttgtcaactgttgattcattttgctctgtgctgttctcatgatagtgaatgagtctcacgagatctg

SEQ ID NO: 338839 - DNA, 491 bp, Homo sapiens
attaaaaataattcatattcctacctacattaagcattttggttcatttgagatcattctgtatatagttttgtaatttttttaaaccatatttacttggtaaacattcagtggatatatgtgatttatcattaggatatatcattaccagattatgtaattgtagtcattgctggatgtcttggaggttttctgattttgtagacaactcttgagatgaacatctttatgcatcaatttttagttcctgaaggtggaattagagccaattttcttgtgcaaagttcatgtcagtttctttaacacacctttacctacactgggcattatttggttgccattttgataagtaaaaatggtacttttccttacttctgaggcataatcagattggcatttaatcaaactattacatacatgtggtagaattcattttttttaaatttaactttgttgttgttgagagggagtcttgctctgccgcccaggct

SEQ ID NO: 338840 - DNA, 565 bp, Homo sapiens
ggtctcttaagaggttccctccctcaagctggaaaaagagaatgtcatggagcattcctaaccatgggctccagcctggctttcattctgtttctcccctgaaacaacattcctttagtaatattccgaataacagcttcatcagtctgtctaccgaccactcttcaggcttcatcttatatgacctcccaaactgcactaagggttgtattagagaaaagtggataaagttcggagtcaggctgcttgagcttaaatgccagcttcacttaccagccacctgaccatgagtcagctgcttaaccattctttgccacagtttccttgtctatgaaaagggaaatggctcccacctcaaaaagttgttaacattaaattcaatcatgtattcaaagtcctgagcagaatgtctggccatgactgggacttaacagatgttagcatttattattagtatctgtcagtcttgaaatgttctcttcccttggctttcatgacattccacactctcctggttttctcttacctctctggtaatacctgtttgcttatccttctttttcca

SEQ ID NO: 338841 - DNA, 474 bp, Homo sapiens
ggtctcttaagaggttccctccctcaagctggaaaaagagaatgtcatggagcattcctaaccatgggctccagcctggctttcattctgtttctcccctgaaacaacattcctttagtaatattccgaataacagcttcatcagtctgtctaccgaccactcttcaggcttcatcttatatgacctcccaaactgcactaagggttgtattagagaaaagtggataaagttcggagtcaggctgcttgagcttaaatgccagcttcacttaccagccacctgaccatgagtcagctgcttaaccattctttgccacagtttccttgtctatgccaccacaccttgccatttttttttattttaagtagaaacaaggtcttattaatactatgttgcccaggctggtcttgaactccagcgatcctcctgccccagcctcccaaagtgcttgggattacggaagtaagccactg

SEQ ID NO: 338842 - DNA, 427 bp, Homo sapiens
ttggaaaattgttcatctttcttatttcacctttttgaaaacgttttctaaaccaatcatctttgtaaaggatgaagaggtataaaaaacttgaaactgaacagactgttgtcactttgaagatagtaaatagagcttcaaaaattctctctaaattgcatttaagtgtaaatagcaatgcgtctgttaacaaatcctttgaggagaaaaacattttaacaaaattagacagttaaggagtaggttgaaaaatttgaactttttagttgggtaatgcttgagggaaaggggcatttagtggactggcttagtaagaacaaaggttctatctcttctgtgcacacgaatctgaaaggcactctctagcctgtatatcctattgtggttgtaatttggcaatgatgagagaatggactgaagtggaagt

SEQ ID NO: 338843 - DNA, 507 bp, Homo sapiens
atgtatcctgttcattgagttgcatatgctgaaccgtcctagtgaccaattattttaaaagagggccagaggctgaggcaggagaatcgcttgaacctgggaggcgaaggttgtagtgagccgagatcgcgccactgcactccagcatggcgacagagtgagactcgtctcaaaaaacaaaaatacacatacaaatacaaaattagccgggccgggcatggtggcgcatgcctgtaatcccagttacttgggaggctgagacaggaaaactgcttgaacccaagaggcgaaggttgcggtgagctaagatcgcgccattgcactgcagcgtgggcaacaagagcgaaactccgtctcaaaaaaaaaaggagataaaaaattagttactatcacaggattgttgtgaagattaaaagaggacagtgaggaggaattgggttctgagcgagatgagtaccgggagaagtcagagagtgggggcagtgaatattgaaccggatagcttgc

SEQ ID NO: 338844 - DNA, 221 bp, Homo sapiens
ctgaacgtactaaagaagcaaatatttagaaaaagttaaggagctggaagcatctcatccgggttgggatgagtggtggtgggtggttcatttctttaggaacctgagtacctgagggagaaagctcagctgggaactggagttagaaggaaaaagtatcaagagcactgagtgcctccagctggtcctaaagctgataagcctagtcttctggggagagg

SEQ ID NO: 338845 - DNA, 100 bp, Homo sapiens
gggaaataggaaaagcttgtaggaaaattggccagctgtctcagtagagtgtaagaagatacagttattgtaaaacagaataagaaatctatacaaagag

SEQ ID NO: 338846 - DNA, 267 bp, Homo sapiens
tatggtataatgatatgaatacagagtttgataatgaggcatatgaagaaggatggactttttaaaaactgtattttcagaaataaaatacaaacttatgcccccttatgtactttattattgtggttttaaaactttaggattttttccccacagatatgaaaattttgaggatcctatgggaactattgataagtttcactatggtactcactattcaaattctgcgggggtcatgcactatctcattcgtgtagaaccgttcac

SEQ ID NO: 338847 - DNA, 929 bp, Homo sapiens
agtgatgtgatctgggctcactgcatcttccacctcctgggcttaagctatcctcttgcctcagcgccttccaagtagctgggactacaggttcatgccaccacacctggctaatttttgtagagacagggtttcaccatgttgcccaggctggtcttgaactcctgagctcaagcaatcctcctgcctctgcctcccaaagtgctgggattataggtgtgagccaccacgcttgaacccttttttccttttatactgagagcttgcataattagttccaatgtacaactaagttttcataccatcttaactgtaaattctatacaaattcaacaggactcaattatttacaaaagctaatgtgtgacaacttgatcttcttacttggaatcttcccttctaaaatttgatttatcctgaagtgtctgcttgacttatatcctgtgttgctgctggctttttccatgtgcattttttgcaagctgctctttttacttcagtctcgttaagtcttgcagttctggctagaggcctactgccatgaataagctgccgctccacagtggcttctttgaagtcttagagtcagatgagtttcacggtgttcaggtttgtgatccagtgtggccccaggttctgggtaacacgtgtgatgcagtgctgtgtgcataccatgtcgtgaataacattcatgatgcagtgcacataccgtgttcaagttaacagtcctggtggcatctgaagtagcaccctaaaatcaaatgacacaaattctgcagagaagcaagtgaagtctaaaaactgagttggggtagtaacgataaatagcgttatgctagttcaggttatgttttgttgccaaatgaattacaaaaaactaccaggtttcaggcttttatgggtttcacgaatgcaggggagggatcgtg

SEQ ID NO: 338848 - DNA, 483 bp, Homo sapiens
tatgccaaggaatgaacaagaacagcttgaaggttagaagcaagatggagtcagttaggtttgatctctttcactgtcatagtttcctcagttataatttttgcaaaagcagtttcactttctagtgtctaatattttagtaagtccttctccttcctcccattttcctacctttttgatcctttctctgtgctacttgccaaagtgtgccaatttcaattcactcatttattcaacaactactccttgagcatcatcatgcacaaggcactagactaaacactaaggattcatccgtgaagaagacagacaaaaaaaaatcttgtctttgcgaagtttacgttcttgtgagaggaaggcaataagcaaataaaagagtaaaacatatgagtcagatggtgcccaggagaaaagtgatgaagagaaggatatatgaaatgcttcttcgtatgctgttagggcaggggagagagttaagttttg

SEQ ID NO: 338849 - DNA, 141 bp, Homo sapiens
ctggcgggggcgctgtctgcataaaacggctttatggccgtttctttttattatgattctgccagaagtcagcaagtgacatttcattaagaaaataaagtttaatgtgctgggaaagaggttggagcaggctggggcagc

SEQ ID NO: 338850 - DNA, 350 bp, Homo sapiens
ctgtcagaataactagaatttgcaatgagagaaaaattaataaaaaactgaaaatgcagtacatttcttcctccccatttctgtccactcctagtacaaatatgacccattttttttaaagaagcctgtggcaaataagatttgtaggaaattattagcaagttaggaaattaggatttatgtgaattacctgactgtactgccatcattaacatctcaggttccagtagagtcatgacggattcttccagaaacaaaaatccacaaatataatgaagaaagtcaaagtcacaggagaaaagctgtcttgaaagctttcacaaattcaatctgatgccttatgctcaaat

SEQ ID NO: 338851 - DNA, 2123 bp, Homo sapiens
gtgtaatggatttaaatttttaggtatctttgtctactttttcataaaatgaaagaacctggctgggcgcggtgactcatgcctgtaatcccagcacttctgggaggccgagacaggtggatcacgaggtcaggagttcaagactagcctggccaagatgctgaaaccccgtctctactgaaaatacaaaaattagccaggcatggtgtcatgcacctgtcatcccagctacttgggaggctgaggcaggagaatcgcatgaacccgggcagcagagattgcagtgagccaagatcgcaccactgtactccagcctgggcgacagagcaagactccatctcaaaaaattaaaaaaaaaaaaaaaagaacccaaatggcattttccttgatgtagtcacattttttgtgatgataatgtacaggatatctagcaattatgctggacatataagcacataagatttatgaaatgattttggataatgtataaggtactggaatctggcactttatttgctacttattttcagcactttatttgctattttctgtctctgatgagtagatccccatttgtaccacagtattaatttttaatttttcttgattatcattataaacagaatcagaggcagcactgagttttcaaattactcttgctttgcttcacagttccgtagagatatctcaggggtgcctgtgagcagatgctgagtgaaccctgccccagtcttgtccctacctctaccccacctctgtatcatagaaagagaaccagatgttttaggttcaagtcctgtctcttatatttattaactgtgaaaccctatttcacttctttgagctttgattttcatctttaatgataattatttcagtagatgatgatgatgatgatgatgatgatgtaatgttttaaagtgctaactatgtgccaggcactgaattaagtgtattacaaaatttaatcctcataaaagcccttgtgaattatatggactgttactactattttatagatgaggaaattgagacttagattctgtaactatttttctaaaaactgttctgtgtcggaaatgaaattcaaattccgggcagccaaataccaaagcttgaattcttagccatgagctttatacctcctctgcagaatttttgtgaggattgcatttgctactatatgtggaaggacttcataaaatatgaaactctgtactagggatgccaattcagttgcattcccagtaacatcttaatctattggtaactactgtatagaaagcactgtgatgagaaaagttttttgtgtccacctcaggcgggaatgagaactgagatcagttagtagtatctgctgtgggtatgctttgtccttattgtgttacacatagtattattattattagactattttgcgtagatttattgaattgcttttatttctagctctttccattttctgagcattttttcctttggaattgaattcaggcttacaagtacattgaaaattttaagaaaacaattataaggaaactaaaccatttccccattgtagtaaagtgtccttaaaaataattacttgaattattaagctagagtgcctcagaaatatatttgcttatactttaatttttcttcttgaaagtaatgcgtcagaatgtgaagcgagcaacatttgatgaagtcttagaactcatggccacaggatttctgcgtggagggtcaggtttcttaaagagcggtggagaaatgttaaaagttggagggtccgttaatcgtgaagtgagagttggagttacgcaggtttgtaacacgtatgtgtgaaagaattttggccaggcacggtcgctcacgcctgtaatcccagcatttttggaggccaaggcgggcagattgcctgaggtcaggagtttgagaccagcctgactaacatggtgaaaccccatgtctactaaaaacaccaaaaaattagccaggtgtggtggcgcatgcctgtagtcccagcttctcaggaggctgaggcaggagaatcgcttcaactagggaggtggaggttgcagttagccaagattgcgccactgcactccaacctgggtgacagagcgagactccatctc

SEQ ID NO: 338852 - DNA, 396 bp, Homo sapiens
tcactgttagaaaatggtcactaatagttccttagtaagtaaaacctctgaacggcagttcagagaaatctgcaaatggcactgagaaatataagcaaaaatgctcattttcacttataagataaaaataaaagctaccacgagatatcatggtatctcactatcagactggaaaaaacccaaaagctgacaacaaatcttgactgagggtgtggacagacacacacacatatactgctgctggaaggccaaatatgacaattcctaaggaggggaatctgttaatatctaataaaattatgtatgtatttacccttgatccaacaatcccacttctaggaatgtgtcctagagacacagctccttaaacatgaaacagtatacagttattcactg

SEQ ID NO: 338853 - DNA, 395 bp, Homo sapiens
aagtctacgtgttttcacttaatcccccttaagtccaggctggtgtagggagacagcctttcttcccccttctccaaagaatgaagcctaactctggggtgaggaaaggagggtggagtagaaagggattgaagagtctgactgtgtcttaaacagatttcaaaccatccttattttagtttctcactttgcccccacttccagaggcacctagtgcctcccattcctgagctttttgtgaatactgtgttgcaaatcaagttgattcttcacctttcccatggatgacttaaacccactgatgtgctaagccagctctcattcttatgtctgctttccaaacccagactttgtattgcctcctctccaatcctccacgtccttaaagctctgtc

SEQ ID NO: 338854 - DNA, 212 bp, Homo sapiens
agggggatgaggagggcaggggaggaagaggaggcagtcacgctagagcctcgactgtatgggacagttttctgaggcgttcacgtttagggactgactcgtcagtaccatttattatgctgttgcagaggaaactgatgcccagcactgctggctgcacggtgaagcactccatagtatgattattgctatcacccttgtgtcatcctcct

SEQ ID NO: 338855 - DNA, 441 bp, Homo sapiens
cctgagcagcgggctcatttcccatgagcaggcttgctgtggcaggcaggctcacctgctagaggtggtctcctggcttagaatgggagcacacctgtgggaatcgcagcgcttctctacctgagctggatgtagattgtttgaaaatcctagttgtgcactgcgtttccatcgatccctttcatgctcccacttgttcctttagttccaaatagcaggctggtgttgagaattctgtcatcatggggcgtttttttctaaatgtgagaaatgtcggaagcatgggtgttctcagattgctttagccactgatgattttccttttagtgtatggaaagaatgattttcttctcaatttctcccctctaacctcctgcatgtagatttatggattctaatcgggacctttctttgattcagtgccaggtacacaggccccga

SEQ ID NO: 338856 - DNA, 419 bp, Homo sapiens
tacctggcagtgaatagactgcagataaatctatctagaaagataaagttgaggatcgatcagccatgccttttatgccaaattaagaagttggagcattttttgtttaatttaggttgaaaaacaattgaggaaattcctttaaatgggaaggacatgatcagatttttatttcagatcagtttggcatcattctaaactagctctgtccagtacaaaaaaatacaatgggaagcaaaaatgcaaaccacatagtaattttcagtgttctattaaccacactaaaataagaggaaacaggtgaaattaattttaacaatatattttacttaacccaatctatccagattattgtttgaacaagtcgtcaatataaaaattaatgaagtatttcacatctttttcatagtaaatcttca

SEQ ID NO: 338857 - DNA, 649 bp, Homo sapiens
catattaatcttcaaaaagcacagctctgattacatccctcccccattcatttttgcctaatgaattagacaaactgttcccattcgaggtcctccacaatccatcctagtccatccctcacaccacctgctccagccaagcaaaactgctgctctctgttcctgattacatctcacccttccctcatctccccctttactctcagtcttttctcctccctgttcacatccctagaagccactaagaaaaacctcctgtgattgctgtctatgggtaggcagaaaactccccccaacaaaattaattcacttcctaatccctggaaactgtgaatattatcttacatggcaagaagagtattaccttacatggcaaaagatatgactaagctaagagagaagggatttatcctggagtatccgtatggattctcggcgtgtgcaactgggattggagtgtccagatgcttttaataaaaacaacccccactgcagtctcaccctccaagtgggtatggagactcggcgtgtgcagcaacaacttcgtccaccgggacttctgatgctaagatggagtatggagcttcggcgaaacaccacacccgtgtaccaaggaagtcgttatggacgaagttgttgcaggtccgga

SEQ ID NO: 338858 - DNA, 413 bp, Homo sapiens
aaaacaaaacaaaacaaaacaaaacaaagaagatttggtagaattctcctgtgggagtttggagaaagaagtagaacattattattgtttttttcctgtcatatttctaatggaaacaggatgattacaagagtgcaggggaaaggttggggaaaagaaatgtgacttctttcacttttacattattgaaattgttatttaaattgtattctataaccataattaaatcttcataaacttttcacttaatgatcttagcattcattgatggtctttgcctgaatcttatttcaaaaggcaaggcatttcaaaaatgctgatttttaaaatttctatcatttcttatacacttattagctcacatttttctgtaatgagtttacccttatcaagtgggactctttggttagctg

SEQ ID NO: 338859 - DNA, 514 bp, Homo sapiens
ccatgtcacaactatggaaaacttggcaggcaggcctgggtccaaaccccagctctgctgtttacaggcttggagacattcaccaggccatcactcttttgcgcctcactgctgtgtctgtggaacaggcaccgagcaaatggcccggggcactagcgcttcccgccttctgaaggtggggcttgaataagaagaggaatgcgtggactggagggaacaagcatttgcgtttcaggggaaagaactaatcaaacatgtcaaaactcagcagtggaaaagagacagtaactaccaggtgattctgtcacgttacttcatgggttttgtaggctgaatgcaatgtgtctttaagcacagcttagcctgcagtgaaccgtttatatataaactgatagaattcagggaactcctattttcacaataaaaataacaggctttatcaggagaattgtttcaaagagcaaaatcagacaagcatgagtgtgtgttatcagaaaagagacaggtgttctca

SEQ ID NO: 338860 - DNA, 81 bp, Homo sapiens
atcttcaaaatatttccagactctagccaataaccaagtccaatgatgttatactattccaagctaccattgttcctcatc

SEQ ID NO: 338861 - DNA, 465 bp, Homo sapiens
ctctcatttcaaaattagggactggccttaaaatgctgacaccattgtgaggggtgagggctcctgcagacacctctggactgactccaactcagaagactcgggctctgcggtctaagggacacacggtggcttggtgatgtcccttggagagtggtgtcctccctgggaagccccaggagctgccctgtcctgcccccagtgtcacctgccaggctaactttcagtaactctataattccgtgatcaaaactcatccaaggtataaatcagtattaccagattctctttcgagagaatgttttgctaagaaagtgatgaaaaaaaggagaatactactaaatgcctcaaagtggacaggagaaaaaaagacatagaaataaggacacggtcctttgaccatcttcttgttttgtccaggactatccgataccccatcctcacagttaggccaatgatcctcat

SEQ ID NO: 338862 - DNA, 103 bp, Homo sapiens
gggctctatttttttagagcagttttaggtactcaggaaaatggagtggaaaataacagagttcccatatattcctttccctcacaaatgtgcagcacaccct

SEQ ID NO: 338863 - DNA, 435 bp, Homo sapiens
tgggggcttttaaagaggaagtgaagggtaactcatctctatcctactttacatgccccacctaagtccaactcccactgcctgtcttctaagggacatcttgtggcttgttctctgctctgctcgtattcagtctctacgtccctcatgctttctcatggatttacaatgattacttactctcaaacttatatttccagccctaacctctccagtgatcatttgttaacaagattgtgttaaaggaagcaacaaaggttcttctattggatgtagttgaaaaagcagaactgttgctctggcctaaacattaactttggagaggtttaaattctgtttagaagttataaatgagcttaatatcatgtgatttgcatgataagttattttaaagagtttaaatccatgattgttcaaaataggttgttttatttt

SEQ ID NO: 338864 - DNA, 277 bp, Homo sapiens
aggtggcagttacacttgtgggagggaatgtgatgcccaggaatttgtgtaataattcatgtgttagacagttgaatcatgaatagtgaatgcagaaagcaaacatatgatgtaaattcttgaatgatatttatctcggagaatcaggagaccctgaaatgagcaaaaagaggatgactgccccatgaaaggagccctagagggaagagcgaaaagagatagaagaatgtattagggtgtgaacatcacacaactgatggataggataagacctgag

SEQ ID NO: 338865 - DNA, 648 bp, Homo sapiens
cctgaaacgccgtatacatacaaatcatgatggacgaagtgtgcgcaacaacttcgtccatggtgattgctcagtatgggcattcggcgtgtgcagcaaggacttcgtccacacggacctgcaacaacttcgtccagcacgacttttctgcgtctggtgactcggcgtgtgcatgcacacgccgaggaaccatacacacacacacacaccatgatctagttatcaaaaaactttttctgtcatttatcagctggcttattaaaataaatcaatttttccctagaaaatccttagtaattctccacattgctaagatacaccatagcaagattctggatggtgagaagttaatggtccaaagtaccgcaaccttaatagtccaacctatcttcaatactttttacaataaccacacaaagtggtccctagtgaacataaacccttaagtgggctgaggaaacttatatgtcttcttgatagaactttctgcaatgatggaaatgttctctatctttgcagtccaatatgatagccactggccatatatgactatttaaacttaaaaattcataatgctcaatagtaacacgtggctagtagcaaactgtattggaaagcatatttacggccctctactcagtgtggtct

SEQ ID NO: 338866 - DNA, 496 bp, Homo sapiens
caggagggagggttcacgtgtgtgtgtgcaagggtggatggtagtagtggtgagtgatgagaggcacacagagccttcctgggtttggaaatcatatcacaatataaaaccagtctagtatgtatgaaaggtgatctggtcacttctttactctagagaaagggccagagttagtgtagatgcatccttatgaaaatgtcatctctctaaggattgcaggagcaatgaggaaatataattcatacaatctcctccagggttttagacctcaagataggccagagagagattaaggaagccagtagtaaagctaattgtggtggagatttgcctatcatggtgagatcctgcatagagatgtctgacatagcatcttaaatacagcatccaaagaatggaatgttcctgttcagggtcaggccttttaagagcaaacctactggctgggcgcagtgtcagtggctcacgcctgtaatcccagcactttgggaggccg

SEQ ID NO: 338867 - DNA, 579 bp, Homo sapiens
ccaggctggagtgcaatggcaagatcatggctcactgcagccttaaactcctggcctcaagtgatcctcctgcaccagcctcatgaataacagactataggcatgtgctaccatgctcagctaattaaaaaactcctttttttggtagagctggggtctcactttgttgcccaggctggtccggaactcctggcttcaagcaatccttccaccttggtctcccaaagtgctgggattacaggcacgagccaccatgcttgggcacatggcagtgtgaaagctagactttttggtccttggtatccttgacctaatgtgctagaatcaggggttgcacgcccactcattggccaggtcacatgatttacgcaggaacataatttacggaatgggcagggtttgagggacacacaggtgagtggaagggctggccctgctctagcaggttgctgggatgcaggaacggggaggttgtccaggtcatggcagcacgtcctctaccaagggatgtggacaccagcccccgagcactggctgggggagcagtgggttgccttcaccagccaaggcaggaacttg

SEQ ID NO: 338868 - DNA, 578 bp, Homo sapiens
aaaggatggggacaattaagggctgtttcggagaatttcacttgccttatccactatgatggctcctatcttattggccaaggaatcaatgttgagttctgccaactcccaagtctgtccaatccaagtatacattcaggtactggcaaaatgaccactgggggcattcatggactcagggaacacaccatagccaaacctgagccaggacttcatttattatgtagctcccactgttcctattctaagaggtcatgatgacaaatatcaacaaatattaattttaattcaaattctgtgtccaatagtccttgaaatatttaggtattcactgtcctcctgtgatgagttactggattaaatggccatagatagttttgacaaagcacaagcaaattattaccaaataatctcaccatgatattggagtcttcctgtttatggcccaggctccccttcattcaaaaagttctgaatctgaaaattggctcagattcagaaactgggcatctattctgctctaagccctaatcaacccttaattgttgctgactatataaattgaacaatactgttgt

SEQ ID NO: 338869 - DNA, 261 bp, Homo sapiens
gagcagggttcattcagagctggggtctgcctgactgagccagtactctctccattttaatagtttaataaaaattagcataattaacgaacatctgtatgatccagagtggtgcaatttggcacttggaaacgagggcttaaacatgattgctgtgagtttaatgttgttttaattctttttggcactgtgcagtgaaataaacgtttggtggtgatagttctcggccggatctcatttgcatttttctccctttgatta

SEQ ID NO: 338870 - DNA, 590 bp, Homo sapiens
ctcccaggttcaagcgattctcttctttcagcctcctgagtagctgggattacagctgcgtgccaccatgccctgctaacttttgtatttttagtagagacagggtttcaccatgttggccaggctggtcttgaactcctgacctcaggtgatccgctcgcttcgacctcccaaagtgctaggagtacaggcaagagccacagtgcctggcctgtttatgaagattttataaacagatttctaaattcagaaagtatttaagggatcccctctggtggcactttaattcagatggggtccacaaaataggaaaatatttactaggaaatttgaacaatcttgaaatcactgaaaatggtgatgtgattctccagaaatttctgattgggaataagcactttgaagtaattggctatcttattaatctgctgttcctgaatttccccttagtagcggacatgctttattgtattaagttggataaccaccttagtagcaaagatgggcttgggcttcagtctggtcaataggcatcttattcaggtagatgccagatgggagggatggggacagcttagtgaagaaggatg

SEQ ID NO: 338871 - DNA, 310 bp, Homo sapiens
ttagtccctgccctcaaagagtttacagtcttgtgaaatccaagacttaatatgggacttagataacatttacattttacagttaaattcacaattaatatgcatgatggttctattttccatgagtcacaacttaccggtcagcctctgctgttattgtcacaggtaagtcaattgtccccatggccatttactagtcagatgggataataaaaactaaatctgagatgtgacaagtcttgggtagagtacaatgtatggtcctctctacttcacgctataatcacactattgcactacagcctgatac

SEQ ID NO: 338872 - DNA, 255 bp, Homo sapiens
gaggcgctgaaacacttttaagtctctccagggaactgccgcagtctctaacctttcgttcacacgcccctgatggtggccattggacttcgcttcccggcaagcctccgcagactggcctcacagagggtcaggtctggactattccccagcatgcttggagctcatgggcgatcccgccccctcagtcaatggggaggatacgtcgaactccatttcccagaacacaccagggctcgctgtggcaactgcact

SEQ ID NO: 338873 - DNA, 335 bp, Homo sapiens
ctgttaacatcgacggtttctcatttcagatattttatctggctggtgtaatattgtacatacctaggctatggcctgcttttgccacttaagacgtttcccatgtctttacaagttttcataaaacagaattcaaaaaatggctaagcagctagactactgtgtaagtatatacaataggtttcttaaacattcccaaatagtggatgatccgattgtttccaattttaccatcttataaataatgcttatcaataaatgtaggcacctttatgtgtcagtctgtccttctatcgacttgggataagtttctcttttttttttttttttttttt

SEQ ID NO: 338874 - DNA, 235 bp, Homo sapiens
tgggacactggctaaaggtaaaaccagcctaggacagctccctggggcctgagggtctgcagatctggactcccttccaggcctccctccctccaagccagcttccatgtccactgcagaaatagcttccactcagtcccaaacatcatgcctacaaaataaacaagaaaatatgctatggttggcatagaaaccttccacagctacctttctccgtatcctcaccacatgccat

SEQ ID NO: 338875 - DNA, 228 bp, Homo sapiens
agttctgcaagacattctaatatcctcctagacatttgtacagaaaattatgtataataaaaattgctacccacccattatcacttatcttaacaatagttttgctttaagttacaagtttgcttgtatggaatggcttctcatcttctaacttctcttaaatttgaatttattcattttaaaatagcataacaatttagttacttgagtacgtctctaggttagttg

SEQ ID NO: 338876 - DNA, 362 bp, Homo sapiens
atccagacaaatcttgcttgtcctggaaatgcttacaacataataaagggagaaagatgaataaaccaacaagagcagtaagtctcaaaaatggcaaattgctgtgatcacttgaataggtcagtggagtcatcgagtcatgtataaaggaatgtgggactatgaagataaacagtcaatgagaaaaatagtgcatataaaccagtaaaagtcttagtggtaaagtgttcatgtaatacttcattgataattaacaattttcattgtcacattctatattgtatctaattcattagtttattcagtattaagtgcccctgtgtactactgtttattaagtggcactatgattagggaaaaac

SEQ ID NO: 338877 - DNA, 950 bp, Homo sapiens
ccatctcatctcctacccatctccaaaaaccaacagcaaacctccctatgtcctcaccctcttctctgatgatcctctcaccttccggctaggtttgaaattagtctccaggaccagggctctcccctgtgaatcctgtaccacttggacaggcagtgagctaggtgtctgccctcctcactgccacttcctgccccttcctcctccctagagaaacctgctttccaagtcactcctcaatagccccctagcaacaattccctcttgcctgcaccataattttcccctttcctggaccattcccaatgcacagaaacatccagtattttccttgggaaaatgacatgttccccgaccccactgcatccttcaactaccacccacttctttgctccacaggaaaaatcactgagatggccataccatctccatcttctttctattctcccctgacttcaatcaggcctctgaccccatccagccaccaagactgctctcgtggaagtgacaactgataacctccacgggtaatctgctcttaacttctgagacccatcaacagtactgggtcccatccccttcctaaagcactctcttccctcactttctggggcatccttctctcttggttctcctcctccttctctcgccacgcctctcagctgtctttgccggcttctgctcatcctctaaacttctacacacctagagaaaaccagaggtcaaaccttggacctcatcttgacgatctcatctctctcctatttcctcccacaaactctacagtgttacgtccaactgctttcctcacatctccacttggatgctacctggatctcagacttcacgtccacactgaaatgattttcctccctgaacctgctcctcccacagtcacttaatggcaactccacctctccagatgctcaggtcgaatgccatgaggcatc

SEQ ID NO: 338878 - DNA, 281 bp, Homo sapiens
gtggtgctgtcttctagtctttccaagcatgaactgggaggagctggagaaggctttgcaaggcttcccttgggttgggttgcactgcccaggcaggagggaaaggcagcattgatatattgatcacctgcgacacatcaggtgctctcatgttcgtttcccgcttcatcccctatccatgctgccggatgggtggtaactgtggacagatggaagcagagactcagggaggtagaagggcttctctgaggtcacacctggctgcacctggtttgctcccc

SEQ ID NO: 338879 - DNA, 245 bp, Homo sapiens
atcgtctagaggttactgtatccggggaggggcacggaattcactcttgttaccaggctgagtgcaatggcagcattgatatattgatcacctgcgacacatcaggtgctctcatgttcgtttcccgcttcatcccctatccatgctgccggatgggtggtaactgtggacagatggaagcagagactcagggaggtagaagggcttctctgaggtcacacctggctgcacctggtttgctcccc

SEQ ID NO: 338880 - DNA, 319 bp, Homo sapiens
gacacagatttaaaccatatctttctcccctgaccccacagatctcatatccttctcacattgcaaaatacaatcatgccttcccaacagtcccccaagtcttaactcattcagcattaactaagatgtccaaagtctcaggtctcatttgagacaaggcaagtcccttctgcccatgagcctgtaaaatcaaaaacaagttagttacttccaagatacaatgaaggtataggcattaggtaaaatactccagttccaaaaggtagaaaacagcaaaaaagggggttacaggcactatgcaagtcagaaacccagcagg

SEQ ID NO: 338881 - DNA, 483 bp, Homo sapiens
caaaaaggtaaacaataattttcaagtgtgatagttcaaattcctctgcgagatctactacagagaaaggttctttgacatacggattttctttaaaggaattgatgtaaaaatttaagtatgtctgggagaagctgaaatcactctaggacttcactccctagcaaataaagtgatcatttacttggactcataggctattaaattattgaaagatactgtacaaactatggcactgtcacttttaaaaaaatgtttaccactctatcttgtgccggatcttcacagctgtgacatggtttaaattccataatccatccccaataggagcccacccaaagccaaaatcaaatttatccatgcactataagatgatccatcttaacctgatacagtcatcatactgtagtttttggaagggctggttctgcccaagagaaattcgtccttacagtttattcagctgtctaccatttgtatgtc

SEQ ID NO: 338882 - DNA, 783 bp, Homo sapiens
cactcttccgtgctgggaatataaaaagtgaaggaacaaaatccctgttctaggccgggggcgatggctgagacttgtgatcccaagcactttgggaggccaaggagggtggattgcttgagtgcaggagttcaagaccagcctgggcaacatggcgaaactctgcttctaccaaaaaaatgatttcaaataaataaatcactgtcctcgtggaacttataaatatgtagtgtgtgatgatgataaatgctatggagaaaaagcaacacagatggggatcgagaggaagttaaaatttgaaatatggtcgtcggccgggcgcggtggctcatgcctgtaatcccagcactttgggaggccaaggcgggcgaatcacctgaggtcgggagttcgagatcagcctgaccaacatggagaaaccccgtctctactaaaaatacaaaattagccaggcgtggtggcacatgcctgtaatcccagctactagggaggctgaggcaggagaatcgcttgaacttgggaggcagaggttgctgtgagctgagatcacgccattgcactccagcctgggccaataagagggaaactccgtctcaaaaaaaaaaagaaacatagtcgtcagggaagaccttactgcagagacatgtgagtggagacctgaaggaaatgaagagggaaggagttgtgctgatatctaggaggaggaatattccaggcagacggaagagaggcacaaagtctttgaggaaggggcatgttgggcatgttcacaggacagcgagg

SEQ ID NO: 338883 - DNA, 685 bp, Homo sapiens
ggtcaggacacagagtggcacagataagaaatgaggtcaggacacagagtggcacagactggaaaagaggtcaggacacaagagtggcacagacaggaaatgaggtcagtacacagagtgctcctgacaggaaatgagatcaggacagagagagctccagacaggaaatgcagtccgggcacagtgtgttgcatacaggaaatgaggtcaggacaaagagtggcacagacaggaaatgaggtcaggacagagtgacacagacaggaaatgaggtcactggctccagacaggaaatgaggtcaggacagagagagctccagagaggaaatgcaatccggacacagcatgttccagacaggaaatgaggtcaggacaaagggtggcacaaacaggaaatgaggtcaggatacagagtgctccagacagaaaatgaggtccggacaaagtggcacagacaggaaatgatatcaggatacagcatgttccagacaggaaatgaggtcaggacatagagagatccagacaggaaatgaggtcaggacagagagagctccagacaggaaatgcagttaggacacagcatgttccagacaggaaatgaggtcaggacagagagagctccagagaggaaagcaatccggaccactgcagccagagacacatgcactccagaggaccgagcata

SEQ ID NO: 338884 - DNA, 343 bp, Homo sapiens
ggtcaggacacagagtggcacagataagaaatgaggtcaggacacagagtggcacagactggaaaagaggtcaggacacaagagtggcacagacaggaaatgaggtcagtacacagagtgctcctgacaggaaatgagatcaggacagagagagctccagacaggaaatgcagtccgggcacatgagtggtgttgcccgtgggcctggaaggtccagccgagggttggggcctgcggatgtcgcttctctgaagatgagaagccagggcgaggccccccccccacatctggaaggttctcctgcgtcgccctctccttcccggggggatcctctatgagtcta

SEQ ID NO: 338885 - DNA, 1320 bp, Homo sapiens
ggtcaggacacagagtggcacagataagaaatgaggtcaggacacagagtggcacagactggaaaagaggtcaggacacaagagtggcacagacaggaaatgaggtcagtacacagagtgctcctgacaggaaatgagatcaggacagagagagctccagacaggaaatgcagtccgggcacagtgtgttgcatacaggaaatgaggtcaggacaaagagtggcacagacaggaaatgaggtcaggacagagtgacacagacaggaaatgaggtcactggctccagacaggaaatgaggtcaggacagagagagctccagagaggaaatgcaatccggacacagcatgttccagacaggaaatgaggtcaggacaaagggtggcacaaacaggaaatgaggtcaggatacagagtgctccagacagaaaatgaggtccggacaaagtggcacagacaggaaatgatatcaggatacagcatgttccagacaggaaatgaggtcaggacatagagagatccagacaggaaatgaggtcaggacagagagagctccagacaggaaatgcagttaggacacagcatgttccagacaggaaatgaggtcaggacaaagggtggcacagacagaaaatgaggtcaggacagagtggcacagacaggaaatgaggtcaggacacagagagctccaggcaggaaatgaggtcaggacacagtgtgttccagacaggaaatgaggtcaggacagtgtgctccagacaggaaatgaagtcaggacacagtgttccagataagaaatggggtcagaagacaccactcagtcatattaatcagccaaaggatagatttatcaaaactcaagacgcaaggtgtcagcacgtggggctgtggcaggtacaggtctaagcagctggactgaggtcaagcaccatagtgcttgtcacactcaggtacgtgggggtcactcaggtacatggggtcaacagaagactatgcagcaagaatggggagcgtccctgcctgtggaaagttggggaggacaggatggggacactggctgtcatcattcagcttttggtatgccatggactccttagctaaagataaaagacaaaagaaaggccgcatggtagggtgaccgacacctgagagaaactggcctaacaagcacgtggggtgtggtgccagtccacagcacgcaccacaggacacagaggtgacactgtggggcagtgcccagccatgtcccctaaaagccacctgcacccaagtgcacagcacaggcatttggaggaaagaagtgtatgttgtggctgtctcca

SEQ ID NO: 338886 - DNA, 469 bp, Homo sapiens
cttttgttctgttgctttggttggcgatcgggactcaccatgttagacctgaggttcgtggtgggatccaccggcgtggccctgggtggctgccctgtgtgctcagggagcagtcacgggccctgagtggtgttgcccgtgggcctggaaggtccagccgagggttggggcctgcggatgtcgcttctctgaagatgagaagccagggcgaggccccccccccacatctggaaggttctcctgcgtcgccctctccttccaggcacatttggccgtccccttttctgcgtgtctgtccccaccatcgtgccctcttcttctctggactgcgtttggatgatttctttgaacggtttttattctggaaagttctgctcgagcatctggtatctccctggtgtttgggatgtctccttctcattcccccgtgtcttgctttaagctgcgtgtcctcgtgtttccgctgccc

SEQ ID NO: 338887 - DNA, 188 bp, Homo sapiens
caacacttctttcgctccaaatgcctgtgctgtgcacgtggggtgtggtgccagtccacagcacgcaccacaggacacagaggtgacactgtggggcagtgcccagccatgtcccctaaaagccacctgcacccaagtgcacagcacaggcatttggaggaaagaagtgtatgttgtggctgtctcca

SEQ ID NO: 338888 - DNA, 466 bp, Homo sapiens
attggttggggcaatgattttttggatatgaccccaaaagcataaggaataaaagcgaaaatagagaaatggtattgcatcaactgaataagcttcggcacagcaaaggaaatgatcaacagagtgaacaataattgacagaataggagaaaatatttgcaaaccatacatttaataaaggcttaatatccaaaatatatttaagaactcaatgatacaaaaacaacccaagtttttaagatgaacaaaggacttgcattgatggtcttcaaaagacaacatacagtgtacatcaggtatgtgaaaaaatgctcaacgtcattaatcatcagggaaatgcaaataaaaaccacaatgagatgtcacctcacacctgttagatgtcacctcatacctattatccaaaagacgataataagactgtaagtgttggtggggatatagagagaatagaactcttttacac

SEQ ID NO: 338889 - DNA, 382 bp, Homo sapiens
tatcagtcatacttcaacatgttctattaatcagaagcactgtgtgacttttcactaacatttatttctaaattactaaatattattgtattctacagtctcagagacaacagcatacttagggcaattttctgagttgtttaatgatggtggctaattttagcctccaatagaaatcaaatggtcaagagccaaataaatacaagctgctttaaaatgaacatgcattacagtgagattcaacaggaaactgctgtttataaacaagttatgctttcatataaaactaaactcacaaatacatagacattttcaatgagagatttactgtctccttttaaccttcaaaaatgtgtgtgtgtgtgtgtgtgtgtgtgtgtgt

SEQ ID NO: 338890 - DNA, 304 bp, Homo sapiens
ctttttactctgtaggagctagaggtattgaaatggaaccatatcccagagcccacatccctccgtcatcagagttcctcattcaggatccaccagtgtgtccctaggtttggcacgttgagacgtcctcacgtttggtgctctgtgaagctgggcagccctcagagaggcaaagaagtcccaagaggccgtcctgcctcagggctctcaggaaagagccgcccgcgtccctggctgggcttccttggtgcacccagctcatttctccttccctctctgtagaactcacattgtccccgtggaa

SEQ ID NO: 338891 - DNA, 334 bp, Homo sapiens
tggtaatatgtggagaggaagttacccaggtctgtgtgtctctttccaatatgatttgacccgtctgctgtccctgtgttctcttgtgaagaaaggggccgcttctccttgatataggcaatagcccactctaggtaggaggtgttcactaatggtgaaagaataaatccgtaactgtggcttctcagctactagaaaggcaggatacagtgtggtgaagtcctgagaatcagctcatctgagtttgcatcagactcctgctttagaagctacttgaccttgggcaagtcatttcaactctcagcccccattttcaggataatggggatgataa

SEQ ID NO: 338892 - DNA, 209 bp, Homo sapiens
tttgtcttgtggtttaaaggccagcttagccacagtaggacagaataccaggtagatttctaagctcaaggacagtatctgtggacccattagggacctgggggaactcactgccctgaagggaaagacacaaacctggctggcttccccacctgctaatagtaggaaccctagggccttgagcgaatttaggcaaatttaggcggtag

SEQ ID NO: 338893 - DNA, 180 bp, Homo sapiens
tcctttcatttacgtagtagcctttgttaccttccttatgtcgggagtgttccctcatccctcttttggcactgcaggaaggacattgacagtgtgaagtctacttcaggccatttctgtcggtctgggcaagtcactcagtccagttttcctatggtgccctgttaggtttaacctttg

SEQ ID NO: 338894 - DNA, 292 bp, Homo sapiens
tggcaataataataattttaggcagcccttactgtgtgtcaatcacggctctatgtattaactcatttaatcctcacagtgaccctgtgagagggctgcaattattatcctcattttacagatgagaaaacagacagcaaggttagaagtttgcccagaggccacagagctaagaagtggcgaatctgggatagaaacccagacagactggctccagagacctgctcttaacgacctgctctgcctcctacccttggtacccatgtgcctttctagggctggctcagccact

SEQ ID NO: 338895 - DNA, 620 bp, Homo sapiens
atctaagcaggttttcactatatttcaacagtacctcccccttccacaacctctaaatccaacctaaagatggtagtcagagtgattctttacaaaatataaatgtaataacattatcgtgctttagaccttctggtggcttccactgtcctcaagataaaagttcaaactattcacttcagttaataaaacctacctcttctctcaacattttctatattttcaccagtctagcccacagcagaagtttatccttctgctcctaaaacacatgaagattacaatcatgccccttgcaatttgctcattttcaggttagtcaactccagtcccttcaaccattactcacttcacatggtctttaggacactctccccttcctttcttggactcctaatttaatgaattctatttgttcttatccctcttaaaatgtggctttagggccgggcgcagtggctcacacctgtaatcccagcattttgggaggccgaggtgggcagatcacgagatcaggagttcaagactggcctgaccagtatgatgaaacctcgtctctacaaaaattcaaaaattagctgggcgtggtggcgcatgcctgcagtcccagctactcagga

SEQ ID NO: 338896 - DNA, 954 bp, Homo sapiens
gggcagaaaagctctgtttgaatcgactcaccgggacaggcagctgaggaaggagcgccatggaagccacagatgggatgactctgctgaagcaggaatgcacccagccgggaggccgccagccctgccagccgtcagcacacaaaggcaccgctgtctgctggggaggtcgggagcaggccctgtgtgcctaaatgtgcctgtggaggcagcgtgggctctccaagatggggcgtgttctgtgtctgcacctgctggtctctctgtgctggctgagctgagcacctactgtgtgtgtgccgggcactctgcagagagtgtacagacagcaggctggggcctgcctggaggaggtgactgtttcgtgctcagagacaggcaaatcagcttcaagatgagagccagagactagcacagaggaggggcgccccaccgagcctcgagagcttctggggtgggtacgggcctttgatagatgacacagcacttctatagggcaccaaaaaggggctgctgggcctgtctcagccttagacttgggaatagtgccacgtattgcctttgagcaagaggaagtgtgtcgtggaggagagactgtgggttttggactagacagagcaggaatctgcctctttagcttcctaactgcaacctggctggagcaagtcaactcactctaattgagcctttgtcctcttgtcctcctcttgggcttcatgacactcctgggcagggccatggtaagaagtaagacgccgtgtgtgtgatgcctgcgataagtacctgttagagctggcagtaggagtccaaacacttcttgactgaactgccccgccttccacggaggcttcaaatcgctcattccttccgtccacactcctgctcgcttaatgaaggtgatggccaaatgcatcttccaggcagccatttgaatctccccaaaaacactctccc

SEQ ID NO: 338897 - DNA, 229 bp, Homo sapiens
cacaatgtggctttgcttctttaagagctcaagttggctgtttggtggagaatggttttggtttgggctcaagggagaagagaatgtaaaagtggagagagagctattaggaggttattgcagtggtccgaaagagtctggtggctttagattacagaaatagtgatacagatggagagaagagatactgatttgacagatatttttgtcttggtgatgtgggggctga

SEQ ID NO: 338898 - DNA, 204 bp, Homo sapiens
ccaaatattctcacaaaggctgttaaaagaaataaaagcttaaggaagcttaaacgctttccctgactctgaatgatgacgcactgaaacaacaggctgtgtgtgtcacagccgtgcctgtgccaacaggaagtttgggctgttaactgggcttccaggtttaggtggtccaagaactgctgagcaaacacacagcctttttct

SEQ ID NO: 338899 - DNA, 3069 bp, Homo sapiens
  misc_feature (3068)..(3068): n is a, c, g, or t
aggtggcggctttctgcacgtgtttctcagcccaggtttcagtccagcggaactggctacctcggaatcccaactgctcctttagggtgtcttccgcgattctccgagtggagttaggcgcctgccgacacttccctaaccttggaggcccgggacttgattttcatgaatgaacggagccgggactgactttgcctacggcaaagaaggaaaaacggtgccctactgtcttcagacgtcgcaaggatcaagaagatttctttcttcatgaccctgcccttgccagaatttcctgcgctgttccacctcattcaacttcagcttgccttgcgccatggactggcagccagacgagcagggcctgcagcaggtcctgcagctgctcaaagactcacagtcgcccaacacagccactcagcgcatcgtgcaggataaactcaaacaactcaatcagtttcctgacttcaacaactacctgattttcgtcctgaccagactcaagtcagaagatgagccaacgcgctctctcagtggcctcatcctcaagaacaacgtgaaggcacactatcagagcttcccaccccctgtggcagacttcatcaaacaggagtgtctcaacaacattggcgatgcctcctcgctcatccgagccaccattggcattctcatcaccaccatcgcttccaagggtgagctgcagatgtggcccgagctgctgccccagctctgcaacctgcttaactcggaggattacaacacttgtgagggagcctttggagccctgcagaagatctgtgaagactcatcagagcttctggacagtgacgccctcaacaggcccctcaacatcatgatccccaagttcctgcagttcttcaagcactgcagtcccaagatccggtcccacgccatcgcctgcgtgaaccagttcatcatggaccgggcccaggcgctgatggacaatattgacaccttcatcgagcacctatttgccctggctgtggatgatgaccccgaggtgcggaagaatgtgtgccgtgccctggtgatgcttctggaagtgcggattgacaggctcatcccccacatgcacagcatcatccagtacatgctgcagaggacccaggaccatgatgagaacgttgcccttgaggcctgtgagttctggctgacgctggccgagcagcccatctgcaaggaagtcctggcctcccatctggtccagttgatccccatcttggtgaatgggatgaagtactcggaaattgacatcatcctgctcaagggggatgtggaggaggatgaggctgtccccgacagtgagcaggacatcaagccacgcttccacaagtcacgcacggtcacactgccccacgaggctgagcggcctgatggctccgaggacgcggaggatgacgatgatgatgatgctctgtccgactggaatttgaggaagtgctcagcggctgcactggacgtcctcgccaatgtcttccgggaggaactgctgccccacctactcccactactcaaaggcctcctcttccaccccgagtgggtggtcaaggagtcgggcatcctggtgctgggcgccattgctgagggctgcatgcagggcatggtgccctacctgcctgagctgatcccgcacctgatccagtgcctgtcggataagaaggccttggtccgctccatcgcctgctggacgctgagccgctatgcccactgggtggtcagccagccacccgacatgcacctcaagcccctgatgacagagctgctcaaacgcatcctggatggcaacaagagggtacaggaggcggcctgcagtgcttttgccaccctggaggaagaggcctgcacggagctggtgccctacctcagctacatcctggacacccttgtctttgcctttgggaaataccagcacaagaacctgctcatcctctatgacgccattggcaccctggccgactctgtaggccaccacctcaaccagccggaatacatccagaagctgatgcccccactgatccagaagtggaatgagctcaaggacgaagacaaggacctcttccccctgctggagtgtctgtcatcggtggccaccgccctgcagagtggcttcctgccttactgtgagcccgtctaccagcgctgtgtcaccctggtgcagaagacactggctcaggccatgatgtacacccagcaccctgagcagtatgaggctcccgacaaggacttcatgatcgtagcactggatctgctcagcggcctggccgagggcctgggtggtcacgtggagcagctggtggcccgcagcaacatcatgacattgctgttccagtgcatgcaggactcgatgcctgaggtccggcagagctcctttgccctcctgggagacctcaccaaagcctgcttcatccatgtcaagccctgtatcgccgagttcatgcccattctgggcaccaacctgaacccagagttcatctccgtctgcaacaacgccacctgggccattggtgaaatctgcatgcagatgggggcagagatgcagccttatgtgcagatggtcctcaacaacctggtggaaatcattaaccgacccaacacacccaagacactgctggaaaacacagccatcaccatcggccgcttgggctacgtgtgcccccaggaggtggcacccatgctgcagcagttcatccggccttggtgcacgtccctcaggaacatcagggacaacgaggagaaggactcagccttccgcggcatctgcatgatgatcggtgtcaacccggggggcgttgtgcaggactttattttcttctgcgatgctgtagcctcctgggtgagcccgaaggatgaccttcgggacatgttttataagattctccacggcttcaaagaccaagttggggaagataactggcagcagttctctgagcaattcccgccgctgctcaaggagaggctggcggctttctatggggtctaggtgatcatggagactgccagcaccaccactgagatccggcttgctacaaaacccgaaaagcgctgagttng

SEQ ID NO: 338900 - DNA, 2088 bp, Homo sapiens
cccatactgttgacattgtattagatataagtgatttagagatgatgctaagtgtacaggagaatgtgcataggtgcatatgcaaacactatgccccccccaccgccccccacctgttttttgagacagagtctcactctgtcacccaggctggagtgcaatggtgtgatctcggctcactgcaaccttcacctccagggttcaagcagttctcctgccttagcctctcaagaagctgggactacaggcgtgtcccactatgcctggctaattttattgtatttttagtagagacagggttttgccgtgttggccaggctggtctcaaactcctgacctcaagtgatctgcctgcctcggcctgccaaagtgctggagattacaggcatgaaccactgcgcctggccctaacactgtgccactttatatcaaggacttgcacatccgtggatttttatatctgcagggacctggaaagaatcccccacggacactgagggatgaccgttggggcactgccatctcccatttgcagatgtgggctggaggctagggaggttaaggaacagctaggagctctagaactggaaagtggcagaggctggacatgcaccagggactgtgccccctgagctgtcctggttagaaggaggggagcctagccacactgatcttacttgaatccccaggactcgatgcctgaggtccggcagagctcctttgccctcctgggagacctcaccaaagcctgcttcatccatgtcaagccctgtatcggtacgacactcgccttgtccctaacccatgaccccagccccggcctcaagtgatggagagcaatacccggggatgactgtgaccacattgggatgtattcgtactgtctgatggggcctgctggactaggtcctgcagcttaccctggctggccctccttctcagcacccctgtttctccccaccagccgagttcatgcccattctgggcaccaacctgaacccagagttcatctccgtctgcaacaacgccacctgggccattggtgaaatctgcatgcagatgggtgagtgccctgcaagtggcaacacgcgccccccattagcctgttctcaacctgggggcgggagcctagctctgactgacagcttccttcaaggcaagtctcttgggggtcgtcaggggtggagccaagcagaaaggtcatttgtgattggcttctctaaagaggagggataggagggctgttctgattggaccgttttgtgtagttggctaaaagactcattcggattggttgggtgactttggcttttttttcctttgacttgggcagcgtgttgtcaccttagcgactccagagaagcctctgttgtttggagggtgtgggtctgtccctggttggccagggattctgggtggggattagccggagaaggtcttttgtttcctcactggtagtggttggccagtctctagttggaactggggcgagtagtgagtgaggtggggcggccccctggcccctgtgggtggcgggggctgtgcagggctctgactgggtgctcccccaggggcagagatgcagccttatgtgcagatggtcctcaacaacctggtggaaatcattaaccgacccaacacacccaagacactgctggaaaacacaggtgggcacctggcccggctgctgcctgcacccctgcctgccttctggaggtggggttctgggctgggaagggcatcagaaagagccttgtcaaggaaccaaggagggtgtctggaagtacctggaaggggtcactgggagaagccccaagaaagatgcagcctcaggctgggtgcagtggctcatgcctgtaatctcagcactttgggaggcagatcacctgaagtcaggagttcgagaccagcctggccaacatggtgaaaccccatctctactaaaaaatacaaaaattagccgggggtaatggcacgtgcctgcaatcccagctactcgggaggctgaggcaggttgcaatgagccaagatcatgccactgcactccagcctgggcaacagagcaagactccatctcaaaaacaaaac

SEQ ID NO: 338901 - DNA, 5060 bp, Homo sapiens
aggtggcggctttctgcacgtgtttctcagcccaggtttcagtccagcggaactggctacctcggaatcccaactgctcctttagggtgtcttccgcgattctccgagtggagttaggcgcctgccgacacttccctaaccttggaggcccgggacttgattttcatgaatgaacggagccgggactgactttgcctacggcaaagaaggaaaaacggtgccctactgtcttcagacgtcgcaaggatcaagaagatttctttcttcatgaccctgcccttgccagaatttcctgcgctgttccacctcattcaacttcagcttgccttgcgccatggactggcagccagacgagcagggcctgcagcaggtcctgcagctgctcaaagactcacagtcgcccaacacagccactcagcgcatcgtgcaggataaactcaaacaactcaatcagtttcctgacttcaacaactacctgattttcgtcctgaccagactcaagtcagaagatgagccaacgcgctctctcagtggcctcatcctcaagaacaacgtgaaggcacactatcagagcttcccaccccctgtggcagacttcatcaaacaggagtgtctcaacaacattggcgatgcctcctcgctcatccgagccaccattggcattctcatcaccaccatcgcttccaagggtgagctgcagatgtggcccgagctgctgccccagctctgcaacctgcttaactcggaggattacaacacttgtgagggagcctttggagccctgcagaagatctgtgaagactcatcagagcttctggacagtgacgccctcaacaggcccctcaacatcatgatccccaagttcctgcagttcttcaagcactgcagtcccaagatccggtcccacgccatcgcctgcgtgaaccagttcatcatggaccgggcccaggcgctgatggacaatattgacaccttcatcgagcacctatttgccctggctgtggatgatgaccccgaggtgcggaagaatgtgtgccgtgccctggtgatgcttctggaagtgcggattgacaggctcatcccccacatgcacagcatcatccagtacatgctgcagaggacccaggaccatgatgagaacgttgcccttgaggcctgtgagttctggctgacgctggccgagcagcccatctgcaaggaagtcctggcctcccatctggtccagttgatccccatcttggtgaatgggatgaagtactcggaaattgacatcatcctgctcaagggggatgtggaggaggatgaggctgtccccgacagtgagcaggacatcaagccacgcttccacaagtcacgcacggtcacactgccccacgaggctgagcggcctgatggctccgaggacgcggaggatgacgatgatgatgatgctctgtccgactggaatttgaggaagtgctcagcggctgcactggacgtcctcgccaatgtcttccgggaggaactgctgccccacctactcccactactcaaaggcctcctcttccaccccgagtgggtggtcaaggagtcgggcatcctggtgctgggcgccattgctgagggctgcatgcagggcatggtgccctacctgcctgagctgatcccgcacctgatccagtgcctgtcggataagaaggccttggtccgctccatcgcctgctggacgctgagccgctatgcccactgggtggtcagccagccacccgacatgcacctcaagcccctgatgacagagctgctcaaacgcatcctggatggcaacaagagggtacaggaggcggcctgcagtgcttttgccaccctggaggaagaggcctgcacggagctggtgccctacctcagctacatcctggacacccttgtctttgcctttgggaaataccagcacaagaacctgctcatcctctatgacgccattggcaccctggccgactctgtaggccaccacctcaaccagccggaatacatccagaagctgatgcccccactgatccagaagtggaatgagctcaaggacgaagacaaggacctcttccccctgctggagtgtctgtcatcggtggccaccgccctgcagagtggcttcctgccttactgtgagcccgtctaccagcgctgtgtcaccctggtgcagaagacactggctcaggccatgatgtacacccagcaccctgagcagtatgaggctcccgacaaggacttcatgatcgtagcactggatctgctcagcggcctggccgagggcctgggtggtcacgtggagcagctggtggcccgcagcaacatcatgacattgctgttccagtgcatgcaggactcgatgcctgaggtccggcagagctcctttgccctcctgggagacctcaccaaagcctgcttcatccatgtcaagccctgtatcgccgagttcatgcccattctgggcaccaacctgaacccagagttcatctccgtctgcaacaacgccacctgggccattggtgaaatctgcatgcagatgggggcagagatgcagccttatgtgcagatggtcctcaacaacctggtggaaatcattaaccgacccaacacacccaagacactgctggaaaacacagccatcaccatcggccgcttgggctacgtgtgcccccaggaggtggcacccatgctgcagcagttcatccggccttggtgcacgtccctcaggaacatcagggacaacgaggagaaggactcagccttccgcggcatctgcatgatgatcggtgtcaacccggggggcgttgtgcaggactttattttcttctgcgatgctgtagcctcctgggtgagcccgaaggatgaccttcgggacatgttttataagattctccacggcttcaaagaccaagttggggaagataactggcagcagttctctgagcaattcccgccgctgctcaaggagaggctggcggctttctatggggtctaggtgatcatggagactgccaggtttctgtctgcgtcgtcgtcggagggattactggggagtgcgctgcatccggaagtcgctgtgccctggttgaggggggttagggaggagtgagtgggactcaaatccagatgccttccccgtccgtccgtccgtccgtccatccgtccacttgccctcctggcaggtgggtggggccaccatgctcatcctacaaacggggaggtgggggggacttctggtgggcaagggcccctgggctctaatagggtcatctctggcagcccacttgggccagctacgtgggagggaggaattacacagctgaccgaatccggcttcggatgaggtgagggaggagcaggtcaggaggggggccctcgtagggacgcgtacactcacacggacacacatggccacacgcatgtgcgggtgccataaccggcgaggctgggccagccgctccaccatttccccgactgcatggagacagtagaattagtgaacccctgagttaacccgtaaggccttccgtgtaacctgcatctagagtttaagaagcttctgctgttttgccggaattggcggtgactggggagggctgggtgggtggggggcctcaggcgggatctcggggcggggggaggaggatggtgaccttgggagtcgccctgtcagcacgcacatgcttgggacccactccacacactccctgccagctttgttgcagcctcagctggtggtgtctccgtccttatcctagcctagctcgcagggtgagaaccactggagtggctggggctggccagaggtcaccgtttctccttcctgtgtgctccagtggcttttgaagacactgggttgggacctttttcctgaagagagctgggtgtagccagagctactggcacctaccccgagcatctctctctgtaagcagcttcaggggcagtccgtttctctgtgcttctgaaacccccttctcacgtttcaggccccagttttaactcaaggcctggggcaggggcgtttaattgatgatgacagaggacacaggtttttgccagcaaaaaggaaaaccaaggcttggtggaagggaaaggtggtgtgtcccctgttccctattccatctccctgggacttcctgctcatcatagtacccagtgagcccagagatcctactagactgggtcagcaattctagagaaccttccggaatagtctgggaacatggtcaaggtggaaggggctcccctagagagggtgggggtgtagttacttcccagttggccagaaaactgggccttgcagacccccttagcattttttccctttttttccttccctgctttctacttctttggggagccccttgtgttttggagtctgactggagtctcgcatcctggggcctgctccatccatccctcctgggcgccagaccctccatccaagccctgtgtctttccatagtcagggtcaggccctgcatctattccaaggggcactcagtacacattccataaattagctgggtgtccctgcacgcccaccccatgaaactcgagcaggtctctggaagccatttgttaaaaaaaaaaaaaaaagttttaaaaataccttttaattttctggtaattccagttctttgaagcatcctctgctgggtcttggggtgtgtggatggattggctgtctgatgggattggtaacccctcgctactcaagatggggggatacaaacaccttcagggaaggggagcctggttcttctcgttttcctttttttttttttttttaaaaaaaaactatttaattttttaatttatttttggttgttttttgcacaatgaagtttcagcttctcaaccttctcccctacccagggctgtggacccagactggccttgagccacagtccctctttccctcctcaccctcttccccctgcgggctcccgggtctgtccatttgttactgtgctgtgctggggattggcgccgaggtggcgtgagattccacttgtgtagaactttgttgagtaaagatcagtttcttgtga

SEQ ID NO: 338902 - DNA, 4816 bp, Homo sapiens
aagatgagaaacacttcgatggacctctgcccgagaccaaaaatctcctgcgctgttccaggctcatacaacttcagcttgccttgcgccatggactggcagccagacgagcagggcctgcagcaggtcctgcagctgctcaaagactcacagtcgcccaacacagccactcagcgcatcgtgcaggataaactcaaacaactcaatcagtttcctgacttcaacaactacctgattttcgtcctgaccagactcaagtcagaagatgagccaacgcgctctctcagtggcctcatcctcaagaacaacgtgaaggcacactatcagagcttcccaccccctgtggcagacttcatcaaacaggagtgtctcaacaacattggcgatgcctcctcgctcatccgagccaccattggcattctcatcaccaccatcgcttccaagggtgagctgcagatgtggcccgagctgctgccccagctctgcaacctgcttaactcggaggattacaacacttgtgagggagcctttggagccctgcagaagatctgtgaagactcatcagagcttctggacagtgacgccctcaacaggcccctcaacatcatgatccccaagttcctgcagttcttcaagcactgcagtcccaagatccggtcccacgccatcgcctgcgtgaaccagttcatcatggaccgggcccaggcgctgatggacaatattgacaccttcatcgagcacctatttgccctggctgtggatgatgaccccgaggtgcggaagaatgtgtgccgtgccctggtgatgcttctggaagtgcggattgacaggctcatcccccacatgcacagcatcatccagtacatgctgcagaggacccaggaccatgatgagaacgttgcccttgaggcctgtgagttctggctgacgctggccgagcagcccatctgcaaggaagtcctggcctcccatctggtccagttgatccccatcttggtgaatgggatgaagtactcggaaattgacatcatcctgctcaagggggatgtggaggaggatgaggctgtccccgacagtgagcaggacatcaagccacgcttccacaagtcacgcacggtcacactgccccacgaggctgagcggcctgatggctccgaggacgcggaggatgacgatgatgatgatgctctgtccgactggaatttgaggaagtgctcagcggctgcactggacgtcctcgccaatgtcttccgggaggaactgctgccccacctactcccactactcaaaggcctcctcttccaccccgagtgggtggtcaaggagtcgggcatcctggtgctgggcgccattgctgagggctgcatgcagggcatggtgccctacctgcctgagctgatcccgcacctgatccagtgcctgtcggataagaaggccttggtccgctccatcgcctgctggacgctgagccgctatgcccactgggtggtcagccagccacccgacatgcacctcaagcccctgatgacagagctgctcaaacgcatcctggatggcaacaagagggtacaggaggcggcctgcagtgcttttgccaccctggaggaagaggcctgcacggagctggtgccctacctcagctacatcctggacacccttgtctttgcctttgggaaataccagcacaagaacctgctcatcctctatgacgccattggcaccctggccgactctgtaggccaccacctcaaccagccggaatacatccagaagctgatgcccccactgatccagaagtggaatgagctcaaggacgaagacaaggacctcttccccctgctggagtgtctgtcatcggtggccaccgccctgcagagtggcttcctgccttactgtgagcccgtctaccagcgctgtgtcaccctggtgcagaagacactggctcaggccatgatgtacacccagcaccctgagcagtatgaggctcccgacaaggacttcatgatcgtagcactggatctgctcagcggcctggccgagggcctgggtggtcacgtggagcagctggtggcccgcagcaacatcatgacattgctgttccagtgcatgcaggactcgatgcctgaggtccggcagagctcctttgccctcctgggagacctcaccaaagcctgcttcatccatgtcaagccctgtatcgccgagttcatgcccattctgggcaccaacctgaacccagagttcatctccgtctgcaacaacgccacctgggccattggtgaaatctgcatgcagatgggggcagagatgcagccttatgtgcagatggtcctcaacaacctggtggaaatcattaaccgacccaacacacccaagacactgctggaaaacacagccatcaccatcggccgcttgggctacgtgtgcccccaggaggtggcacccatgctgcagcagttcatccggccttggtgcacgtccctcaggaacatcagggacaacgaggagaaggactcagccttccgcggcatctgcatgatgatcggtgtcaacccggggggcgttgtgcaggactttattttcttctgcgatgctgtagcctcctgggtgagcccgaaggatgaccttcgggacatgttttataagattctccacggcttcaaagaccaagttggggaagataactggcagcagttctctgagcaattcccgccgctgctcaaggagaggctggcggctttctatggggtctaggtgatcatggagactgccaggtttctgtctgcgtcgtcgtcggagggattactggggagtgcgctgcatccggaagtcgctgtgccctggttgaggggggttagggaggagtgagtgggactcaaatccagatgccttccccgtccgtccgtccgtccgtccatccgtccacttgccctcctggcaggtgggtggggccaccatgctcatcctacaaacggggaggtgggggggacttctggtgggcaagggcccctgggctctaatagggtcatctctggcagcccacttgggccagctacgtgggagggaggaattacacagctgaccgaatccggcttcggatgaggtgagggaggagcaggtcaggaggggggccctcgtagggacgcgtacactcacacggacacacatggccacacgcatgtgcgggtgccataaccggcgaggctgggccagccgctccaccatttccccgactgcatggagacagtagaattagtgaacccctgagttaacccgtaaggccttccgtgtaacctgcatctagagtttaagaagcttctgctgttttgccggaattggcggtgactggggagggctgggtgggtggggggcctcaggcgggatctcggggcggggggaggaggatggtgaccttgggagtcgccctgtcagcacgcacatgcttgggacccactccacacactccctgccagctttgttgcagcctcagctggtggtgtctccgtccttatcctagcctagctcgcagggtgagaaccactggagtggctggggctggccagaggtcaccgtttctccttcctgtgtgctccagtggcttttgaagacactgggttgggacctttttcctgaagagagctgggtgtagccagagctactggcacctaccccgagcatctctctctgtaagcagcttcaggggcagtccgtttctctgtgcttctgaaacccccttctcacgtttcaggccccagttttaactcaaggcctggggcaggggcgtttaattgatgatgacagaggacacaggtttttgccagcaaaaaggaaaaccaaggcttggtggaagggaaaggtggtgtgtcccctgttccctattccatctccctgggacttcctgctcatcatagtacccagtgagcccagagatcctactagactgggtcagcaattctagagaaccttccggaatagtctgggaacatggtcaaggtggaaggggctcccctagagagggtgggggtgtagttacttcccagttggccagaaaactgggccttgcagacccccttagcattttttccctttttttccttccctgctttctacttctttggggagccccttgtgttttggagtctgactggagtctcgcatcctggggcctgctccatccatccctcctgggcgccagaccctccatccaagccctgtgtctttccatagtcagggtcaggccctgcatctattccaaggggcactcagtacacattccataaattagctgggtgtccctgcacgcccaccccatgaaactcgagcaggtctctggaagccatttgttaaaaaaaaaaaaaaaagttttaaaaataccttttaattttctggtaattccagttctttgaagcatcctctgctgggtcttggggtgtgtggatggattggctgtctgatgggattggtaacccctcgctactcaagatggggggatacaaacaccttcagggaaggggagcctggttcttctcgttttcctttttttttttttttttaaaaaaaaactatttaattttttaatttatttttggttgttttttgcacaatgaagtttcagcttctcaaccttctcccctacccagggctgtggacccagactggccttgagccacagtccctctttccctcctcaccctcttccccctgcgggctcccgggtctgtccatttgttactgtgctgtgctggggattggcgccgaggtggcgtgagattccacttgtgtagaactttgttgagtaaagatcagtttcttgtga

SEQ ID NO: 338903 - DNA, 4668 bp, Homo sapiens
cgtgagtcgtcatgattgatcttagtcaaaccctctctttggctccctccttccgcgcgagtctctggagaagccgcagcgcgagttgccgccgctgctgcccggggccggcttgccttgcgccatggactggcagccagacgagcagggcctgcagcaggtcctgcagctgctcaaagactcacagtcgcccaacacagccactcagcgcatcgtgcaggataaactcaaacaactcaatcagtttcctgacttcaacaactacctgattttcgtcctgaccagactcaagtcagaagatgagccaacgcgctctctcagtggcctcatcctcaagaacaacgtgaaggcacactatcagagcttcccaccccctgtggcagacttcatcaaacaggagtgtctcaacaacattggcgatgcctcctcgctcatccgagccaccattggcattctcatcaccaccatcgcttccaagggtgagctgcagatgtggcccgagctgctgccccagctctgcaacctgcttaactcggaggattacaacacttgtgagggagcctttggagccctgcagaagatctgtgaagactcatcagagcttctggacagtgacgccctcaacaggcccctcaacatcatgatccccaagttcctgcagttcttcaagcactgcagtcccaagatccggtcccacgccatcgcctgcgtgaaccagttcatcatggaccgggcccaggcgctgatggacaatattgacaccttcatcgagcacctatttgccctggctgtggatgatgaccccgaggtgcggaagaatgtgtgccgtgccctggtgatgcttctggaagtgcggattgacaggctcatcccccacatgcacagcatcatccagtacatgctgcagaggacccaggaccatgatgagaacgttgcccttgaggcctgtgagttctggctgacgctggccgagcagcccatctgcaaggaagtcctggcctcccatctggtccagttgatccccatcttggtgaatgggatgaagtactcggaaattgacatcatcctgctcaagggggatgtggaggaggatgaggctgtccccgacagtgagcaggacatcaagccacgcttccacaagtcacgcacggtcacactgccccacgaggctgagcggcctgatggctccgaggacgcggaggatgacgatgatgatgatgctctgtccgactggaatttgaggaagtgctcagcggctgcactggacgtcctcgccaatgtcttccgggaggaactgctgccccacctactcccactactcaaaggcctcctcttccaccccgagtgggtggtcaaggagtcgggcatcctggtgctgggcgccattgctgagggctgcatgcagggcatggtgccctacctgcctgagctgatcccgcacctgatccagtgcctgtcggataagaaggccttggtccgctccatcgcctgctggacgctgagccgctatgcccactgggtggtcagccagccacccgacatgcacctcaagcccctgatgacagagctgctcaaacgcatcctggatggcaacaagagggtacaggaggcggcctgcagtgcttttgccaccctggaggaagaggcctgcacggagctggtgccctacctcagctacatcctggacacccttgtctttgcctttgggaaataccagcacaagaacctgctcatcctctatgacgccattggcaccctggccgactctgtaggccaccacctcaaccagccggaatacatccagaagctgatgcccccactgatccagaagtggaatgagctcaaggacgaagacaaggacctcttccccctgctggagtgtctgtcatcggtggccaccgccctgcagagtggcttcctgccttactgtgagcccgtctaccagcgctgtgtcaccctggtgcagaagacactggctcaggccatgatgtacacccagcaccctgagcagtatgaggctcccgacaaggacttcatgatcgtagcactggatctgctcagcggcctggccgagggcctgggtggtcacgtggagcagctggtggcccgcagcaacatcatgacattgctgttccagtgcatgcaggactcgatgcctgaggtccggcagagctcctttgccctcctgggagacctcaccaaagcctgcttcatccatgtcaagccctgtatcgccgagttcatgcccattctgggcaccaacctgaacccagagttcatctccgtctgcaacaacgccacctgggccattggtgaaatctgcatgcagatgggggcagagatgcagccttatgtgcagatggtcctcaacaacctggtggaaatcattaaccgacccaacacacccaagacactgctggaaaacacagccatcaccatcggccgcttgggctacgtgtgcccccaggaggtggcacccatgctgcagcagttcatccggccttggtgcacgtccctcaggaacatcagggacaacgaggagaaggactcagccttccgcggcatctgcatgatgatcggtgtcaacccggggggcgttgtgcaggactttattttcttctgcgatgctgtagcctcctgggtgagcccgaaggatgaccttcgggacatgttttataagattctccacggcttcaaagaccaagttggggaagataactggcagcagttctctgagcaattcccgccgctgctcaaggagaggctggcggctttctatggggtctaggtgatcatggagactgccaggtttctgtctgcgtcgtcgtcggagggattactggggagtgcgctgcatccggaagtcgctgtgccctggttgaggggggttagggaggagtgagtgggactcaaatccagatgccttccccgtccgtccgtccgtccgtccatccgtccacttgccctcctggcaggtgggtggggccaccatgctcatcctacaaacggggaggtgggggggacttctggtgggcaagggcccctgggctctaatagggtcatctctggcagcccacttgggccagctacgtgggagggaggaattacacagctgaccgaatccggcttcggatgaggtgagggaggagcaggtcaggaggggggccctcgtagggacgcgtacactcacacggacacacatggccacacgcatgtgcgggtgccataaccggcgaggctgggccagccgctccaccatttccccgactgcatggagacagtagaattagtgaacccctgagttaacccgtaaggccttccgtgtaacctgcatctagagtttaagaagcttctgctgttttgccggaattggcggtgactggggagggctgggtgggtggggggcctcaggcgggatctcggggcggggggaggaggatggtgaccttgggagtcgccctgtcagcacgcacatgcttgggacccactccacacactccctgccagctttgttgcagcctcagctggtggtgtctccgtccttatcctagcctagctcgcagggtgagaaccactggagtggctggggctggccagaggtcaccgtttctccttcctgtgtgctccagtggcttttgaagacactgggttgggacctttttcctgaagagagctgggtgtagccagagctactggcacctaccccgagcatctctctctgtaagcagcttcaggggcagtccgtttctctgtgcttctgaaacccccttctcacgtttcaggccccagttttaactcaaggcctggggcaggggcgtttaattgatgatgacagaggacacaggtttttgccagcaaaaaggaaaaccaaggcttggtggaagggaaaggtggtgtgtcccctgttccctattccatctccctgggacttcctgctcatcatagtacccagtgagcccagagatcctactagactgggtcagcaattctagagaaccttccggaatagtctgggaacatggtcaaggtggaaggggctcccctagagagggtgggggtgtagttacttcccagttggccagaaaactgggccttgcagacccccttagcattttttccctttttttccttccctgctttctacttctttggggagccccttgtgttttggagtctgactggagtctcgcatcctggggcctgctccatccatccctcctgggcgccagaccctccatccaagccctgtgtctttccatagtcagggtcaggccctgcatctattccaaggggcactcagtacacattccataaattagctgggtgtccctgcacgcccaccccatgaaactcgagcaggtctctggaagccatttgttaaaaaaaaaaaaaaaagttttaaaaataccttttaattttctggtaattccagttctttgaagcatcctctgctgggtcttggggtgtgtggatggattggctgtctgatgggattggtaacccctcgctactcaagatggggggatacaaacaccttcagggaaggggagcctggttcttctagtcaggcctactcttttttctttaaaaaaaaccagttttactggtttatttattgttgggctgttatcgggcgaatggagatgaaattgtttacgattcttccct

SEQ ID NO: 338904 - DNA, 3707 bp, Homo sapiens
cagttgatgatacgcccgagcagatgccaacacagcagccattcaagcaatcctatacaaccgtatcggcgatatcggtttcatcctcgccttagcatgatttatcctacactccaactcatgagacccacaacaaatagcccttctaaacgctaatccaagcctactcccactactcaaaggcctcctcttccaccccgagtgggtggtcaaggagtcgggcatcctggtgctgggcgccattgctgagggctgcatgcagggcatggtgccctacctgcctgagctgatcccgcacctgatccagtgcctgtcggataagaaggccttggtccgctccatcgcctgctggacgctgagccgctatgcccactgggtggtcagccagccacccgacatgcacctcaagcccctgatgacagagctgctcaaacgcatcctggatggcaacaagagggtacaggaggcggcctgcagtgcttttgccaccctggaggaagaggcctgcacggagctggtgccctacctcagctacatcctggacacccttgtctttgcctttgggaaataccagcacaagaacctgctcatcctctatgacgccattggcaccctggccgactctgtaggccaccacctcaaccagccggaatacatccagaagctgatgcccccactgatccagaagtggaatgagctcaaggacgaagacaaggacctcttccccctgctggagtgtctgtcatcggtggccaccgccctgcagagtggcttcctgccttactgtgagcccgtctaccagcgctgtgtcaccctggtgcagaagacactggctcaggccatgatgtacacccagcaccctgagcagtatgaggctcccgacaaggacttcatgatcgtagcactggatctgctcagcggcctggccgagggcctgggtggtcacgtggagcagctggtggcccgcagcaacatcatgacattgctgttccagtgcatgcaggactcgatgcctgaggtccggcagagctcctttgccctcctgggagacctcaccaaagcctgcttcatccatgtcaagccctgtatcgccgagttcatgcccattctgggcaccaacctgaacccagagttcatctccgtctgcaacaacgccacctgggccattggtgaaatctgcatgcagatgggggcagagatgcagccttatgtgcagatggtcctcaacaacctggtggaaatcattaaccgacccaacacacccaagacactgctggaaaacacagccatcaccatcggccgcttgggctacgtgtgcccccaggaggtggcacccatgctgcagcagttcatccggccttggtgcacgtccctcaggaacatcagggacaacgaggagaaggactcagccttccgcggcatctgcatgatgatcggtgtcaacccggggggcgttgtgcaggactttattttcttctgcgatgctgtagcctcctgggtgagcccgaaggatgaccttcgggacatgttttataagattctccacggcttcaaagaccaagttggggaagataactggcagcagttctctgagcaattcccgccgctgctcaaggagaggctggcggctttctatggggtctaggtgatcatggagactgccaggtttctgtctgcgtcgtcgtcggagggattactggggagtgcgctgcatccggaagtcgctgtgccctggttgaggggggttagggaggagtgagtgggactcaaatccagatgccttccccgtccgtccgtccgtccgtccatccgtccacttgccctcctggcaggtgggtggggccaccatgctcatcctacaaacggggaggtgggggggacttctggtgggcaagggcccctgggctctaatagggtcatctctggcagcccacttgggccagctacgtgggagggaggaattacacagctgaccgaatccggcttcggatgaggtgagggaggagcaggtcaggaggggggccctcgtagggacgcgtacactcacacggacacacatggccacacgcatgtgcgggtgccataaccggcgaggctgggccagccgctccaccatttccccgactgcatggagacagtagaattagtgaacccctgagttaacccgtaaggccttccgtgtaacctgcatctagagtttaagaagcttctgctgttttgccggaattggcggtgactggggagggctgggtgggtggggggcctcaggcgggatctcggggcggggggaggaggatggtgaccttgggagtcgccctgtcagcacgcacatgcttgggacccactccacacactccctgccagctttgttgcagcctcagctggtggtgtctccgtccttatcctagcctagctcgcagggtgagaaccactggagtggctggggctggccagaggtcaccgtttctccttcctgtgtgctccagtggcttttgaagacactgggttgggacctttttcctgaagagagctgggtgtagccagagctactggcacctaccccgagcatctctctctgtaagcagcttcaggggcagtccgtttctctgtgcttctgaaacccccttctcacgtttcaggccccagttttaactcaaggcctggggcaggggcgtttaattgatgatgacagaggacacaggtttttgccagcaaaaaggaaaaccaaggcttggtggaagggaaaggtggtgtgtcccctgttccctattccatctccctgggacttcctgctcatcatagtacccagtgagcccagagatcctactagactgggtcagcaattctagagaaccttccggaatagtctgggaacatggtcaaggtggaaggggctcccctagagagggtgggggtgtagttacttcccagttggccagaaaactgggccttgcagacccccttagcattttttccctttttttccttccctgctttctacttctttggggagccccttgtgttttggagtctgactggagtctcgcatcctggggcctgctccatccatccctcctgggcgccagaccctccatccaagccctgtgtctttccatagtcagggtcaggccctgcatctattccaaggggcactcagtacacattccataaattagctgggtgtccctgcacgcccaccccatgaaactcgagcaggtctctggaagccatttgttaaaaaaaaaaaaaaaagttttaaaaataccttttaattttctggtaattccagttctttgaagcatcctctgctgggtcttggggtgtgtggatggattggctgtctgatgggattggtaacccctcgctactcaagatggggggatacaaacaccttcagggaaggggagcctggttcttctcgttttcctttttttttttttttttaaaaaaaaactatttaattttttaatttatttttggttgttttttgcacaatgaagtttcagcttctcaaccttctcccctacccagggctgtggacccagactggccttgagccacagtccctctttccctcctcaccctcttccccctgcgggctcccgggtctgtccatttgttactgtgctgtgctggggattggcgccgaggtggcgtgagattccacttgtgtagaactttgttgagtaaagatcagtttcttgtga

SEQ ID NO: 338905 - DNA, 3393 bp, Homo sapiens
cccatactgttgacattgtattagatataagtgatttagagatgatgctaagtgtacaggagaatgtgcataggtgcatatgcaaacactatgccccccccaccgccccccacctgttttttgagacagagtctcactctgtcacccaggctggagtgcaatggtgtgatctcggctcactgcaaccttcacctccagggttcaagcagttctcctgccttagcctctcaagaagctgggactacaggcgtgtcccactatgcctggctaattttattgtatttttagtagagacagggttttgccgtgttggccaggctggtctcaaactcctgacctcaagtgatctgcctgcctcggcctgccaaagtgctggagattacaggcatgaaccactgcgcctggccctaacactgtgccactttatatcaaggacttgcacatccgtggatttttatatctgcagggacctggaaagaatcccccacggacactgagggatgaccgttggggcactgccatctcccatttgcagatgtgggctggaggctagggaggttaaggaacagctaggagctctagaactggaaagtggcagaggctggacatgcaccagggactgtgccccctgagctgtcctggttagaaggaggggagcctagccacactgatcttacttgaatccccaggactcgatgcctgaggtccggcagagctcctttgccctcctgggagacctcaccaaagcctgcttcatccatgtcaagccctgtatcgccgagttcatgcccattctgggcaccaacctgaacccagagttcatctccgtctgcaacaacgccacctgggccattggtgaaatctgcatgcagatgggggcagagatgcagccttatgtgcagatggtcctcaacaacctggtggaaatcattaaccgacccaacacacccaagacactgctggaaaacacagccatcaccatcggccgcttgggctacgtgtgcccccaggaggtggcacccatgctgcagcagttcatccggccttggtgcacgtccctcaggaacatcagggacaacgaggagaaggactcagccttccgcggcatctgcatgatgatcggtgtcaacccggggggcgttgtgcaggactttattttcttctgcgatgctgtagcctcctgggtgagcccgaaggatgaccttcgggacatgttttataagattctccacggcttcaaagaccaagttggggaagataactggcagcagttctctgagcaattcccgccgctgctcaaggagaggctggcggctttctatggggtctaggtgatcatggagactgccaggtttctgtctgcgtcgtcgtcggagggattactggggagtgcgctgcatccggaagtcgctgtgccctggttgaggggggttagggaggagtgagtgggactcaaatccagatgccttccccgtccgtccgtccgtccgtccatccgtccacttgccctcctggcaggtgggtggggccaccatgctcatcctacaaacggggaggtgggggggacttctggtgggcaagggcccctgggctctaatagggtcatctctggcagcccacttgggccagctacgtgggagggaggaattacacagctgaccgaatccggcttcggatgaggtgagggaggagcaggtcaggaggggggccctcgtagggacgcgtacactcacacggacacacatggccacacgcatgtgcgggtgccataaccggcgaggctgggccagccgctccaccatttccccgactgcatggagacagtagaattagtgaacccctgagttaacccgtaaggccttccgtgtaacctgcatctagagtttaagaagcttctgctgttttgccggaattggcggtgactggggagggctgggtgggtggggggcctcaggcgggatctcggggcggggggaggaggatggtgaccttgggagtcgccctgtcagcacgcacatgcttgggacccactccacacactccctgccagctttgttgcagcctcagctggtggtgtctccgtccttatcctagcctagctcgcagggtgagaaccactggagtggctggggctggccagaggtcaccgtttctccttcctgtgtgctccagtggcttttgaagacactgggttgggacctttttcctgaagagagctgggtgtagccagagctactggcacctaccccgagcatctctctctgtaagcagcttcaggggcagtccgtttctctgtgcttctgaaacccccttctcacgtttcaggccccagttttaactcaaggcctggggcaggggcgtttaattgatgatgacagaggacacaggtttttgccagcaaaaaggaaaaccaaggcttggtggaagggaaaggtggtgtgtcccctgttccctattccatctccctgggacttcctgctcatcatagtacccagtgagcccagagatcctactagactgggtcagcaattctagagaaccttccggaatagtctgggaacatggtcaaggtggaaggggctcccctagagagggtgggggtgtagttacttcccagttggccagaaaactgggccttgcagacccccttagcattttttccctttttttccttccctgctttctacttctttggggagccccttgtgttttggagtctgactggagtctcgcatcctggggcctgctccatccatccctcctgggcgccagaccctccatccaagccctgtgtctttccatagtcagggtcaggccctgcatctattccaaggggcactcagtacacattccataaattagctgggtgtccctgcacgcccaccccatgaaactcgagcaggtctctggaagccatttgttaaaaaaaaaaaaaaaagttttaaaaataccttttaattttctggtaattccagttctttgaagcatcctctgctgggtcttggggtgtgtggatggattggctgtctgatgggattggtaacccctcgctactcaagatggggggatacaaacaccttcagggaaggggagcctggttcttctcgttttcctttttttttttttttttaaaaaaaaactatttaattttttaatttatttttggttgttttttgcacaatgaagtttcagcttctcaaccttctcccctacccagggctgtggacccagactggccttgagccacagtccctctttccctcctcaccctcttccccctgcgggctcccgggtctgtccatttgttactgtgctgtgctggggattggcgccgaggtggcgtgagattccacttgtgtagaactttgttgagtaaagatcagtttcttgtga

SEQ ID NO: 338906 - DNA, 3503 bp, Homo sapiens
gcctcatcactcgggcaacaggtacctgagtcacagtctgccaccccgacccagggagcgcccatttcgtgctccctctccaggaatacatccagaagctgatgcccccactgatccagaagtggaatgagctcaaggacgaagacaaggacctcttccccctgctggaggtgagtgggctcctgcccctcacccgaaacccatcctgcccaccctgcctgagttctccccacctgccttcctccctgccagtgtctgtcatcggtggccaccgccctgcagagtggcttcctgccttactgtgagcccgtctaccagcgctgtgtcaccctggtgcagaagacactggctcaggccatggtgagcaaccctaggcccgtcacctgtgcttctgcattggcctgcctcgggcctgctccacttacccgtgcccctgtcggcatctgtgtctagatgtacacccagcaccctgagcagtatgaggctcccgacaaggacttcatgatcgtagcactggatctgctcagcggcctggccgagggcctgggtggtcacgtggagcagctggtggcccgcagcaacatcatgacattgctgttccagtgcatgcaggactcgatgcctgaggtccggcagagctcctttgccctcctgggagacctcaccaaagcctgcttcatccatgtcaagccctgtatcggtacgacactcgccttgtccctaacccatgaccccagccccggcctcaagtgatggagagcaatacccggggatgactgtgaccacattgggatgtattcgtactgtctgatggggcctgctggactaggtcctgcagcttaccctggctggccctccttctcagcacccctgtttctccccaccagccgagttcatgcccattctgggcaccaacctgaacccagagttcatctccgtctgcaacaacgccacctgggccattggtgaaatctgcatgcagatgggggcagagatgcagccttatgtgcagatggtcctcaacaacctggtggaaatcattaaccgacccaacacacccaagacactgctggaaaacacagccatcaccatcggccgcttgggctacgtgtgcccccaggaggtggcacccatgctgcagcagttcatccggccttggtgcacgtccctcaggaacatcagggacaacgaggagaaggactcagccttccgcggcatctgcatgatgatcggtgtcaacccggggggcgttgtgcaggactttattttcttctgcgatgctgtagcctcctgggtgagcccgaaggatgaccttcgggacatgttttataagattctccacggcttcaaagaccaagttggggaagataactggcagcagttctctgagcaattcccgccgctgctcaaggagaggctggcggctttctatggggtctaggtgatcatggagactgccaggtttctgtctgcgtcgtcgtcggagggattactggggagtgcgctgcatccggaagtcgctgtgccctggttgaggggggttagggaggagtgagtgggactcaaatccagatgccttccccgtccgtccgtccgtccgtccatccgtccacttgccctcctggcaggtgggtggggccaccatgctcatcctacaaacggggaggtgggggggacttctggtgggcaagggcccctgggctctaatagggtcatctctggcagcccacttgggccagctacgtgggagggaggaattacacagctgaccgaatccggcttcggatgaggtgagggaggagcaggtcaggaggggggccctcgtagggacgcgtacactcacacggacacacatggccacacgcatgtgcgggtgccataaccggcgaggctgggccagccgctccaccatttccccgactgcatggagacagtagaattagtgaacccctgagttaacccgtaaggccttccgtgtaacctgcatctagagtttaagaagcttctgctgttttgccggaattggcggtgactggggagggctgggtgggtggggggcctcaggcgggatctcggggcggggggaggaggatggtgaccttgggagtcgccctgtcagcacgcacatgcttgggacccactccacacactccctgccagctttgttgcagcctcagctggtggtgtctccgtccttatcctagcctagctcgcagggtgagaaccactggagtggctggggctggccagaggtcaccgtttctccttcctgtgtgctccagtggcttttgaagacactgggttgggacctttttcctgaagagagctgggtgtagccagagctactggcacctaccccgagcatctctctctgtaagcagcttcaggggcagtccgtttctctgtgcttctgaaacccccttctcacgtttcaggccccagttttaactcaaggcctggggcaggggcgtttaattgatgatgacagaggacacaggtttttgccagcaaaaaggaaaaccaaggcttggtggaagggaaaggtggtgtgtcccctgttccctattccatctccctgggacttcctgctcatcatagtacccagtgagcccagagatcctactagactgggtcagcaattctagagaaccttccggaatagtctgggaacatggtcaaggtggaaggggctcccctagagagggtgggggtgtagttacttcccagttggccagaaaactgggccttgcagacccccttagcattttttccctttttttccttccctgctttctacttctttggggagccccttgtgttttggagtctgactggagtctcgcatcctggggcctgctccatccatccctcctgggcgccagaccctccatccaagccctgtgtctttccatagtcagggtcaggccctgcatctattccaaggggcactcagtacacattccataaattagctgggtgtccctgcacgcccaccccatgaaactcgagcaggtctctggaagccatttgttaaaaaaaaaaaaaaaagttttaaaaataccttttaattttctggtaattccagttctttgaagcatcctctgctgggtcttggggtgtgtggatggattggctgtctgatgggattggtaacccctcgctactcaagatggggggatacaaacaccttcagggaaggggagcctggttcttctcgttttcctttttttttttttttttaaaaaaaaactatttaattttttaatttatttttggttgttttttgcacaatgaagtttcagcttctcaaccttctcccctacccagggctgtggacccagactggccttgagccacagtccctctttccctcctcaccctcttccccctgcgggctcccgggtctgtccatttgttactgtgctgtgctggggattggcgccgaggtggcgtgagattccacttgtgtagaactttgttgagtaaagatcagtttcttgtga

SEQ ID NO: 338907 - DNA, 4951 bp, Homo sapiens
cgtgagtcgtcatgattgatcttagtcaaaccctctctttggctccctccttccgcgcgagtctctggagaagccgcagcgcgagttgccgccgctgctgcccggggccggcttgccttgcgccatggactggcagccagacgagcagggcctgcagcaggtcctgcagctgctcaaagactcacagtcgcccaacacagccactcagcgcatcgtgcaggataaactcaaacaactcaatcagtttcctgacttcaacaactacctgattttcgtcctgaccagactcaagtcagaagatgagccaacgcgctctctcagtggcctcatcctcaagaacaacgtgaaggcacactatcagagcttcccaccccctgtggcagacttcatcaaacaggagtgtctcaacaacattggcgatgcctcctcgctcatccgagccaccattggcattctcatcaccaccatcgcttccaagggtgagctgcagatgtggcccgagctgctgccccagctctgcaacctgcttaactcggaggattacaacacttgtgagggagcctttggagccctgcagaagatctgtgaagactcatcagagcttctggacagtgacgccctcaacaggcccctcaacatcatgatccccaagttcctgcagttcttcaagcactgcagtcccaagatccggtcccacgccatcgcctgcgtgaaccagttcatcatggaccgggcccaggcgctgatggacaatattgacaccttcatcgagcacctatttgccctggctgtggatgatgaccccgaggtgcggaagaatgtgtgccgtgccctggtgatgcttctggaagtgcggattgacaggctcatcccccacatgcacagcatcatccagtacatgctgcagaggacccaggaccatgatgagaacgttgcccttgaggcctgtgagttctggctgacgctggccgagcagcccatctgcaaggaagtcctggcctcccatctggtccagttgatccccatcttggtgaatgggatgaagtactcggaaattgacatcatcctgctcaagggggatgtggaggaggatgaggctgtccccgacagtgagcaggacatcaagccacgcttccacaagtcacgcacggtcacactgccccacgaggctgagcggcctgatggctccgaggacgcggaggatgacgatgatgatgatgctctgtccgactggaatttgaggaagtgctcagcggctgcactggacgtcctcgccaatgtcttccgggaggaactgctgccccacctactcccactactcaaaggcctcctcttccaccccgagtgggtggtcaaggagtcgggcatcctggtgctgggcgccattgctgagggctgcatgcagggcatggtgccctacctgcctgagctgatcccgcacctgatccagtgcctgtcggataagaaggccttggtccgctccatcgcctgctggacgctgagccgctatgcccactgggtggtcagccagccacccgacatgcacctcaagcccctgatgacagagctgctcaaacgcatcctggatggcaacaagagggtacaggaggcggcctgcagtgcttttgccaccctggaggaagaggcctgcacggagctggtgccctacctcagctacatcctggacacccttgtctttgcctttgggaaataccagcacaagaacctgctcatcctctatgacgccattggcaccctggccgactctgtaggccaccacctcaaccagccggaatacatccagaagctgatgcccccactgatccagaagtggaatgagctcaaggacgaagacaaggacctcttccccctgctggagtgtctgtcatcggtggccaccgccctgcagagtggcttcctgccttactgtgagcccgtctaccagcgctgtgtcaccctggtgcagaagacactggctcaggccatgatgtacacccagcaccctgagcagtatgaggctcccgacaaggacttcatgatcgtagcactggatctgctcagcggcctggccgagggcctgggtggtcacgtggagcagctggtggcccgcagcaacatcatgacattgctgttccagtgcatgcaggactcgatgcctgaggtccggcagagctcctttgccctcctgggagacctcaccaaagcctgcttcatccatgtcaagccctgtatcgccgagttcatgcccattctgggcaccaacctgaacccagagttcatctccgtctgcaacaacgccacctgggccattggtgaaatctgcatgcagatgggggcagagatgcagccttatgtgcagatggtcctcaacaacctggtggaaatcattaaccgacccaacacacccaagacactgctggaaaacacagccatcaccatcggccgcttgggctacgtgtgcccccaggaggtggcacccatgctgcagcagttcatccggccttggtgcacgtccctcaggaacatcagggacaacgaggagaaggactcagccttccgcggcatctgcatgatgatcggtgtcaacccggggggcgttgtgcaggactttattttcttctgcgatgctgtagcctcctgggtgagcccgaaggatgaccttcgggacatgttttataagattctccacggcttcaaagaccaagttggggaagataactggcagcagttctctgagcaattcccgccgctgctcaaggagaggctggcggctttctatggggtctaggtgatcatggagactgccaggtttctgtctgcgtcgtcgtcggagggattactggggagtgcgctgcatccggaagtcgctgtgccctggttgaggggggttagggaggagtgagtgggactcaaatccagatgccttccccgtccgtccgtccgtccgtccatccgtccacttgccctcctggcaggtgggtggggccaccatgctcatcctacaaacggggaggtgggggggacttctggtgggcaagggcccctgggctctaatagggtcatctctggcagcccacttgggccagctacgtgggagggaggaattacacagctgaccgaatccggcttcggatgaggtgagggaggagcaggtcaggaggggggccctcgtagggacgcgtacactcacacggacacacatggccacacgcatgtgcgggtgccataaccggcgaggctgggccagccgctccaccatttccccgactgcatggagacagtagaattagtgaacccctgagttaacccgtaaggccttccgtgtaacctgcatctagagtttaagaagcttctgctgttttgccggaattggcggtgactggggagggctgggtgggtggggggcctcaggcgggatctcggggcggggggaggaggatggtgaccttgggagtcgccctgtcagcacgcacatgcttgggacccactccacacactccctgccagctttgttgcagcctcagctggtggtgtctccgtccttatcctagcctagctcgcagggtgagaaccactggagtggctggggctggccagaggtcaccgtttctccttcctgtgtgctccagtggcttttgaagacactgggttgggacctttttcctgaagagagctgggtgtagccagagctactggcacctaccccgagcatctctctctgtaagcagcttcaggggcagtccgtttctctgtgcttctgaaacccccttctcacgtttcaggccccagttttaactcaaggcctggggcaggggcgtttaattgatgatgacagaggacacaggtttttgccagcaaaaaggaaaaccaaggcttggtggaagggaaaggtggtgtgtcccctgttccctattccatctccctgggacttcctgctcatcatagtacccagtgagcccagagatcctactagactgggtcagcaattctagagaaccttccggaatagtctgggaacatggtcaaggtggaaggggctcccctagagagggtgggggtgtagttacttcccagttggccagaaaactgggccttgcagacccccttagcattttttccctttttttccttccctgctttctacttctttggggagccccttgtgttttggagtctgactggagtctcgcatcctggggcctgctccatccatccctcctgggcgccagaccctccatccaagccctgtgtctttccatagtcagggtcaggccctgcatctattccaaggggcactcagtacacattccataaattagctgggtgtccctgcacgcccaccccatgaaactcgagcaggtctctggaagccatttgacaacatacaaacatagatatagaagactaagataaaatagcaagagttagctagggtatatagccagagaaaaattgcagaaaagtgcgtgcgaggcagggagaccccctttcccgcgtgatatcttcaggaaggctgcccgagatgctgggcagacacatcgtcaccagtgtgcccgagattgacccggtcttgtgccagggcaagatatggactccccatcctgtgcagtgggctctgtgtggaatgagctgggagctgctgaaggaaggtgggcgtataatggcgcgtgacccaggccagagagatccaggctcagaaagttcttctccagcttcacctgatgaagctgaggcacacctccgctctgaggtggggccagcctaagggccaggcacatcgggcaccttccgtccccatggtactatagcgcgatggccaatagaactttattcctacaccttttcctagggggctggtccggtccgacccctccaagctcagtggacactgggtctgaaaggaaggagtcttttgcttcctttctcctttttacaaaaacaacatagaaga

SEQ ID NO: 338908 - DNA, 4649 bp, Homo sapiens
cgtgagtcgtcatgattgatcttagtcaaaccctctctttggctccctccttccgcgcgagtctctggagaagccgcagcgcgagttgccgccgctgctgcccggggccggcttgccttgcgccatggactggcagccagacgagcagggcctgcagcaggtcctgcagctgctcaaagactcacagtcgcccaacacagccactcagcgcatcgtgcaggataaactcaaacaactcaatcagtttcctgacttcaacaactacctgattttcgtcctgaccagactcaagtcagaagatgagccaacgcgctctctcagtggcctcatcctcaagaacaacgtgaaggcacactatcagagcttcccaccccctgtggcagacttcatcaaacaggagtgtctcaacaacattggcgatgcctcctcgctcatccgagccaccattggcattctcatcaccaccatcgcttccaagggtgagctgcagatgtggcccgagctgctgccccagctctgcaacctgcttaactcggaggattacaacacttgtgagggagcctttggagccctgcagaagatctgtgaagactcatcagagcttctggacagtgacgccctcaacaggcccctcaacatcatgatccccaagttcctgcagttcttcaagcactgcagtcccaagatccggtcccacgccatcgcctgcgtgaaccagttcatcatggaccgggcccaggcgctgatggacaatattgacaccttcatcgagcacctatttgccctggctgtggatgatgaccccgaggtgcggaagaatgtgtgccgtgccctggtgatgcttctggaagtgcggattgacaggctcatcccccacatgcacagcatcatccagtacatgctgcagaggacccaggaccatgatgagaacgttgcccttgaggcctgtgagttctggctgacgctggccgagcagcccatctgcaaggaagtcctggcctcccatctggtccagttgatccccatcttggtgaatgggatgaagtactcggaaattgacatcatcctgctcaagggggatgtggaggaggatgaggctgtccccgacagtgagcaggacatcaagccacgcttccacaagtcacgcacggtcacactgccccacgaggctgagcggcctgatggctccgaggacgcggaggatgacgatgatgatgatgctctgtccgactggaatttgaggaagtgctcagcggctgcactggacgtcctcgccaatgtcttccgggaggaactgctgccccacctactcccactactcaaaggcctcctcttccaccccgagtgggtggtcaaggagtcgggcatcctggtgctgggcgccattgctgagggctgcatgcagggcatggtgccctacctgcctgagctgatcccgcacctgatccagtgcctgtcggataagaaggccttggtccgctccatcgcctgctggacgctgagccgctatgcccactgggtggtcagccagccacccgacatgcacctcaagcccctgatgacagagctgctcaaacgcatcctggatggcaacaagagggtacaggaggcggcctgcagtgcttttgccaccctggaggaagaggcctgcacggagctggtgccctacctcagctacatcctggacacccttgtctttgcctttgggaaataccagcacaagaacctgctcatcctctatgacgccattggcaccctggccgactctgtaggccaccacctcaaccagccggaatacatccagaagctgatgcccccactgatccagaagtggaatgagctcaaggacgaagacaaggacctcttccccctgctggagtgtctgtcatcggtggccaccgccctgcagagtggcttcctgccttactgtgagcccgtctaccagcgctgtgtcaccctggtgcagaagacactggctcaggccatgatgtacacccagcaccctgagcagtatgaggctcccgacaaggacttcatgatcgtagcactggatctgctcagcggcctggccgagggcctgggtggtcacgtggagcagctggtggcccgcagcaacatcatgacattgctgttccagtgcatgcaggactcgatgcctgaggtccggcagagctcctttgccctcctgggagacctcaccaaagcctgcttcatccatgtcaagccctgtatcgccgagttcatgcccattctgggcaccaacctgaacccagagttcatctccgtctgcaacaacgccacctgggccattggtgaaatctgcatgcagatgggggcagagatgcagccttatgtgcagatggtcctcaacaacctggtggaaatcattaaccgacccaacacacccaagacactgctggaaaacacagccatcaccatcggccgcttgggctacgtgtgcccccaggaggtggcacccatgctgcagcagttcatccggccttggtgcacgtccctcaggaacatcagggacaacgaggagaaggactcagccttccgcggcatctgcatgatgatcggtgtcaacccggggggcgttgtgcaggactttattttcttctgcgatgctgtagcctcctgggtgagcccgaaggatgaccttcgggacatgttttataagattctccacggcttcaaagaccaagttggggaagataactggcagcagttctctgagcaattcccgccgctgctcaaggagaggctggcggctttctatggggtctaggtgatcatggagactgccaggtttctgtctgcgtcgtcgtcggagggattactggggagtgcgctgcatccggaagtcgctgtgccctggttgaggggggttagggaggagtgagtgggactcaaatccagatgccttccccgtccgtccgtccgtccgtccatccgtccacttgccctcctggcaggtgggtggggccaccatgctcatcctacaaacggggaggtgggggggacttctggtgggcaagggcccctgggctctaatagggtcatctctggcagcccacttgggccagctacgtgggagggaggaattacacagctgaccgaatccggcttcggatgaggtgagggaggagcaggtcaggaggggggccctcgtagggacgcgtacactcacacggacacacatggccacacgcatgtgcgggtgccataaccggcgaggctgggccagccgctccaccatttccccgactgcatggagacagtagaattagtgaacccctgagttaacccgtaaggccttccgtgtaacctgcatctagagtttaagaagcttctgctgttttgccggaattggcggtgactggggagggctgggtgggtggggggcctcaggcgggatctcggggcggggggaggaggatggtgaccttgggagtcgccctgtcagcacgcacatgcttgggacccactccacacactccctgccagctttgttgcagcctcagctggtggtgtctccgtccttatcctagcctagctcgcagggtgagaaccactggagtggctggggctggccagaggtcaccgtttctccttcctgtgtgctccagtggcttttgaagacactgggttgggacctttttcctgaagagagctgggtgtagccagagctactggcacctaccccgagcatctctctctgtaagcagcttcaggggcagtccgtttctctgtgcttctgaaacccccttctcacgtttcaggccccagttttaactcaaggcctggggcaggggcgtttaattgatgatgacagaggacacaggtttttgccagcaaaaaggaaaaccaaggcttggtggaagggaaaggtggtgtgtcccctgttccctattccatctccctgggacttcctgctcatcatagtacccagtgaccccttgtgttttggagtctgactggagtctcgcatcctggggcctgctccatccatccctcctgggcgccagaccctccatccaagccctgtgtctttccatagtcagggtcaggccctgcatctattccaaggggcactcagtacacattccataaattagctgggtgtccctgcacgcccaccccatgaaactcgagcaggtctctggaagccatttgttaaaaaaaaaaaaaaaagttttaaaaataccttttaattttctggtaattccagttctttgaagcatcctctgctgggtcttggggtgtgtggatggattggctgtctgatgggattggtaacccctcgctactcaagatggggggatacaaacaccttcagggaaggggagcctggttcttctcgttttcctttttttttttttttttaaaaaaaaactatttaattttttaatttatttttggttgttttttgcacaatgaagtttcagcttctcaaccttctcccctacccagggctgtggacccagactggccttgagccacagtccctctttccctcctcaccctcttccccctgcgggctcccgggtctgtccatttgttactgtgctgtgctggggattggcgccgaggtggcgtgagattccacttgtgtagaactttgttgagtaaagatcagtttcttgtga

SEQ ID NO: 338909 - DNA, 4286 bp, Homo sapiens
cgtgagtcgtcatgattgatcttagtcaaaccctctctttggctccctccttccgcgcgagtctctggagaagccgcagcgcgagttgccgccgctgctgcccggggccggcttgccttgcgccatggactggcagccagacgagcagggcctgcagcaggtcctgcagctgctcaaagactcacagtcgcccaacacagccactcagcgcatcgtgcaggataaactcaaacaactcaatcagtttcctgacttcaacaactacctgattttcgtcctgaccagactcaagtcagaagatgagccaacgcgctctctcagtggcctcatcctcaagaacaacgtgaaggcacactatcagagcttcccaccccctgtggcagacttcatcaaacaggagtgtctcaacaacattggcgatgcctcctcgctcatccgagccaccattggcattctcatcaccaccatcgcttccaagggtgagctgcagatgtggcccgagctgctgccccagctctgcaacctgcttaactcggaggattacaacacttgtgagggagcctttggagccctgcagaagatctgtgaagactcatcagagcttctggacagtgacgccctcaacaggcccctcaacatcatgatccccaagttcctgcagttcttcaagcactgcagtcccaagatccggtcccacgccatcgcctgcgtgaaccagttcatcatggaccgggcccaggcgctgatggacaatattgacaccttcatcgagcacctatttgccctggctgtggatgatgaccccgaggtgcggaagaatgtgtgccgtgccctggtgatgcttctggaagtgcggattgacaggctcatcccccacatgcacagcatcatccagtacatgctgcagaggacccaggaccatgatgagaacgttgcccttgaggcctgtgagttctggctgacgctggccgagcagcccatctgcaaggaagtcctggcctcccatctggtccagttgatccccatcttggtgaatgggatgaagtactcggaaattgacatcatcctgctcaagggggatgtggaggaggatgaggctgtccccgacagtgagcaggacatcaagccacgcttccacaagtcacgcacggtcacactgccccacgaggctgagcggcctgatggctccgaggacgcggaggatgacgatgatgatgatgctctgtccgactggaatttgaggaagtgctcagcggctgcactggacgtcctcgccaatgtcttccgggaggaactgctgccccacctactcccactactcaaaggcctcctcttccaccccgagtgggtggtcaaggagtcgggcatcctggtgctgggcgccattgctgagggctgcatgcagggcatggtgccctacctgcctgagctgatcccgcacctgatccagtgcctgtcggataagaaggccttggtccgctccatcgcctgctggacgctgagccgctatgcccactgggtggtcagccagccacccgacatgcacctcaagcccctgatgacagagctgctcaaacgcatcctggatggcaacaagagggtacaggaggcggcctgcagtgcttttgccaccctggaggaagaggcctgcacggagctggtgccctacctcagctacatcctggacacccttgtctttgcctttgggaaataccagcacaagaacctgctcatcctctatgacgccattggcaccctggccgactctgtaggccaccacctcaaccagccggaatacatccagaagctgatgcccccactgatccagaagtggaatgagctcaaggacgaagacaaggacctcttccccctgctggagtgtctgtcatcggtggccaccgccctgcagagtggcttcctgccttactgtgagcccgtctaccagcgctgtgtcaccctggtgcagaagacactggctcaggccatgatgtacacccagcaccctgagcagtatgaggctcccgacaaggacttcatgatcgtagcactggatctgctcagcggcctggccgagggcctgggtggtcacgtggagcagctggtggcccgcagcaacatcatgacattgctgttccagtgcatgcaggactcgatgcctgaggtccggcagagctcctttgccctcctgggagacctcaccaaagcctgcttcatccatgtcaagccctgtatcgccgagttcatgcccattctgggcaccaacctgaacccagagttcatctccgtctgcaacaacgccacctgggccattggtgaaatctgcatgcagatgggggcagagatgcagccttatgtgcagatggtcctcaacaacctggtggaaatcattaaccgacccaacacacccaagacactgctggaaaacacagccatcaccatcggccgcttgggctacgtgtgcccccaggaggtggcacccatgctgcagcagttcatccggccttggtgcacgtccctcaggaacatcagggacaacgaggagaaggactcagccttccgcggcatctgcatgatgatcggtgtcaacccggggggcgttgtgcaggactttattttcttctgcgatgctgtagcctcctgggtgagcccgaaggatgaccttcgggacatgttttataagattctccacggcttcaaagaccaagttggggaagataactggcagcagttctctgagcaattcccgccgctgctcaaggagaggctggcggctttctatggggtctaggtgatcatggagactgccaggtttctgtctgcgtcgtcgtcggagggattactggggagtgcgctgcatccggaagtcgctgtgccctggttgaggggggttagggaggagtgagtgggactcaaatccagatgccttccccgtccgtccgtccgtccgtccatccgtccacttgccctcctggcaggtgggtggggccaccatgctcatcctacaaacggggaggtgggggggacttctggtgggcaagggcccctgggctctaatagggtcatctctggcagcccacttgggccagctacgtgggagggaggaattacacagctgaccgaatccggcttcggatgaggtgagggaggagcaggtcaggaggggggccctcgtagggacgcgtacactcacacggacacacatggccacacgcatgtgcgggtgccataaccggcgaggctgggccagccgctccaccatttccccgactgcatggagacagtagaattagtgaacccctgagttaacccgtaaggccttccgtgtaacctgcatctagagtttaagaagcttctgctgttttgccggaattggcggtgactggggagggctgggtgggtggggggcctcaggcgggatctcggggcggggggaggaggatggtgaccttgggagtcgccctgtcagcacgcacatgcttgggacccactccacacactccctgccagctttgttgcagcctcagctggtggtgtctccgtccttatcctagcctagctcgcagggtgagaaccactggagtggctggggctggccagaggtcaccgtttctccttcctgtgtgctccagtggcttttgaagacactgggttgggacctttttcctgaagagagctgggtgtagccagagctactggcacctaccccgagcatctctctctgtaagcagcttcaggggcagtccgtttctctgtgcttctgaaacccccttctcacgtttcaggccccagttttaactcaaggcctggggcaggggcgtttaattgatgatgacagaggacacaggtttttgccagcaaaaaggaaaaccaaggcttggtggaagggaaaggtggtgtgtcccctgttccctattccatctccctgggacttcctgctcatcatagtacccagtgagcccagagatcctactagactgggtcagcaattctagagaaccttccggaatagtctgggaacatggtcaaggtggaaggggctcccctagagagggtgggggtgtagttacttcccagttggccagaaaactgggccttgcagacccccttagcattttttccctttttttcctgttctactcttgggagcctgtgttgatcggagattcgcactgggcgtcatcaatctctggggcaaacttcatcagcggttacaaagcagcgtaaacaggacagaactcaatggtcctccctaaaagttgcttaaaaaacctcttgccccaaccgga

SEQ ID NO: 338910 - DNA, 1013 bp, Homo sapiens
tactactactaaattcgcggctgcgtcgacccaaggcttggtggaagggaaaggtggtgtgtcccctgttccctattccatctccctgggacttcctgctcatcatagtacccagtgagcccagagatcctactagactgggtcagcaattctagagaaccttccggaatagtctgggaacatggtcaaggtggaaggggctcccctagagagggtgggggtgtagttacttcccagttggccagaaaactgggccttgcagacccccttagcattttttccctttttttccttccctgctttctacttctttggggagccccttgtgttttggagtctgactggagtctcgcatcctggggcctgctccatccatccctcctgggcgccagaccctccatccaagccctgtgtctttccatagtcagggtcaggccctgcatctattccaaggggcactcagtacacattccataaattagctgggtgtccctgcacgcccaccccatgaaactcgagcaggtctctggaagccatttgttaaaaaaaaaaaaaaaagttttaaaaataccttttaattttctggtaattccagttctttgaagcatcctctgctgggtcttggggtgtgtggatggattggctgtctgatgggattggtaacccctcgctactcaagatggggggatacaaacaccttcagggaaggggagcctggttcttctcgttttcctttttttttttttttttaaaaaaaaactatttaattttttaatttatttttggttgttttttgcacaatgaagtttcagcttctcaaccttctcccctacccagggctgtggacccagactggccttgagccacagtccctctttccctcctcaccctcttccccctgcgggctcccgggtctgtccatttgttactgtgctgtgctggggattggcgccgaggtggcgtgagattccacttgtgtagaactttgttgagtaaagatcagtttcttgtga

SEQ ID NO: 338911 - DNA, 3522 bp, Homo sapiens
cgtgagtcgtcatgattgatcttagtcaaaccctctctttggctccctccttccgcgcgagtctctggagaagccgcagcgcgagttgccgccgctgctgcccggggccggcttgccttgcgccatggactggcagccagacgagcagggcctgcagcaggtcctgcagctgctcaaagactcacagtcgcccaacacagccactcagcgcatcgtgcaggataaactcaaacaactcaatcagtttcctgacttcaacaactacctgattttcgtcctgaccagactcaagtcagaagatgagccaacgcgctctctcagtggcctcatcctcaagaacaacgtgaaggcacactatcagagcttcccaccccctgtggcagacttcatcaaacaggagtgtctcaacaacattggcgatgcctcctcgctcatccgagccaccattggcattctcatcaccaccatcgcttccaagggtgagctgcagatgtggcccgagctgctgccccagctctgcaacctgcttaactcggaggattacaacacttgtgagggagcctttggagccctgcagaagatctgtgaagactcatcagagcttctggacagtgacgccctcaacaggcccctcaacatcatgatccccaagttcctgcagttcttcaagcactgcagtcccaagatccggtcccacgccatcgcctgcgtgaaccagttcatcatggaccgggcccaggcgctgatggacaatattgacaccttcatcgagcacctatttgccctggctgtggatgatgaccccgaggtgcggaagaatgtgtgccgtgccctggtgatgcttctggaagtgcggattgacaggctcatcccccacatgcacagcatcatccagtacatgctgcagaggacccaggaccatgatgagaacgttgcccttgaggcctgtgagttctggctgacgctggccgagcagcccatctgcaaggaagtcctggcctcccatctggtccagttgatccccatcttggtgaatgggatgaagtactcggaaattgacatcatcctgctcaagggggatgtggaggaggatgaggctgtccccgacagtgagcaggacatcaagccacgcttccacaagtcacgcacggtcacactgccccacgaggctgagcggcctgatggctccgaggacgcggaggatgacgatgatgatgatgctctgtccgactggaatttgaggaagtgctcagcggctgcactggacgtcctcgccaatgtcttccgggaggaactgctgccccacctactcccactactcaaaggcctcctcttccaccccgagtgggtggtcaaggagtcgggcatcctggtgctgggcgccattgctgagggctgcatgcagggcatggtgccctacctgcctgagctgatcccgcacctgatccagtgcctgtcggataagaaggccttggtccgctccatcgcctgctggacgctgagccgctatgcccactgggtggtcagccagccacccgacatgcacctcaagcccctgatgacagagctgctcaaacgcatcctggatggcaacaagagggtacaggaggcggcctgcagtgcttttgccaccctggaggaagaggcctgcacggagctggtgccctacctcagctacatcctggacacccttgtctttgcctttgggaaataccagcacaagaacctgctcatcctctatgacgccattggcaccctggccgactctgtaggccaccacctcaaccagccggaatacatccagaagctgatgcccccactgatccagaagtggaatgagctcaaggacgaagacaaggacctcttccccctgctggagtgtctgtcatcggtggccaccgccctgcagagtggcttcctgccttactgtgagcccgtctaccagcgctgtgtcaccctggtgcagaagacactggctcaggccatgatgtacacccagcaccctgagcagtatgaggctcccgacaaggacttcatgatcgtagcactggatctgctcagcggcctggccgagggcctgggtggtcacgtggagcagctggtggcccgcagcaacatcatgacattgctgttccagtgcatgcaggactcgatgcctgaggtccggcagagctcctttgccctcctgggagacctcaccaaagcctgcttcatccatgtcaagccctgtatcgccgagttcatgcccattctgggcaccaacctgaacccagagttcatctccgtctgcaacaacgccacctgggccattggtgaaatctgcatgcagatgggggcagagatgcagccttatgtgcagatggtcctcaacaacctggtggaaatcattaaccgacccaacacacccaagacactgctggaaaacacagccatcaccatcggccgcttgggctacgtgtgcccccaggaggtggcacccatgctgcagcagttcatccggccttggtgcacgtccctcaggaacatcagggacaacgaggagaaggactcagccttccgcggcatctgcatgatgatcggtgtcaacccggggggcgttgtgcaggactttattttcttctgcgatgctgtagcctcctgggtgagcccgaaggatgaccttcgggacatgttttataagattctccacggcttcaaagaccaagttggggaagataactggcagcagttctctgagcaattcccgccgctgctcaaggagaggctggcggctttctatggggtctaggtgatcatggagactgccaggtttctgtctgcgtcgtcgtcggagggattactggggagtgcgctgcatccggaagtcgctgtgccctggttgaggggggttagggaggagtgagtgggactcaaatccagatgccttccccgtccgtccgtccgtccgtccatccgtccacttgccctcctggcaggtgggtggggccaccatgctcatcctacaaacggggaggtgggggggacttctggtgggcaagggcccctgggctctaatagggtcatctctggcagcccacttgggccagctacgtgggagggaggaattacacagctgaccgaatccggcttcggatgaggtgagggaggagcaggtcaggaggggggccctcgtagggacgcgtacactcacacggacacacatggccacacgcatgtgcgggtgccataaccggcgaggctgggccagccgctccaccatttccccgactgcatggagacagtagaattagtgaacccctgagttaacccgtaaggccttccgtgtaacctgcatctagagtttaagaagcttctgctgtttgctcccgggtctgtccatttgttactgtgctgtgctggggattggcgccgaggtggcgtgagattccacttgtgtagaactttgttgagtaaagatcagtttcttgtgaactccttagtctgtggcttcctgtgtccttggctttggtagtgaagaaatgt

SEQ ID NO: 338912 - DNA, 2872 bp, Homo sapiens
cgtgagtcgtcatgattgatcttagtcaaaccctctctttggctccctccttccgcgcgagtctctggagaagccgcagcgcgagttgccgccgctgctgcccggggccggcttgccttgcgccatggactggcagccagacgagcagggcctgcagcaggtcctgcagctgctcaaagactcacagtcgcccaacacagccactcagcgcatcgtgcaggataaactcaaacaactcaatcagtttcctgacttcaacaactacctgattttcgtcctgaccagactcaagtcagaagatgagccaacgcgctctctcagtggcctcatcctcaagaacaacgtgaaggcacactatcagagcttcccaccccctgtggcagacttcatcaaacaggagtgtctcaacaacattggcgatgcctcctcgctcatccgagccaccattggcattctcatcaccaccatcgcttccaagggtgagctgcagatgtggcccgagctgctgccccagctctgcaacctgcttaactcggaggattacaacacttgtgagggagcctttggagccctgcagaagatctgtgaagactcatcagagcttctggacagtgacgccctcaacaggcccctcaacatcatgatccccaagttcctgcagttcttcaagcactgcagtcccaagatccggtcccacgccatcgcctgcgtgaaccagttcatcatggaccgggcccaggcgctgatggacaatattgacaccttcatcgagcacctatttgccctggctgtggatgatgaccccgaggtgcggaagaatgtgtgccgtgccctggtgatgcttctggaagtgcggattgacaggctcatcccccacatgcacagcatcatccagtacatgctgcagaggacccaggaccatgatgagaacgttgcccttgaggcctgtgagttctggctgacgctggccgagcagcccatctgcaaggaagtcctggcctcccatctggtccagttgatccccatcttggtgaatgggatgaagtactcggaaattgacatcatcctgctcaagggggatgtggaggaggatgaggctgtccccgacagtgagcaggacatcaagccacgcttccacaagtcacgcacggtcacactgccccacgaggctgagcggcctgatggctccgaggacgcggaggatgacgatgatgatgatgctctgtccgactggaatttgaggaagtgctcagcggctgcactggacgtcctcgccaatgtcttccgggaggaactgctgccccacctactcccactactcaaaggcctcctcttccaccccgagtgggtggtcaaggagtcgggcatcctggtgctgggcgccattgctgagggctgcatgcagggcatggtgccctacctgcctgagctgatcccgcacctgatccagtgcctgtcggataagaaggccttggtccgctccatcgcctgctggacgctgagccgctatgcccactgggtggtcagccagccacccgacatgcacctcaagcccctgatgacagagctgctcaaacgcatcctggatggcaacaagagggtacaggaggcggcctgcagtgcttttgccaccctggaggaagaggcctgcacggagctggtgccctacctcagctacatcctggacacccttgtctttgcctttgggaaataccagcacaagaacctgctcatcctctatgacgccattggcaccctggccgactctgtaggccaccacctcaaccagccggaatacatccagaagctgatgcccccactgatccagaagtggaatgagctcaaggacgaagacaaggacctcttccccctgctggagtgtctgtcatcggtggccaccgccctgcagagtggcttcctgccttactgtgagcccgtctaccagcgctgtgtcaccctggtgcagaagacactggctcaggccatgatgtacacccagcaccctgagcagtatgaggctcccgacaaggacttcatgatcgtagcactggatctgctcagcggcctggccgagggcctgggtggtcacgtggagcagctggtggcccgcagcaacatcatgacattgctgttccagtgcatgcaggactcgatgcctgaggtccggcagagctcctttgccctcctgggagacctcaccaaagcctgcttcatccatgtcaagccctgtatcgccgagttcatgcccattctgggcaccaacctgaacccagagttcatctccgtctgcaacaacgccacctgggccattggtgaaatctgcatgcagatgggggcagagatgcagccttatgtgcagatggtcctcaacaacctggtggaaatcattaaccgacccaacacacccaagacactgctggaaaacacaggtcgcctgacgagtccctctgccattccagccatcaccatcggccgcttgggctacgtgtgcccccaggaggtggcacccatgctgcagcagttcatccggccttggtgcacgtccctcaggaacatcagggacaacgaggagaaggactcagccttccgcggcatctgcatgatgatcggtgtcaacccggggggcgttgtgcaggactttattttcttctgcgatgctgtagcctcctgggtgagcccgaaggatgaccttcgggacatgttttataagattctccacggcttcaaagaccaagttggggaagataactggcagcagttctctgagcaattcccgccgctgctcaaggagaggctggcggctttctatggggtctaggtgatcatggagactgccaggtaaggagactgcagctggcaagtcagcactgtc

SEQ ID NO: 338913 - DNA, 3545 bp, Homo sapiens
cgtgagtcgtcatgattgatcttagtcaaaccctctctttggctccctccttccgcgcgagtctctggagaagccgcagcgcgagttgccgccgctgctgcccggggccggcttgccttgcgccatggactggcagccagacgagcagggcctgcagcaggtcctgcagctgctcaaagactcacagtcgcccaacacagccactcagcgcatcgtgcaggataaactcaaacaactcaatcagtttcctgacttcaacaactacctgattttcgtcctgaccagactcaagtcagaagatgagccaacgcgctctctcagtggcctcatcctcaagaacaacgtgaaggcacactatcagagcttcccaccccctgtggcagacttcatcaaacaggagtgtctcaacaacattggcgatgcctcctcgctcatccgagccaccattggcattctcatcaccaccatcgcttccaagggtgagctgcagatgtggcccgagctgctgccccagctctgcaacctgcttaactcggaggattacaacacttgtgagggagcctttggagccctgcagaagatctgtgaagactcatcagagcttctggacagtgacgccctcaacaggcccctcaacatcatgatccccaagttcctgcagttcttcaagcactgcagtcccaagatccggtcccacgccatcgcctgcgtgaaccagttcatcatggaccgggcccaggcgctgatggacaatattgacaccttcatcgagcacctatttgccctggctgtggatgatgaccccgaggtgcggaagaatgtgtgccgtgccctggtgatgcttctggaagtgcggattgacaggctcatcccccacatgcacagcatcatccagtacatgctgcagaggacccaggaccatgatgagaacgttgcccttgaggcctgtgagttctggctgacgctggccgagcagcccatctgcaaggaagtcctggcctcccatctggtccagttgatccccatcttggtgaatgggatgaagtactcggaaattgacatcatcctgctcaagggggatgtggaggaggatgaggctgtccccgacagtgagcaggacatcaagccacgcttccacaagtcacgcacggtcacactgccccacgaggctgagcggcctgatggctccgaggacgcggaggatgacgatgatgatgatgctctgtccgactggaatttgaggaagtgctcagcggctgcactggacgtcctcgccaatgtcttccgggaggaactgctgccccacctactcccactactcaaaggcctcctcttccaccccgagtgggtggtcaaggagtcgggcatcctggtgctgggcgccattgctgagggctgcatgcagggcatggtgccctacctgcctgagctgatcccgcacctgatccagtgcctgtcggataagaaggccttggtccgctccatcgcctgctggacgctgagccgctatgcccactgggtggtcagccagccacccgacatgcacctcaagcccctgatgacagagctgctcaaacgcatcctggatggcaacaagagggtacaggaggcggcctgcagtgcttttgccaccctggaggaagaggcctgcacggagctggtgccctacctcagctacatcctggacacccttgtctttgcctttgggaaataccagcacaagaacctgctcatcctctatgacgccattggcaccctggccgactctgtaggccaccacctcaaccagccggaatacatccagaagctgatgcccccactgatccagaagtggaatgagctcaaggacgaagacaaggacctcttccccctgctggagtgtctgtcatcggtggccaccgccctgcagagtggcttcctgccttactgtgagcccgtctaccagcgctgtgtcaccctggtgcagaagacactggctcaggccatgatgtacacccagcaccctgagcagtatgaggctcccgacaaggacttcatgatcgtagcactggatctgctcagcggcctggccgagggcctgggtggtcacgtggagcagctggtggcccgcagcaacatcatgacattgctgttccagtgcatgcaggactcgatgcctgaggtccggcagagctcctttgccctcctgggagacctcaccaaagcctgcttcatccatgtcaagccctgtatcggtacgacactcgccttgtccctaacccatgaccccagccccggcctcaagtgatggagagcaatacccggggatgactgtgaccacattgggatgtattcgtactgtctgatggggcctgctggactaggtcctgcagcttaccctggctggccctccttctcagcacccctgtttctccccaccagccgagttcatgcccattctgggcaccaacctgaacccagagttcatctccgtctgcaacaacgccacctgggccattggtgaaatctgcatgcagatgggtgagtgccctgcaagtggcaacacgcgccccccattagcctgttctcaacctgggggcgggagcctagctctgactgacagcttccttcaaggcaagtctcttgggggtcgtcaggggtggagccaagcagaaaggtcatttgtgattggcttctctaaagaggagggataggagggctgttctgattggaccgttttgtgtagttggctaaaagactcattcggattggttgggtgactttggcttttttttcctttgacttgggcagcgtgttgtcaccttagcgactccagagaagcctctgttgtttggagggtgtgggtctgtccctggttggccagggattctgggtggggattagccggagaaggtcttttgtttcctcactggtagtggttggccagtctctagttggaactggggcgagtagtgagtgaggtggggcggccccctggcccctgtgggtggcgggggctgtgcagggctctgactgggtgctcccccaggggcagagatgcagccttatgtgcagatggtcctcaacaacctggtggaaatcattaaccgacccaacacacccaagacactgctggaaaacacaggtgggcacctggcccggctgctgcctgcacccctgcctgccttctggaggtggggttctgggctgggaagggcatcagaaagagccttgtcaaggaaccaaggagggtgtctggaagtacctggaaggggtcactgggagaagccccaagaaagatgcagcctcaggctgggtgcagtggctcatgcctgtaatctcagcactttgggaggcagatcacctgaagtcaggagttcgagaccagcctggccaacatggtgaaaccccatctctactaaaaaatacaaaaattagccgggggtaatggcacgtgcctgcaatcccagctactcgggaggctgaggcaggttgcaatgagccaagatcatgccactgcactccagcctgggcaacagagcaagactccatctcaaaaacaaaac

SEQ ID NO: 338914 - DNA, 678 bp, Homo sapiens
ttttttttaacaaatggcttccagagacctgctccatccatccctcctgggcgccagaccctccatccaagccctgtgtctttccatagtcagggtcaggccctgcatctattccaaggggcactcagtacacattccataaattagctgggtgtccctgcacgcccaccccatgaaactcgagcaggtctctggaagccatttgttaaaaaaaaaaaaaaaagttttaaaaataccttttaattttctggtaattccagttctttgaagcatcctctgctgggtcttggggtgtgtggatggattggctgtctgatgggattggtaacccctcgctactcaagatggggggatacaaacaccttcagggaaggggagcctggttcttctcgttttcctttttttttttttttttaaaaaaaaactatttaattttttaatttatttttggttgttttttgcacaatgaagtttcagcttctcaaccttctcccctacccagggctgtggacccagactggccttgagccacagtccctctttccctcctcaccctcttccccctgcgggctcccgggtctgtccatttgttactgtgctgtgctggggattggcgccgaggtggcgtgagattccacttgtgtagaactttgttgagtaaagatcagtttcttgtga

SEQ ID NO: 338915 - DNA, 1632 bp, Homo sapiens
cgtgagtcgtcatgattgatcttagtcaaaccctctctttggctccctccttccgcgcgagtctctggagaagccgcagcgcgagttgccgccgctgctgcccggggccggcttgccttgcgccatggactggcagccagacgagcagggcctgcagcaggtcctgcagctgctcaaagactcacagtcgcccaacacagccactcagcgcatcgtgcaggataaactcaaacaactcaatcagtttcctgacttcaacaactacctgattttcgtcctgaccagactcaagtcagaagatgagccaacgcgctctctcagtggcctcatcctcaagaacaacgtgaaggcacactatcagagcttcccaccccctgtggcagacttcatcaaacaggagtgtctcaacaacattggcgatgcctcctcgctcatccgagccaccattggcattctcatcaccaccatcgcttccaagggtgagctgcagatgtggcccgagctgctgccccagctctgcaacctgcttaactcggaggattacaacacttgtgagggagcctttggagccctgcagaagatctgtgaagactcatcagagcttctggacagtgacgccctcaacaggcccctcaacatcatgatccccaagttcctgcagttcttcaagcactgcagtcccaagatccggtcccacgccatcgcctgcgtgaaccagttcatcatggaccgggcccaggcgctgatggacaatattgacaccttcatcgagcacctatttgccctggctgtggatgatgaccccgaggtgcggaagaatgtgtgccgtgccctggtgatgcttctggaagtgcggattgacaggctcatcccccacatgcacagcatcatccagtacatgctgcagaggacccaggaccatgatgagaacgttgcccttgaggcctgtgagttctggctgacgctggccgagcagcccatctgcaaggaagtcctggcctcccatctggtccagttgatccccatcttggtgaatgggatgaagtactcggaaattgacatcatcctgctcaagggggatgtggaggaggatgaggctgtccccgacagtgagcaggacatcaagccacgcttccacaagtcacgcacggtcacactgccccacgaggctgagcggcctgatggctccgaggacgcggaggatgacgatgatgatgatgctctgtccgactggaatttgagtgtgtgcccctgcctgggggtggtggtggggtgcaagccctggactccctcttgggaggtgactagaagctgaggcagaagctgattagaagctgatcgtggccgggcgcagtggcttacgcctgtaatcccagcactttggaaggctgaggcgggcggatcacgaggtcaggagatcaacaccatcctggctaacacagtgaaaccccgtctctactaaaaatacaaaaaattagtcgggcgtggtgtcgggcgcctgtagtcccagctactcgggaggctgaggcaggaaaacggcatgaacccaggaggcggagcttgcagtgagccgagatagcgccactgcactccggcctgggcggaaaaagtgagactccgtctcaaaaaaac

SEQ ID NO: 338916 - DNA, 875 bp, Homo sapiens
aggtggcggctttctgcacgtgtttctcagcccaggtttcagtccagcggaactggctacctcggaatcccaactgctcctttagggtgtcttccgcgattctccgagtggagttaggcgcctgccgacacttccctaaccttggaggcccgggacttgattttcatgaatgaacggagccgggactgactttgcctacggcaaagaaggaaaaacggtgccctactgtcttcagacgtcgcaaggatcaagaagatttctttcttcatgaccctgcccttgccagaatttcctgcgctgttccacctcattcaacttcagcttgccttgcgccatggactggcagccagacgagcagggcctgcagcaggtcctgcagctgctcaaagactcacagtcgcccaacacagccactcagcgcatcgtgcaggataaactcaaacaactcaatcagtttcctgacttcaacaactacctgattttcgtcctgaccagactcaagtcagaagatgagccaacgcgctctctcagtggcctcatcctcaagaacaacgtgaaggcacactatcagagcttcccaccccctgtggcagacttcatcaaacaggagtgtctcaacaacattggcgatgcctcctcgctcatccgagccaccattggcattctcatcaccaccatcgcttccaagggtgagctgcagatgtggcccgagctgctgccccagctctgcaacctgcttaactcggaggattacaacacttgtgaggctcccgggtctgtccatttgttactgtgctgtgctggggattggcgccgaggtggcgtgagattccacttgtgtagaactttgttgagtaaagatcagtttcttgtga

SEQ ID NO: 338917 - DNA, 294 bp, Homo sapiens
gtgctctgtgtcattgtgggcttattagggagcgggatcccccaggagctggcagcctggtcccagtggtcagagatagtgtcaggtacataatgaggggacctggctgggggaaggcctctgtcttccaagtcccttaacagcctggcagaaactcaaacaactcaatcagtttcctgacttcaacaactacctgattttcgtcctgaccagactcaagtcagaaggtacgccctctgctcccttccatgcgatcgggaccctgctttctccccctgggcccctgaacctcag

SEQ ID NO: 338918 - DNA, 296 bp, Homo sapiens
ggactcagccttccgcggcatctgcatgatgatcggtgtcaacccggggggcgttgtgcaggttggggcagctgggctctgagggcaggcgcgggcgctgggctcgggcggcccctcacctgggatccgtcacgtttcaggactttattttcttctgcgatgctgtagcctcctgggtgagcccgaaggatgaccttcgggacatgttttataaggtgaggctctgtctgggccctgatctagttccgggagcaggcaggggtgagaccatctggtaacaatggggcctggggatg

SEQ ID NO: 338919 - DNA, 4850 bp, Homo sapiens
cgtgagtcgtcatgattgatcttagtcaaaccctctctttggctccctccttccgcgcgagtctctggagaagccgcagcgcgagttgccgccgctgctgcccggggccggcttgccttgcgccatggactggcagccagacgagcagggcctgcagcaggtcctgcagctgctcaaagactcacagtcgcccaacacagccactcagcgcatcgtgcaggataaactcaaacaactcaatcagtttcctgacttcaacaactacctgattttcgtcctgaccagactcaagtcagaagatgagccaacgcgctctctcagtggcctcatcctcaagaacaacgtgaaggcacactatcagagcttcccaccccctgtggcagacttcatcaaacaggagtgtctcaacaacattggcgatgcctcctcgctcatccgagccaccattggcattctcatcaccaccatcgcttccaagggtgagctgcagatgtggcccgagctgctgccccagctctgcaacctgcttaactcggaggattacaacacttgtgagggagcctttggagccctgcagaagatctgtgaagactcatcagagcttctggacagtgacgccctcaacaggcccctcaacatcatgatccccaagttcctgcagttcttcaagcactgcagtcccaagatccggtcccacgccatcgcctgcgtgaaccagttcatcatggaccgggcccaggcgctgatggacaatattgacaccttcatcgagcacctatttgccctggctgtggatgatgaccccgaggtgcggaagaatgtgtgccgtgccctggtgatgcttctggaagtgcggattgacaggctcatcccccacatgcacagcatcatccagtacatgctgcagaggacccaggaccatgatgagaacgttgcccttgaggcctgtgagttctggctgacgctggccgagcagcccatctgcaaggaagtcctggcctcccatctggtccagttgatccccatcttggtgaatgggatgaagtactcggaaattgacatcatcctgctcaagggggatgtggaggaggatgaggctgtccccgacagtgagcaggacatcaagccacgcttccacaagtcacgcacggtcacactgccccacgaggctgagcggcctgatggctccgaggacgcggaggatgacgatgatgatgatgctctgtccgactggaatttgaggaagtgctcagcggctgcactggacgtcctcgccaatgtcttccgggaggaactgctgccccacctactcccactactcaaaggcctcctcttccaccccgagtgggtggtcaaggagtcgggcatcctggtgctgggcgccattgctgagggctgcatgcagggcatggtgccctacctgcctgagctgatcccgcacctgatccagtgcctgtcggataagaaggccttggtccgctccatcgcctgctggacgctgagccgctatgcccactgggtggtcagccagccacccgacatgcacctcaagcccctgatgacagagctgctcaaacgcatcctggatggcaacaagagggtacaggaggcggcctgcagtgcttttgccaccctggaggaagaggcctgcacggagctggtgccctacctcagctacatcctggacacccttgtctttgcctttgggaaataccagcacaagaacctgctcatcctctatgacgccattggcaccctggccgactctgtaggccaccacctcaaccagccggaatacatccagaagctgatgcccccactgatccagaagtggaatgagctcaaggacgaagacaaggacctcttccccctgctggagtgtctgtcatcggtggccaccgccctgcagagtggcttcctgccttactgtgagcccgtctaccagcgctgtgtcaccctggtgcagaagacactggctcaggccatgatgtacacccagcaccctgagcagtatgaggctcccgacaaggacttcatgatcgtagcactggatctgctcagcggcctggccgagggcctgggtggtcacgtggagcagctggtggcccgcagcaacatcatgacattgctgttccagtgcatgcaggactcgatgcctgaggtccggcagagctcctttgccctcctgggagacctcaccaaagcctgcttcatccatgtcaagccctgtatcgccgagttcatgcccattctgggcaccaacctgaacccagagttcatctccgtctgcaacaacgccacctgggccattggtgaaatctgcatgcagatgggggcagagatgcagccttatgtgcagatggtcctcaacaacctggtggaaatcattaaccgacccaacacacccaagacactgctggaaaacacagccatcaccatcggccgcttgggctacgtgtgcccccaggaggtggcacccatgctgcagcagttcatccggccttggtgcacgtccctcaggaacatcagggacaacgaggagaaggactcagccttccgcggcatctgcatgatgatcggtgtcaacccggggggcgttgtgcaggactttattttcttctgcgatgctgtagcctcctgggtgagcccgaaggatgaccttcgggacatgttttataagattctccacggcttcaaagaccaagttggggaagataactggcagcagttctctgagcaattcccgccgctgctcaaggagaggctggcggctttctatggggtctaggtgatcatggagactgccaggtttctgtctgcgtcgtcgtcggagggattactggggagtgcgctgcatccggaagtcgctgtgccctggttgaggggggttagggaggagtgagtgggactcaaatccagatgccttccccgtccgtccgtccgtccgtccatccgtccacttgccctcctggcaggtgggtggggccaccatgctcatcctacaaacggggaggtgggggggacttctggtgggcaagggcccctgggctctaatagggtcatctctggcagcccacttgggccagctacgtgggagggaggaattacacagctgaccgaatccggcttcggatgaggtgagggaggagcaggtcaggaggggggccctcgtagggacgcgtacactcacacggacacacatggccacacgcatgtgcgggtgccataaccggcgaggctgggccagccgctccaccatttccccgactgcatggagacagtagaattagtgaacccctgagttaacccgtaaggccttccgtgtaacctgcatctagagtttaagaagcttctgctgttttgccggaattggcggtgactggggagggctgggtgggtggggggcctcaggcgggatctcggggcggggggaggaggatggtgaccttgggagtcgccctgtcagcacgcacatgcttgggacccactccacacactccctgccagctttgttgcagcctcagctggtggtgtctccgtccttatcctagcctagctcgcagggtgagaaccactggagtggctggggctggccagaggtcaccgtttctccttcctgtgtgctccagtggcttttgaagacactgggttgggacctttttcctgaagagagctgggtgtagccagagctactggcacctaccccgagcatctctctctgtaagcagcttcaggggcagtccgtttctctgtgcttctgaaacccccttctcacgtttcaggccccagttttaactcaaggcctggggcaggggcgtttaattgatgatgacagaggacacaggtttttgccagcaaaaaggaaaaccaaggcttggtggaagggaaaggtggtgtgtcccctgttccctattccatctccctgggacttcctgctcatcatagtacccagtgagcccagagatcctactagactgggtcagcaattctagagaaccttccggaatagtctgggaacatggtcaaggtggaaggggctcccctagagagggtgggggtgtagttacttcccagttggccagaaaactgggccttgcagacccccttagcattttttccctttttttccttccctgctttctacttctttggggagccccttgtgttttggagtctgactggagtctcgcatcctggggcctgctccatccatccctcctgggcgccagaccctccatccaagccctgtgtctttccatagtcagggtcaggccctgcatctattccaaggggcactcagtacacattccataaattagctgggtgtccctgcacgcccaccccatgaaactcgagcaggtctctggaagccatttgttaaaaaaaaaaaaaaaagttttaaaaataccttttaattttctggtaattccagttctttgaagcatcctctgctgggtcttggggtgtgtggatggattggctgtctgatgggattggtaacccctcgctactcaagatggggggatacaaacaccttcagggaaggggagcctggttcttctcgttttcctttttttttttttttttaaaaaaaaactatttaattttttaatttatttttggttgttttttgcacaatgaagtttcagcttctcaaccttctcccctacccagggctgtggacccagactggccttgagccacagtccctctttccctcctcaccctcttccccctgcgggctcccgggtctgtccatttgttactgtgctgtgctggggattggcgccgaggtggcgtgagattccacttgtgtagaactttgttgagtaaagatcagtttcttgtga

SEQ ID NO: 338920 - DNA, 4880 bp, Homo sapiens
cgtgagtcgtcatgattgatcttagtcaaaccctctctttggctccctccttccgcgcgagtctctggagaagccgcagcgcgagttgccgccgctgctgcccggggccggcttgccttgcgccatggactggcagccagacgagcagggcctgcagcaggtcctgcagctgctcaaagactcacagtcgcccaacacagccactcagcgcatcgtgcaggataaactcaaacaactcaatcagtttcctgacttcaacaactacctgattttcgtcctgaccagactcaagtcagaagatgagccaacgcgctctctcagtggcctcatcctcaagaacaacgtgaaggcacactatcagagcttcccaccccctgtggcagacttcatcaaacaggagtgtctcaacaacattggcgatgcctcctcgctcatccgagccaccattggcattctcatcaccaccatcgcttccaagggtgagctgcagatgtggcccgagctgctgccccagctctgcaacctgcttaactcggaggattacaacacttgtgagggagcctttggagccctgcagaagatctgtgaagactcatcagagcttctggacagtgacgccctcaacaggcccctcaacatcatgatccccaagttcctgcagttcttcaagcactgcagtcccaagatccggtcccacgccatcgcctgcgtgaaccagttcatcatggaccgggcccaggcgctgatggacaatattgacaccttcatcgagcacctatttgccctggctgtggatgatgaccccgaggtgcggaagaatgtgtgccgtgccctggtgatgcttctggaagtgcggattgacaggctcatcccccacatgcacagcatcatccagtacatgctgcagaggacccaggaccatgatgagaacgttgcccttgaggcctgtgagttctggctgacgctggccgagcagcccatctgcaaggaagtcctggcctcccatctggtccagttgatccccatcttggtgaatgggatgaagtactcggaaattgacatcatcctgctcaagggggatgtggaggaggatgaggctgtccccgacagtgagcaggacatcaagccacgcttccacaagtcacgcacggtcacactgccccacgaggctgagcggcctgatggctccgaggacgcggaggatgacgatgatgatgatgctctgtccgactggaatttgaggaagtgctcagcggctgcactggacgtcctcgccaatgtcttccgggaggaactgctgccccacctactcccactactcaaaggcctcctcttccaccccgagtgggtggtcaaggagtcgggcatcctggtgctgggcgccattgctgagggctgcatgcagggcatggtgccctacctgcctgagctgatcccgcacctgatccagtgcctgtcggataagaaggccttggtccgctccatcgcctgctggacgctgagccgctatgcccactgggtggtcagccagccacccgacatgcacctcaagcccctgatgacagagctgctcaaacgcatcctggatggcaacaagagggtacaggaggcggcctgcagtgcttttgccaccctggaggaagaggcctgcacggagctggtgccctacctcagctacatcctggacacccttgtctttgcctttgggaaataccagcacaagaacctgctcatcctctatgacgccattggcaccctggccgactctgtaggccaccacctcaaccagccggaatacatccagaagctgatgcccccactgatccagaagtggaatgagctcaaggacgaagacaaggacctcttccccctgctggagtgtctgtcatcggtggccaccgccctgcagagtggcttcctgccttactgtgagcccgtctaccagcgctgtgtcaccctggtgcagaagacactggctcaggccatgatgtacacccagcaccctgagcagtatgaggctcccgacaaggacttcatgatcgtagcactggatctgctcagcggcctggccgagggcctgggtggtcacgtggagcagctggtggcccgcagcaacatcatgacattgctgttccagtgcatgcaggactcgatgcctgaggtccggcagagctcctttgccctcctgggagacctcaccaaagcctgcttcatccatgtcaagccctgtatcgccgagttcatgcccattctgggcaccaacctgaacccagagttcatctccgtctgcaacaacgccacctgggccattggtgaaatctgcatgcagatgggggcagagatgcagccttatgtgcagatggtcctcaacaacctggtggaaatcattaaccgacccaacacacccaagacactgctggaaaacacaggtcgcctgacgagtccctctgccattccagccatcaccatcggccgcttgggctacgtgtgcccccaggaggtggcacccatgctgcagcagttcatccggccttggtgcacgtccctcaggaacatcagggacaacgaggagaaggactcagccttccgcggcatctgcatgatgatcggtgtcaacccggggggcgttgtgcaggactttattttcttctgcgatgctgtagcctcctgggtgagcccgaaggatgaccttcgggacatgttttataagattctccacggcttcaaagaccaagttggggaagataactggcagcagttctctgagcaattcccgccgctgctcaaggagaggctggcggctttctatggggtctaggtgatcatggagactgccaggtttctgtctgcgtcgtcgtcggagggattactggggagtgcgctgcatccggaagtcgctgtgccctggttgaggggggttagggaggagtgagtgggactcaaatccagatgccttccccgtccgtccgtccgtccgtccatccgtccacttgccctcctggcaggtgggtggggccaccatgctcatcctacaaacggggaggtgggggggacttctggtgggcaagggcccctgggctctaatagggtcatctctggcagcccacttgggccagctacgtgggagggaggaattacacagctgaccgaatccggcttcggatgaggtgagggaggagcaggtcaggaggggggccctcgtagggacgcgtacactcacacggacacacatggccacacgcatgtgcgggtgccataaccggcgaggctgggccagccgctccaccatttccccgactgcatggagacagtagaattagtgaacccctgagttaacccgtaaggccttccgtgtaacctgcatctagagtttaagaagcttctgctgttttgccggaattggcggtgactggggagggctgggtgggtggggggcctcaggcgggatctcggggcggggggaggaggatggtgaccttgggagtcgccctgtcagcacgcacatgcttgggacccactccacacactccctgccagctttgttgcagcctcagctggtggtgtctccgtccttatcctagcctagctcgcagggtgagaaccactggagtggctggggctggccagaggtcaccgtttctccttcctgtgtgctccagtggcttttgaagacactgggttgggacctttttcctgaagagagctgggtgtagccagagctactggcacctaccccgagcatctctctctgtaagcagcttcaggggcagtccgtttctctgtgcttctgaaacccccttctcacgtttcaggccccagttttaactcaaggcctggggcaggggcgtttaattgatgatgacagaggacacaggtttttgccagcaaaaaggaaaaccaaggcttggtggaagggaaaggtggtgtgtcccctgttccctattccatctccctgggacttcctgctcatcatagtacccagtgagcccagagatcctactagactgggtcagcaattctagagaaccttccggaatagtctgggaacatggtcaaggtggaaggggctcccctagagagggtgggggtgtagttacttcccagttggccagaaaactgggccttgcagacccccttagcattttttccctttttttccttccctgctttctacttctttggggagccccttgtgttttggagtctgactggagtctcgcatcctggggcctgctccatccatccctcctgggcgccagaccctccatccaagccctgtgtctttccatagtcagggtcaggccctgcatctattccaaggggcactcagtacacattccataaattagctgggtgtccctgcacgcccaccccatgaaactcgagcaggtctctggaagccatttgttaaaaaaaaaaaaaaaagttttaaaaataccttttaattttctggtaattccagttctttgaagcatcctctgctgggtcttggggtgtgtggatggattggctgtctgatgggattggtaacccctcgctactcaagatggggggatacaaacaccttcagggaaggggagcctggttcttctcgttttcctttttttttttttttttaaaaaaaaactatttaattttttaatttatttttggttgttttttgcacaatgaagtttcagcttctcaaccttctcccctacccagggctgtggacccagactggccttgagccacagtccctctttccctcctcaccctcttccccctgcgggctcccgggtctgtccatttgttactgtgctgtgctggggattggcgccgaggtggcgtgagattccacttgtgtagaactttgttgagtaaagatcagtttcttgtga

SEQ ID NO: 338921 - DNA, 4902 bp, Homo sapiens
cgtgagtcgtcatgattgatcttagtcaaaccctctctttggctccctccttccgcgcgagtctctggagaagccgcagcgcgagttgccgccgctgctgcccggggccggcttgccttgcgccatggactggcagccagacgagcagggcctgcagcaggtcctgcagctgctcaaagactcacagtcgcccaacacagccactcagcgcatcgtgcaggataaactcaaacaactcaatcagtttcctgacttcaacaactacctgattttcgtcctgaccagactcaagtcagaagatgagccaacgcgctctctcagtggcctcatcctcaagaacaacgtgaaggcacactatcagagcttcccaccccctgtggcagacttcatcaaacaggagtgtctcaacaacattggcgatgcctcctcgctcatccgagccaccattggcattctcatcaccaccatcgcttccaagggtgagctgcagatgtggcccgagctgctgccccagctctgcaacctgcttaactcggaggattacaacacttgtgagggagcctttggagccctgcagaagatctgtgaagactcatcagagcttctggacagtgacgccctcaacaggcccctcaacatcatgatccccaagttcctgcagttcttcaagcactgcagtcccaagatccggtcccacgccatcgcctgcgtgaaccagttcatcatggaccgggcccaggcgctgatggacaatattgacaccttcatcgagcacctatttgccctggctgtggatgatgaccccgaggtgcggaagaatgtgtgccgtgccctggtgatgcttctggaagtgcggattgacaggctcatcccccacatgcacagcatcatccagtacatgctgcagaggacccaggaccatgatgagaacgttgcccttgaggcctgtgagttctggctgacgctggccgagcagcccatctgcaaggaagtcctggcctcccatctggtccagttgatccccatcttggtgaatgggatgaagtactcggaaattgacatcatcctgctcaagggggatgtggaggaggatgaggctgtccccgacagtgagcaggacatcaagccacgcttccacaagtcacgcacggtcacactgccccacgaggctgagcggcctgatggctccgaggacgcggaggatgacgatgatgatgatgctctgtccgactggaatttgaggaagtgctcagcggctgcactggacgtcctcgccaatgtcttccgggaggaactgctgccccacctactcccactactcaaaggcctcctcttccaccccgagtgggtggtcaaggagtcgggcatcctggtgctgggcgccattgctgagggctgcatgcagggcatggtgccctacctgcctgagctgatcccgcacctgatccagtgcctgtcggataagaaggccttggtccgctccatcgcctgctggacgctgagccgctatgcccactgggtggtcagccagccacccgacatgcacctcaagcccctgatgacagagctgctcaaacgcatcctggatggcaacaagagggtacaggaggcggcctgcagtgcttttgccaccctggaggaagaggcctgcacggagctggtgccctacctcagctacatcctggacacccttgtctttgcctttgggaaataccagcacaagaacctgctcatcctctatgacgccattggcaccctggccgactctgtaggccaccacctcaaccagccggaatacatccagaagctgatgcccccactgatccagaagtggaatgagctcaaggacgaagacaaggacctcttccccctgctggagtgtctgtcatcggtggccaccgccctgcagagtggcttcctgccttactgtgagcccgtctaccagcgctgtgtcaccctggtgcagaagacactggctcaggccatgatgtacacccagcaccctgagcagtatgaggctcccgacaaggacttcatgatcgtagcactggatctgctcagcggcctggccgagggcctgggtggtcacgtggagcagctggtggcccgcagcaacatcatgacattgctgttccagtgcatgcaggactcgatgcctgaggtccggcagagctcctttgccctcctgggagacctcaccaaagcctgcttcatccatgtcaagccctgtatcgccgagttcatgcccattctgggcaccaacctgaacccagagttcatctccgtctgcaacaacgccacctgggccattggtgaaatctgcatgcagatgggggcagagatgcagccttatgtgcagatggtcctcaacaacctggtggaaatcattaaccgacccaacacacccaagacactgctggaaaacacagccatcaccatcggccgcttgggctacgtgtgcccccaggaggtggcacccatgctgcagcagttcatccggccttggtgcacgtccctcaggaacatcagggacaacgaggagaaggactcagccttccgcggcatctgcatgatgatcggtgtcaacccggggggcgttgtgcaggactttattttcttctgcgatgctgtagcctcctgggtgagcccgaaggatgaccttcgggacatgttttataagattctccacggcttcaaagaccaagttggggaagataactggcagcagttctctgagcaattcccgccgctgctcaaggagaggctggcggctttctatggggtctaggtgatcatggagactgccaggtttctgtctgcgtcgtcgtcggagggattactggggagtgcgctgcatccggaagtcgctgtgccctggttgaggggggttagggaggagtgagtgggactcaaatccagatgccttccccgtccgtccgtccgtccgtccatccgtccacttgccctcctggcaggtgggtggggccaccatgctcatcctacaaacggggaggtgggggggacttctggtgggcaagggcccctgggctctaatagggtcatctctggcagcccacttgggccagctacgtgggagggaggaattacacagctgaccgaatccggcttcggatgaggtgagggaggagcaggtcaggaggggggccctcgtagggacgcgtacactcacacggacacacatggccacacgcatgtgcgggtgccataaccggcgaggctgggccagccgctccaccatttccccgactgcatggagacagtagaattagtgaacccctgagttaacccgtaaggccttccgtgtaacctgcatctagagtttaagaagcttctgctgttttgccggaattggcggtgactggggagggctgggtgggtggggggcctcaggcgggatctcggggcggggggaggaggatggtgaccttgggagtcgccctgtcagcacgcacatgcttgggacccactccacacactccctgccagctttgttgcagcctcagctggtggtgtctccgtccttatcctagcctagctcgcagggtgagaaccactggagtggctggggctggccagaggtcaccgtttctccttcctgtgtgctccagtggcttttgaagacactgggttgggacctttttcctgaagagagctgggtgtagccagagctactggcacctaccccgagcatctctctctgtaagcagcttcaggggcagtccgtttctctgtgcttctgaaacccccttctcacgtttcaggccccagttttaactcaaggcctggggcaggggcgtttaattgatgatgacagaggacacaggtttttgccagcaaaaaggaaaaccaaggcttggtggaagggaaaggtggtgtgtcccctgttccctattccatctccctgggacttcctgctcatcatagtacccagtgagcccagagatcctactagactgggtcagcaattctagagaaccttccggaatagtctgggaacatggtcaaggtggaaggggctcccctagagagggtgggggtgtagttacttcccagttggccagaaaactgggccttgcagacccccttagcattttttccctttttttccttccctgctttctacttctttggggagccccttgtgttttggagtctgactggagtctcgcatcctggggcctgctccatccatccctcctgggcgccagaccctccatccaagccctgtgtctttccatagtcagggtcaggccctgcatctattccaaggggcactcagtacacattccataaattagctgggtgtccctgcacgcccaccccatgaaactcgagcaggtctctggaagccatttgttaaaaaaaaaaaaaaaagttttaaaaataccttttaattttctggtaattccagttctttgaagcatcctctgctgggtcttggggtgtgtggatggattggctgtctgatgggattggtaacccctcgctactcaagatggggggatacaaacaccttcagggaaggggagcctggttcttctcgttttcctttttttttttttttttaaaaaaaaactatttaattttttaatttatttttggttgttttttgcacaatgaagtttcagcttctcaaccttctcccctacccagggctgtggacccagactggccttgagccacagtccctctttccctcctcaccctcttccccctgcgggctcccgggtctgtccatttgttactgtgctgtgctggggattggcgccgaggtggcgtgagattccacttgtgtagaactttgttgagtaaagatcagtttcttgtgaactccttagtctgtggcttcctgtgtccttggctttggtagtgaagaaatgt

SEQ ID NO: 338922 - DNA, 3140 bp, Homo sapiens
caggtcggttaatgatttccaccaggttgttgaggaccatctgcacataaggctgcatctctgcccccatctggagtgtctgtcatcggtggccaccgccctgcagagtggcttcctgccttactgtgagcccgtctaccagcgctgtgtcaccctggtgcagaagacactggctcaggccatggtgagcaaccctaggcccgtcacctgtgcttctgcattggcctgcctcgggcctgctccacttacccgtgcccctgtcggcatctgtgtctagatgtacacccagcaccctgagcagtatgaggctcccgacaaggacttcatgatcgtagcactggatctgctcagcggcctggccgagggcctgggtggtcacgtggagcagctggtggcccgcagcaacatcatgacattgctgttccagtgcatgcaggactcgatgcctgaggtccggcagagctcctttgccctcctgggagacctcaccaaagcctgcttcatccatgtcaagccctgtatcgccgagttcatgcccattctgggcaccaacctgaacccagagttcatctccgtctgcaacaacgccacctgggccattggtgaaatctgcatgcagatgggggcagagatgcagccttatgtgcagatggtcctcaacaacctggtggaaatcattaaccgacccaacacacccaagacactgctggaaaacacagccatcaccatcggccgcttgggctacgtgtgcccccaggaggtggcacccatgctgcagcagttcatccggccttggtgcacgtccctcaggaacatcagggacaacgaggagaaggactcagccttccgcggcatctgcatgatgatcggtgtcaacccggggggcgttgtgcaggactttattttcttctgcgatgctgtagcctcctgggtgagcccgaaggatgaccttcgggacatgttttataagattctccacggcttcaaagaccaagttggggaagataactggcagcagttctctgagcaattcccgccgctgctcaaggagaggctggcggctttctatggggtctaggtgatcatggagactgccaggtttctgtctgcgtcgtcgtcggagggattactggggagtgcgctgcatccggaagtcgctgtgccctggttgaggggggttagggaggagtgagtgggactcaaatccagatgccttccccgtccgtccgtccgtccgtccatccgtccacttgccctcctggcaggtgggtggggccaccatgctcatcctacaaacggggaggtgggggggacttctggtgggcaagggcccctgggctctaatagggtcatctctggcagcccacttgggccagctacgtgggagggaggaattacacagctgaccgaatccggcttcggatgaggtgagggaggagcaggtcaggaggggggccctcgtagggacgcgtacactcacacggacacacatggccacacgcatgtgcgggtgccataaccggcgaggctgggccagccgctccaccatttccccgactgcatggagacagtagaattagtgaacccctgagttaacccgtaaggccttccgtgtaacctgcatctagagtttaagaagcttctgctgttttgccggaattggcggtgactggggagggctgggtgggtggggggcctcaggcgggatctcggggcggggggaggaggatggtgaccttgggagtcgccctgtcagcacgcacatgcttgggacccactccacacactccctgccagctttgttgcagcctcagctggtggtgtctccgtccttatcctagcctagctcgcagggtgagaaccactggagtggctggggctggccagaggtcaccgtttctccttcctgtgtgctccagtggcttttgaagacactgggttgggacctttttcctgaagagagctgggtgtagccagagctactggcacctaccccgagcatctctctctgtaagcagcttcaggggcagtccgtttctctgtgcttctgaaacccccttctcacgtttcaggccccagttttaactcaaggcctggggcaggggcgtttaattgatgatgacagaggacacaggtttttgccagcaaaaaggaaaaccaaggcttggtggaagggaaaggtggtgtgtcccctgttccctattccatctccctgggacttcctgctcatcatagtacccagtgagcccagagatcctactagactgggtcagcaattctagagaaccttccggaatagtctgggaacatggtcaaggtggaaggggctcccctagagagggtgggggtgtagttacttcccagttggccagaaaactgggccttgcagacccccttagcattttttccctttttttccttccctgctttctacttctttggggagccccttgtgttttggagtctgactggagtctcgcatcctggggcctgctccatccatccctcctgggcgccagaccctccatccaagccctgtgtctttccatagtcagggtcaggccctgcatctattccaaggggcactcagtacacattccataaattagctgggtgtccctgcacgcccaccccatgaaactcgagcaggtctctggaagccatttgttaaaaaaaaaaaaaaaagttttaaaaataccttttaattttctggtaattccagttctttgaagcatcctctgctgggtcttggggtgtgtggatggattggctgtctgatgggattggtaacccctcgctactcaagatggggggatacaaacaccttcagggaaggggagcctggttcttctcgttttcctttttttttttttttttaaaaaaaaactatttaattttttaatttatttttggttgttttttgcacaatgaagtttcagcttctcaaccttctcccctacccagggctgtggacccagactggccttgagccacagtccctctttccctcctcaccctcttccccctgcgggctcccgggtctgtccatttgttactgtgctgtgctggggattggcgccgaggtggcgtgagattccacttgtgtagaactttgttgagtaaagatcagtttcttgtga

SEQ ID NO: 338923 - DNA, 3152 bp, Homo sapiens
caatccgctcgcctggtggtaagcttagccgcgctcggtgaggatcctcatgaggtagtcagtcaggtcccgccagccaggtccagacgcaggatgcatggggaggcatacccctcgtagatggcacagtgtggtgacccgtcaccggagtccatcacgatgccagtggtacggcagaggcgtacagggatagacttgcacatccgtggatttttatatctgcagggacctggaaagaatcccccacggacactgagggatgaccgttggggcactgccatctcccatttgcagatgtgggctggaggctagggaggttaaggaacagctaggagctctagaactggaaagtggcagaggctggacatgcaccagggactgtgccccctgagctgtcctggttagaaggaggggagcctagccacactgatcttacttgaatccccaggactcgatgcctgaggtccggcagagctcctttgccctcctgggagacctcaccaaagcctgcttcatccatgtcaagccctgtatcgccgagttcatgcccattctgggcaccaacctgaacccagagttcatctccgtctgcaacaacgccacctgggccattggtgaaatctgcatgcagatgggggcagagatgcagccttatgtgcagatggtcctcaacaacctggtggaaatcattaaccgacccaacacacccaagacactgctggaaaacacagccatcaccatcggccgcttgggctacgtgtgcccccaggaggtggcacccatgctgcagcagttcatccggccttggtgcacgtccctcaggaacatcagggacaacgaggagaaggactcagccttccgcggcatctgcatgatgatcggtgtcaacccggggggcgttgtgcaggactttattttcttctgcgatgctgtagcctcctgggtgagcccgaaggatgaccttcgggacatgttttataagattctccacggcttcaaagaccaagttggggaagataactggcagcagttctctgagcaattcccgccgctgctcaaggagaggctggcggctttctatggggtctaggtgatcatggagactgccaggtttctgtctgcgtcgtcgtcggagggattactggggagtgcgctgcatccggaagtcgctgtgccctggttgaggggggttagggaggagtgagtgggactcaaatccagatgccttccccgtccgtccgtccgtccgtccatccgtccacttgccctcctggcaggtgggtggggccaccatgctcatcctacaaacggggaggtgggggggacttctggtgggcaagggcccctgggctctaatagggtcatctctggcagcccacttgggccagctacgtgggagggaggaattacacagctgaccgaatccggcttcggatgaggtgagggaggagcaggtcaggaggggggccctcgtagggacgcgtacactcacacggacacacatggccacacgcatgtgcgggtgccataaccggcgaggctgggccagccgctccaccatttccccgactgcatggagacagtagaattagtgaacccctgagttaacccgtaaggccttccgtgtaacctgcatctagagtttaagaagcttctgctgttttgccggaattggcggtgactggggagggctgggtgggtggggggcctcaggcgggatctcggggcggggggaggaggatggtgaccttgggagtcgccctgtcagcacgcacatgcttgggacccactccacacactccctgccagctttgttgcagcctcagctggtggtgtctccgtccttatcctagcctagctcgcagggtgagaaccactggagtggctggggctggccagaggtcaccgtttctccttcctgtgtgctccagtggcttttgaagacactgggttgggacctttttcctgaagagagctgggtgtagccagagctactggcacctaccccgagcatctctctctgtaagcagcttcaggggcagtccgtttctctgtgcttctgaaacccccttctcacgtttcaggccccagttttaactcaaggcctggggcaggggcgtttaattgatgatgacagaggacacaggtttttgccagcaaaaaggaaaaccaaggcttggtggaagggaaaggtggtgtgtcccctgttccctattccatctccctgggacttcctgctcatcatagtacccagtgagcccagagatcctactagactgggtcagcaattctagagaaccttccggaatagtctgggaacatggtcaaggtggaaggggctcccctagagagggtgggggtgtagttacttcccagttggccagaaaactgggccttgcagacccccttagcattttttccctttttttccttccctgctttctacttctttggggagccccttgtgttttggagtctgactggagtctcgcatcctggggcctgctccatccatccctcctgggcgccagaccctccatccaagccctgtgtctttccatagtcagggtcaggccctgcatctattccaaggggcactcagtacacattccataaattagctgggtgtccctgcacgcccaccccatgaaactcgagcaggtctctggaagccatttgttaaaaaaaaaaaaaaaagttttaaaaataccttttaattttctggtaattccagttctttgaagcatcctctgctgggtcttggggtgtgtggatggattggctgtctgatgggattggtaacccctcgctactcaagatggggggatacaaacaccttcagggaaggggagcctggttcttctcgttttcctttttttttttttttttaaaaaaaaactatttaattttttaatttatttttggttgttttttgcacaatgaagtttcagcttctcaaccttctcccctacccagggctgtggacccagactggccttgagccacagtccctctttccctcctcaccctcttccccctgcgggctcccgggtctgtccatttgttactgtgctgtgctggggattggcgccgaggtggcgtgagattccacttgtgtagaactttgttgagtaaagatcagtttcttgtga

SEQ ID NO: 338924 - DNA, 4802 bp, Homo sapiens
cgtgagtcgtcatgattgatcttagtcaaaccctctctttggctccctccttccgcgcgagtctctggagaagccgcagcgcgagttgccgccgctgctgcccggggccggcttgccttgcgccatggactggcagccagacgagcagggcctgcagcaggtcctgcagctgctcaaagactcacagtcgcccaacacagccactcagcgcatcgtgcaggataaactcaaacaactcaatcagtttcctgacttcaacaactacctgattttcgtcctgaccagactcaagtcagaagatgagccaacgcgctctctcagtggcctcatcctcaagaacaacgtgaaggcacactatcagagcttcccaccccctgtggcagacttcatcaaacaggagtgtctcaacaacattggcgatgcctcctcgctcatccgagccaccattggcattctcatcaccaccatcgcttccaagggtgagctgcagatgtggcccgagctgctgccccagctctgcaacctgcttaactcggaggattacaacacttgtgagggagcctttggagccctgcagaagatctgtgaagactcatcagagcttctggacagtgacgccctcaacaggcccctcaacatcatgatccccaagttcctgcagttcttcaagcactgcagtcccaagatccggtcccacgccatcgcctgcgtgaaccagttcatcatggaccgggcccaggcgctgatggacaatattgacaccttcatcgagcacctatttgccctggctgtggatgatgaccccgaggtgcggaagaatgtgtgccgtgccctggtgatgcttctggaagtgcggattgacaggctcatcccccacatgcacagcatcatccagtacatgctgcagaggacccaggaccatgatgagaacgttgcccttgaggcctgtgagttctggctgacgctggccgagcagcccatctgcaaggaagtcctggcctcccatctggtccagttgatccccatcttggtgaatgggatgaagtactcggaaattgacatcatcctgctcaagggggatgtggaggaggatgaggctgtccccgacagtgagcaggacatcaagccacgcttccacaagtcacgcacggtcacactgccccacgaggctgagcggcctgatggctccgaggacgcggaggatgacgatgatgatgatgctctgtccgactggaatttgaggaagtgctcagcggctgcactggacgtcctcgccaatgtcttccgggaggaactgctgccccacctactcccactactcaaaggcctcctcttccaccccgagtgggtggtcaaggagtcgggcatcctggtgctgggcgccattgctgagggctgcatgcagggcatggtgccctacctgcctgagctgatcccgcacctgatccagtgcctgtcggataagaaggccttggtccgctccatcgcctgctggacgctgagccgctatgcccactgggtggtcagccagccacccgacatgcacctcaagcccctgatgacagagctgctcaaacgcatcctggatggcaacaagagggtacaggaggcggcctgcagtgcttttgccaccctggaggaagaggcctgcacggagctggtgccctacctcagctacatcctggacacccttgtctttgcctttgggaaataccagcacaagaacctgctcatcctctatgacgccattggcaccctggccgactctgtaggccaccacctcaaccagccggaatacatccagaagctgatgcccccactgatccagaagtggaatgagctcaaggacgaagacaaggacctcttccccctgctggagtgtctgtcatcggtggccaccgccctgcagagtggcttcctgccttactgtgagcccgtctaccagcgctgtgtcaccctggtgcagaagacactggctcaggccatgatgtacacccagcaccctgagcagtatgaggctcccgacaaggacttcatgatcgtagcactggatctgctcagcggcctggccgagggcctgggtggtcacgtggagcagctggtggcccgcagcaacatcatgacattgctgttccagtgcatgcaggactcgatgcctgaggtccggcagagctcctttgccctcctgggagacctcaccaaagcctgcttcatccatgtcaagccctgtatcgccgagttcatgcccattctgggcaccaacctgaacccagagttcatctccgtctgcaacaacgccacctgggccattggtgaaatctgcatgcagatgggggcagagatgcagccttatgtgcagatggtcctcaacaacctggtggaaatcattaaccgacccaacacacccaagacactgctggaaaacacagccatcaccatcggccgcttgggctacgtgtgcccccaggaggtggcacccatgctgcagcagttcatccggccttggtgcacgtccctcaggaacatcagggacaacgaggagaaggactcagccttccgcggcatctgcatgatgatcggtgtcaacccggggggcgttgtgcaggactttattttcttctgcgatgctgtagcctcctgggtgagcccgaaggatgaccttcgggacatgttttataagattctccacggcttcaaagaccaagttggggaagataactggcagcagttctctgagcaattcccgccgctgctcaaggagaggctggcggctttctatggggtctaggtgatcatggagactgccaggtttctgtctgcgtcgtcgtcggagggattactggggagtgcgctgcatccggaagtcgctgtgccctggttgaggggggttagggaggagtgagtgggactcaaatccagatgccttccccgtccgtccgtccgtccgtccatccgtccacttgccctcctggcaggtgggtggggccaccatgctcatcctacaaacggggaggtgggggggacttctggtgggcaagggcccctgggctctaatagggtcatctctggcagcccacttgggccagctacgtgggagggaggaattacacagctgaccgaatccggcttcggatgaggtgagggaggagcaggtcaggaggggggccctcgtagggacgcgtacactcacacggacacacatggccacacgcatgtgcgggtgccataaccggcgaggctgggccagccgctccaccatttccccgactgcatggagacagtagaattagtgaacccctgagttaacccgtaaggccttccgtgtaacctgcatctagagtttaagaagcttctgctgttttgccggaattggcggtgactggggagggctgggtgggtggggggcctcaggcgggatctcggggcggggggaggaggatggtgaccttgggagtcgccctgtcagcacgcacatgcttgggacccactccacacactccctgccagctttgttgcagcctcagctggtggtgtctccgtccttatcctagcctagctcgcagggtgagaaccactggagtggctggggctggccagaggtcaccgtttctccttcctgtgtgctccagtggcttttgaagacactgggttgggacctttttcctgaagagagctgggtgtagccagagctactggcacctaccccgagcatctctctctgtaagcagcttcaggggcagtccgtttctctgtgcttctgaaacccccttctcacgtttcaggccccagttttaactcaaggcctggggcaggggcgtttaattgatgatgacagaggacacaggtttttgccagcaaaaaggaaaacatctccctgggacttcctgctcatcatagtacccagtgagcccagagatcctactagactgggtcagcaattctagagaaccttccggaatagtctgggaacatggtcaaggtggaaggggctcccctagagagggtgggggtgtagttacttcccagttggccagaaaactgggccttgcagacccccttagcattttttccctttttttccttccctgctttctacttctttggggagccccttgtgttttggagtctgactggagtctcgcatcctggggcctgctccatccatccctcctgggcgccagaccctccatccaagccctgtgtctttccatagtcagggtcaggccctgcatctattccaaggggcactcagtacacattccataaattagctgggtgtccctgcacgcccaccccatgaaactcgagcaggtctctggaagccatttgttaaaaaaaaaaaaaaaagttttaaaaataccttttaattttctggtaattccagttctttgaagcatcctctgctgggtcttggggtgtgtggatggattggctgtctgatgggattggtaacccctcgctactcaagatggggggatacaaacaccttcagggaaggggagcctggttcttctcgttttcctttttttttttttttttaaaaaaaaactatttaattttttaatttatttttggttgttttttgcacaatgaagtttcagcttctcaaccttctcccctacccagggctgtggacccagactggccttgagccacagtccctctttccctcctcaccctcttccccctgcgggctcccgggtctgtccatttgttactgtgctgtgctggggattggcgccgaggtggcgtgagattccacttgtgtagaactttgttgagtaaagatcagtttcttgtga

SEQ ID NO: 338925 - DNA, 3201 bp, Homo sapiens
cgtgagtcgtcatgattgatcttagtcaaaccctctctttggctccctccttccgcgcgagtctctggagaagccgcagcgcgagttgccgccgctgctgcccggggccggcttgccttgcgccatggactggcagccagacgagcagggcctgcagcaggtcctgcagctgctcaaagactcacagtcgcccaacacagccactcagcgcatcgtgcaggataaactcaaacaactcaatcagtttcctgacttcaacaactacctgattttcgtcctgaccagactcaagtcagaagatgagccaacgcgctctctcagtggcctcatcctcaagaacaacgtgaaggcacactatcagagcttcccaccccctgtggcagacttcatcaaacaggagtgtctcaacaacattggcgatgcctcctcgctcatccgagccaccattggcattctcatcaccaccatcgcttccaagggtgagctgcagatgtggcccgagctgctgccccagctctgcaacctgcttaactcggaggattacaacacttgtgagggagcctttggagccctgcagaagatctgtgaagactcatcagagcttctggacagtgacgccctcaacaggcccctcaacatcatgatccccaagttcctgcagttcttcaagcactgcagtcccaagatccggtcccacgccatcgcctgcgtgaaccagttcatcatggaccgggcccaggcgctgatggacaatattgacaccttcatcgagcacctatttgccctggctgtggatgatgaccccgaggtgcggaagaatgtgtgccgtgccctggtgatgcttctggaagtgcggattgacaggctcatcccccacatgcacagcatcatccagtacatgctgcagaggacccaggaccatgatgagaacgttgcccttgaggcctgtgagttctggctgacgctggccgagcagcccatctgcaaggaagtcctggcctcccatctggtccagttgatccccatcttggtgaatgggatgaagtactcggaaattgacatcatcctgctcaagggggatgtggaggaggatgaggctgtccccgacagtgagcaggacatcaagccacgcttccacaagtcacgcacggtcacactgccccacgaggctgagcggcctgatggctccgaggacgcggaggatgacgatgatgatgatgctctgtccgactggaatttgaggaagtgctcagcggctgcactggacgtcctcgccaatgtcttccgggaggaactgctgccccacctactcccactactcaaaggcctcctcttccaccccgagtgggtggtcaaggagtcgggcatcctggtgctgggcgccattgctgagggctgcatgcagggcatggtgccctacctgcctgagctgatcccgcacctgatccagtgcctgtcggataagaaggccttggtccgctccatcgcctgctggacgctgagccgctatgcccactgggtggtcagccagccacccgacatgcacctcaagcccctgatgacagagctgctcaaacgcatcctggatggcaacaagagggtacaggaggcggcctgcagtgcttttgccaccctggaggaagaggcctgcacggagctggtgccctacctcagctacatcctggacacccttgtctttgcctttgggaaataccagcacaagaacctgctcatcctctatgacgccattggcaccctggccgactctgtaggccaccacctcaaccagccggaatacatccagaagctgatgcccccactgatccagaagtggaatgagctcaaggacgaagacaaggacctcttccccctgctggagtgtctgtcatcggtggccaccgccctgcagagtggcttcctgccttactgtgagcccgtctaccagcgctgtgtcaccctggtgcagaagacactggctcaggccatgatgtacacccagcaccctgagcagtatgaggctcccgacaaggacttcatgatcgtagcactggatctgctcagcggcctggccgagggcctgggtggtcacgtggagcagctggtggcccgcagcaacatcatgacattgctgttccagtgcatgcaggactcgatgcctgaggtccggcagagctcctttgccctcctgggagacctcaccaaagcctgcttcatccatgtcaagccctgtatcgccgagttcatgcccattctgggcaccaacctgaacccagagttcatctccgtctgcaacaacgccacctgggccattggtgaaatctgcatgcagatgggggcagagatgcagccttatgtgcagatggtcctcaacaacctggtggaaatcattaaccgacccaacacacccaagacactgctggaaaacacagccatcaccatcggccgcttgggctacgtgtgcccccaggaggtggcacccatgctgcagcagttcatccggccttggtgcacgtccctcaggaacatcagggacaacgaggagaaggactcagccttccgcggcatctgcatgatgatcggtgtcaacccggggggcgttgtgcaggactttattttcttctgcgatgctgtagcctcctgggtgagcccgaaggatgaccttcgggacatgttttataagattctccacggcttcaaagaccaagttggggaagataactggcagcagttctctgagcaattcccgccgctgctcaaggagaggctggcggctttctatggggtctaggtgatcatggagactgccaggtttctgtctgcgtcgtcgtcggagggattactggggagtgcgctgcatccggaagtcgctgtgccctggttgaggggggttagggaggagtgagtgggactcaaatccagatgccttccccgtccgtccgtccgtccgtccatccgtccacttgccctcctggcaggtgggtggggccaccatgctcatcctacaaacggggaggtgggggggacttctggtgggcaagggcccctgggctctaatagggtcatctctggcagcccacttgggccagctacgtgggagggaggaattacacagctgaccgaatccggcttcggatgaggtgagggaggaggaatgtgacctttagagtggccctgttattactcccatgctttggaccagat

SEQ ID NO: 338926 - DNA, 1423 bp, Homo sapiens
aggtggcggctttctgcacgtgtttctcagcccaggtttcagtccagcggaactggctacctcggaatcccaactgctcctttagggtgtcttccgcgattctccgagtggagttaggcgcctgccgacacttccctaaccttggaggcccgggacttgattttcatgaatgaacggagccgggactgactttgcctacggcaaagaaggaaaaacggtgccctactgtcttcagacgtcgcaaggatcaagaagatttctttcttcatgaccctgcccttgccagaatttcctgcgctgttccacctcattcaacttcagcttgccttgcgccatggactggcagccagacgagcagggcctgcagcaggtcctgcagctgctcaaagactcacagtcgcccaacacagccactcagcgcatcgtgcaggataaactcaaacaactcaatcagtttcctgacttcaacaactacctgattttcgtcctgaccagactcaagtcagaaggtacgccctctgctcccttccatgcgatcgggaccctgctttctccccctgggcccctgaacctcagccttcctcctcccagatgagccaacgcgctctctcagtggcctcatcctcaagaacaacgtgaaggcacactatcagagcttcccaccccctgtggcagacttcatcaaacaggagtgtctcaacaacattggcgatgcctcctcgctcatccgagccaccattggtgagaggggcagcgggggttggcctctgaggacacactgaactctcacttctcagcatgttaagtgtagtgcttcatggaatgctctggcaccctctatggtagtactattactattgccatttgatagatgaggaagctgaggcgctgagctattaagggacctgtctgggtaagcagcagaagtcagaaacagctgaggcagtgcagggccacgctctggaaccactccctcctgaaacagtccttcttggctctgagacagtcatgcaacatctagaattttgtgttcggccttgggctgagtgctaagggtatagcagttaaaataatgcaggtattcatgtttcaggtgcaacggaattaggttttcagcagagccttttctgactcttggaaggtggcctgaggaagttacagaaagatgactaagaataggctcacgcctgtaatcccagcaactttgggaggtcagggtaggcaaatcaccagaggttgagttcaataccagcctggccaacatggtgaaaccccgtctctacttaaaatacaaaaaacttagctggccaggcatggtggctcacacctgtaatcccagcattttgggaggctgaggtgggcggatcacaaggtcaggaaatcaagaccatcctggccaatgtggtgaaaccccatctctact

SEQ ID NO: 338927 - DNA, 175 bp, Homo sapiens
agccatggatggccagagcgagtactggggggctgggaccaccacccaccacccacgtttgtctctctgcccctctgcactcagggagcctttggagccctgcagaagatctgtgaagactcatcagagcttctggacagtgacgccctcaacaggcccctcaacatcatgatcc

SEQ ID NO: 338928 - DNA, 703 bp, Homo sapiens
gagaagagtcatgggaccatatagggtaaggtgggggcccctctgtgacaccctcataaaccggagctctgcacagtgatgtggacaaaagggaaagttggagagctttgtggagacacacagcagggattggttctggctcatctctctgaattgcgtctttgaaatggactagtgcacaccctgaagggctgttagggttaagtgaaatgacgctggtgctcaataaaccatagcagttgtacttgttttcattgacccctcctctgcctcactccagccttctcactccagctttgcagcttatttcctgttgtctcttgcagctgtcctttcatttcccttcccaacccttttttacatagaacctaggccacagcagtagccttgtagctttttcttggtgtttccactctaaaccacacatgattttcccttaattttcaactcggctctggtgtttcaaaaccttcaagtttccagtgcacacccaattaagtccaatctattctgggacagctatcaacaccctctgagtgtgctcccagcctttcactctctctaatcttaactttcattatttgcctctgaaacccacattccagtcggcaggctagtctgctggccggttccattacgaatccacactttggatgctctttcctgggtttggaatgccttcaaaaatccatctttcaaaatc

SEQ ID NO: 338929 - DNA, 2252 bp, Homo sapiens
gtgttcctgttccccgtccaattccttcttaggctgctagagacagccagtgggccaagccttcccctgtgctccaggcaggcctgggctgcagctactgttacctttttacagcctttgatctgatcgctgcagagttcttttgtttttaaatcacttgtatttgtctcttcattaaggcttcaagtttatttcttgaaaaagtttagtcaattgaaccaccctccaggaagattcccagcgtggaaactgcccctgaaaaacaaggcagcccaaagccagctctcttttgtcccccactgatgtcatgtcctttttttttttcatttcaggccagtttcttaacttggggcaaagagaatgtgttgctaaagctaccaagaaaactgcttgattaacaaattcttaatagaaatgcctcccacactgtctctttgaaaagagaaggcaccttggaatcggcattccaaaaccaagctccttgtcatcctcatccctcctccttcttgcttcctattatcaaactcgtgtgtgtttcttgttttctcagaactgaacacagcctcctaattccatcctcttgactagggcttacaatactgagagcgattacaggctgtaataagttaaaggtccctgagcgtggctttcttgttctgcgcctctaattaattcttctattaaaagatgctttccttctcactgcagcttacagaaaggctacaagctttaatcacagatcatttcatttgccagagcctttccttttctaactcctttagaaataagatttccctctctgtttggaatctctggatacaggactctcctccaagctcatggcttgattggctttgcctgtgcacacacacatcagtttgccttaaacttggagctatggggagtcccagattttccagcttagtgggtgaagtttagctgtcacctacatccaggaagtgggggaaaagggaaaaaaagaggatattcaccaccatgttcccatccggtctttcccctgccttgctttgtgcagcaggtgggcagacagagcccacagaaacagaagtagaaagagggccgcaccatctctggggccagcactcctaagtcttagctctttgtgggaatagaaaatcctgagctcccaccacctctcgtctgaccctccatcaactccctcgaacctgtgcaaatggactgagcaaaagaaaatggaaagagatgtttgtcaccacacaggagacctcctttctggccccaagcacaactccatctctgcgtatgctcagaaactcagaatttagctgctacttatgtgttagctccattctctctggtgtgtgactgagagaacacgccagtgttcttactgacagaggcttaggggtgaccctctctggacccagaggaagtacaacctctgtagcgagaattgtccttgggaacagaaacaggcattcctccacagtgagtggctccccctattttttttttatttggaagagaccaagaattgggggaattgatttccagtcttagctgtttcccggaatgtcatctgtgcaggcaggtaggcggctgccgggtgcagcaggcagcgtgactgatgtgaaggccgcccaatcctcacgtgctaagacccgagtatcgtgtttaattgcagtgtaggcacgtcgccattcaaactcagttctggggtggttttgcataaagttttgccaacgtgttcttttttctgtatgtattattgcctttttataaaaggtgttgaagtattgtctcagtgataaaaagagagagatgttaatggttgttgtatatttcaccgtatccaattgtaagtatttgcagggtacagcagagccttagcttgcaagagcgtttgtgcaggaggtgtccctcaacacccaggagctgaagggattggaaaggtttggattctttgtaaatgtcctgcttttctttctctctgtgtgtatctatttacatgccttagcacacgccctcccatcctgatccctttgccctgtcgccggaacaaccagaatgctggtgcgctgccggcacagtacaagttgatgaaaccctaatcagttatcttgtgtgacaggggaagaagagaaactccatagtattccttgtagaatatacatacctgtaggatgctgtgtaatgggaaaccatagaattgggcttttgtcatttcaaagttggagaaatgtatgaataaaatgtataaaacatgaaaa

SEQ ID NO: 338930 - DNA, 2572 bp, Homo sapiens
gtgttcctgttccccgtccaattccttcttaggctgctagagacagccagtgggccaagccttcccctgtgctccaggcaggcctgggctgcagctactgttacctttttacagcctttgatctgatcgctgcagagttcttttgtttttaaatcacttgtatttgtctcttcattaaggcttcaagtttatttcttgaaaaagtttagtcaattgaaccaccctccaggaagattcccagcgtggaaactgcccctgaaaaacaaggcagcccaaagccagctctcttttgtcccccactgatgtcatgtcctttttttttttcatttcaggccagtttcttaacttggggcaaagagaatgtgttgctaaagctaccaagaaaactgcttgattaacaaattcttaatagaaatgcctcccacactgtctctttgaaaagagaaggcaccttggaatcggcattccaaaaccaagctccttgtcatcctcatccctcctccttcttgcttcctattatcaaactcgtgtgtgtttcttgttttctcagaactgaacacagcctcctaattccatcctcttgactagggcttacaatactgagagcgattacaggctgtaataagttaaaggtccctgagcgtggctttcttgttctgcgcctctaattaattcttctattaaaagatgctttccttctcactgcagcttacagaaaggctacaagctttaatcacagatcatttcatttgccagagcctttccttttctaactcctttagaaataagatttccctctctgtttggaatctctggatacaggactctcctccaagctcatggcttgattggctttgcctgtgcacacacacatcagtttgccttaaacttggagctatggggagtcccagattttccagcttagtgggtgaagtttagctgtcacctacatccaggaagtgggggaaaagggaaaaaaagaggatattcaccaccatgttcccatccggtctttcccctgccttgctttgtgcagcaggtgggcagacagagcccacagaaacagaagtagaaagagggccgcaccatctctggggccagcactcctaagtcttagctctttgtgggaatagaaaatcctgagctcccaccacctctcgtctgaccctccatcaactccctcgaacctgtgcaaatggactgagcaaaagaaaatggaaagagatgtttgtcaccacacaggagacctcctttctggccccaagcacaactccatctctgcgtatgctcagaaactcagaatttagctgctacttatgtgttagctccattctctctggtgtgtgactgagagaacacgccagtgttcttactgacagaggcttaggggtgaccctctctggacccagaggaagtacaacctctgtagcgagaattgtccttgggaacagaaacaggcattcctccacagtgagtggctccccctattttttttttatttggaagagaccaagaattgggggaattgatttccagtcttagctgtttcccggaatgtcatctgtgcaggcaggtaggcggctgccgggtgcagcaggcagcgtgactgatgtgaaggccgcccaatcctcacgtgctaagacccgagtatcgtgtttaattgcagtgtaggcacgtcgccattcaaactcagttctggggtggttttgcataaagttttgccaacgtgttcttttttctgtatgtattattgcctttttataaaaggtgttgaagtattgtctcagtgataaaaagagagagatgttaatggttgttgtatatttcaccgtatccaattgtaagtatttgcagggtacagcagagccttagcttgcaagagcgtttgtgcaggaggtgtccctcaacacccaggagctgaagggattggaaaggtttggattctttgtaaatgtcctgcttttctttctctctgtgtgtatctatttacatgccttagcacacgccctcccatcctgatccctttgccctgtcgccggaacaaccagaatgctggtgcgctgccggcacagtacaagttgatgaaaccctaatcagttatcttgtgtgacaggggaagaagagaaactccatagtattccttgtagaatatacatacctgtaggatgctgtgtaatgggaaaccatagaattgggcttttgtcatttcaaagttggagaaatgtatgaataaaatgtataaaacatgaaaaaaaaaaaaaaaaaaaaaaaaaaaaaaaaggggggggggggaaagagaccccctcgggggccccagattgaccgggaacacacaactttcgtatttacaacggggcgccccataaaggggggccgaaaataaagcacaagacggggggccgagattaaaaagggcgcgcggggggaaacagcgcccgcgtgcaccgtggggaggaaccaacctgggggggcggcctatgtggcacccccaacgagatatagtctggggaaacaaattcggctatagtgtacaaccgcatgctggggcgaaatgcacggaatcttgaaattg

SEQ ID NO: 338931 - DNA, 460 bp, Homo sapiens
tcttggcctttcccctgaggaggctggggggcttcctttattagccctgcctggctagggtagggggtcaggattatagaatttgcctcttttcctctccttcaggacttggcttggctgtggtatctttgggctgaggacttcctcgtcctcagggcaggccatggttccacctttatatccccaagatgtcctctcttttttttctttttttctttttttgagacagtcttgctctgtgcccaggctggggtgcagtagtgtgatcacagctcactgcagcctcgaactcctggactcaagccaccctcccaccccagcctcacaagtagctgggaccgcagacaagggccactacacctggttaattttttattgtttgtagagatggggtcttgctatgttgcccaggctggtttcgaactcctgggcatgaggagtcctcccaccttggcctctc

SEQ ID NO: 338932 - DNA, 203 bp, Homo sapiens
ttcttgtttatgtgtttagggaattaaccgcaagcctccatttcccatgagtaaatatcaggtggtaacacccaaggctgaagtaagggttaaactggtttatgcctgggaaagggcctgagtccaagcagagtggatgctcagtggaagtctccctccttcatctcctcctttccttcctcttttctatcctcagccacttg

SEQ ID NO: 338933 - DNA, 736 bp, Homo sapiens
acaaaaacaagttgaagataacaaagtgggagctttaaaaatgcagactgaagttgcagctgtacaaacaaatgaaaatgcccaggattcattcagttgcaagtgtgagaaagagatgacattggataaatagaaagaaatgtaatgattcacttgtctataagaagaagcctggacttggcctcagccgtgagcggctctgaggaacctcccacaaggtgagtgtattgaagtctgagtccacaccttgctttcggctcatgtccgctctctgtatctgtctttgctcagcttttgtgtgttggcctcactgacttcctcttttggaggagacaggatgaccagcagctctcatctccatgatttgcaatccagaaatattgattacttgcttgcttggcttgggtgctgtaccaaatgtaccaaatgctataccaaatcttgtaccaaatgctgcatctgtggtagatagcctccaaaactgagtactgacacttcaacgtccctttatatgtgaaagcttcttctcctatctgcagattaatctatttctcctctccttggatcttggccagtttagtgacttgcctataggaggtggtagatgtgatgttgtgtcagttacagaactagtcattaagagacctgggagctttcaattagttctcagatctgactgtcatgctgcagagaagcccaggtgattctacagaagagggaggcttatggctatatt

SEQ ID NO: 338934 - DNA, 518 bp, Homo sapiens
ctgaatctgtgacttggtctctgtttggcagcctgagattgtgactcaggctctctatggcaaacagaaacctaggctgttactggggtcacagtccccactatagtgaactggagctgtgactcaagctctgtatgtgaactgtgtctgactcaggccctgtatggtgaactgaggctgtgactcaggctctgtatgtgaactgggggtgtgatctggggtctgcttggtaacctgaggctgtggctggggtcacagtttctgctatggtgaacaggggatgtgactcaggctctgtatggtgaactggggctgtgactcaggatctgtatggcaaactgagctgtgactcaggctctgtatggtgaactggggctgtgactcagactctgtggtgaactgaggctgtgactcaggctctgtatagtgaactggggctgtgactcaggctctatgtggtgaactggggctgtgactcaggctgtctatagtgacctgagtctgtgactcaggctgtc

SEQ ID NO: 338935 - DNA, 203 bp, Homo sapiens
atccaaatgacttcattttaacctgtttacctctgtaaataacctatctccaatctcattttgaggtactggagtttaagactccaacatatggagttgtgttggaggggacacagctcaacccataacactcactcaactacttgttctgtctttttgaaagaaaacttctttttttattatttttttaattttaagacagc

SEQ ID NO: 338936 - DNA, 618 bp, Homo sapiens
gctttcccttggtccctacaaaactcacttccaaaatctccctcgaataccatcctccctcaatggtaattctttgccaattaccatcacctgaattcaggtccgcctattgcttggcctcccattgatctcctatccaaattgctacaaagatcatctttctagattctagagctggttgtgtcacaccttcatcagcacctcactgcctcactgcccagggatgtttattgcaagtacagattcccaaacccaaatccataaccagagaatgggaatttctagggcaagctgagaagtggtatatgtactttcaagtggctcggtaattggctccacctgcctccccaggcacatctcgagccagtcctctcctagtaccctgtggtccctttacagagaataccctgcccctgaacaaacagatccagatttggacatatcctttcccatctgcctggaattcccttttcctgtggcacaagtccaccattcttcaaggcccagctccaatgccacctcctctgggaagccttctcccgtcgcctaactcagtggctttcaaacatctttgcttgagactcaatcccaagaaacacatttcacattgtaattcag

SEQ ID NO: 338937 - DNA, 510 bp, Homo sapiens
gttttcccattacctttaaatgagagagtcagacaactaacctgccaagtctaataatagcatgataagtgttctgttaggggaagttttaagtgggaacacagaggaggtggtatgcagaaaggcttttgaataattaggaaaagccttcccagacctctaagctgaggtctgaagagtaagtaggagttagctcagtgaagaattgtaaatctgtgtttctggcagaagaatatagcttgtgcaaagtccttgagacaggagatagaagacgctgccatgggatgtgaaagaagttcatgtgaccatagtgcaagatgggaagtattagagttgtggcaaaagtatgcaggggctagatcttcaagacatgtgaattattattaagaaatttgggtttaatcctgaggactcccctcagttcttttaattggacattaacctgattagatttgaatgtttgaaagatcactctaattacaacatagtgattaggttaagaacaggatg

SEQ ID NO: 338938 - DNA, 475 bp, Homo sapiens
aaagcctgtcctaattatctccaactaattctaatcattctatcccatttaccctttttgtcatttctttatattatatataaatatatgatatatattttttcattttaattaatgtatttgaattcaacagatgatattaatgtcattgcttatttcactcatttttctaactttttttcactgatgagttttctgcactagcttataaacttaaaggcaagaaccatgctttcttctttctttacatgactccatggtcccagaacacccagtgagactggaaaagaatgaaatgatggctatatgtgtagtatgtagtttgattccatacgtgaagtagacacccagaaaagatttgtagttaatgaatttatctttgacctctgaagaaactatgatatgataatagatgtcctcagctattttttgttaccttggtatgattaactgccaacattctttaatccacaca

SEQ ID NO: 338939 - DNA, 258 bp, Homo sapiens
acctatggaaagctgacaagaaccaactcaatcctgaaggaggaaataagtttcccaataaaagaacctaatgaagacagatccactcaagaaaaaaggagatgatggttgaagttacagggatgatgctgtcactggcctagcagtcatcacttcatagagagcttatgcaaacaacagcttcctcattgtccttcagaagaatgggccgttcccttccctccactcaaacttcctgtgctgccaagccacattcat

SEQ ID NO: 338940 - DNA, 331 bp, Homo sapiens
gcggagcttgtaatgagccgggatggtgccgctgcactccagcctgggcaacagaatgcgactccatctccaaaaaaaaaaaaaaaattgcctttcctgtatagttactcatttatttctctctgttttctcttttaaaataaccaaatttctctgctataaataggatgggatcaactcatgtagtaaatgggaggtttttgaggaaaaaaaatgcaagactttaaaaatcattgataagtttattaaagcctttctcagcgattacctaaaataagaacttttgaaaaatactgttaatacagctttttttttttttttttgggagaca

SEQ ID NO: 338941 - DNA, 340 bp, Homo sapiens
tgagggagtgagtgagtgaggaagagaggcaggcagggaccgggtgacacggcctggtccacggtgaggagcacaaggctactctgcatctatactccgggaggggagacacaggagggctcagaatgggggtggtgtagaccaaggtacactctgaacagatcctctggcagctgtgtggggagcagatgaatgaagggtgcaagtggaggcagggaaaccagttaggaggctgtcacccagacaagagatgatgctagcttggccccaggtgacagaggggaggaggtaagaaatggttgagcaccctaccccgagcccagctcccacacagatgcac

SEQ ID NO: 338942 - DNA, 320 bp, Homo sapiens
cagcacctcccagaggaccccctgtccagggaggctgcttgaaaacattagcaccaggctagatccctgaataggcacagcttcagtgagcagggagtaggctaggcccagagcctcattctttgctcgattcaggagccttgggaggctggtggaggggtgaactgaggtgcctgctgtgtaaccagggctagggctgtctctcagggagttcatagcaggacactcctttgcttactgtcgaggtttgctctctggtgacttccaaattaggaatccaagctagcctggaaacccaggaatgcaggaggagaaaaagg

SEQ ID NO: 338943 - DNA, 408 bp, Homo sapiens
ctcaagaactcttcttctgtgttctgttctcatctctaactgccatgtctgcttacccctacaatcatgaacacaagggtagctcttattctggctactaacctcataaattagttttgcgtatatttggaattttataaaggaataatatagctgcttttgtccaacgttatgtgtgagtcttccttggtgttgaattagttgcagtttgttcattctcattactgcatagcagggttcggcaagtcacagccagtgggccagatgcagcccgctgcctgttttgtagagaaatctttgctggcacacagccactcctacttgttgatatattgccggtggctcctttcaggctaccacacagggttgaacagttttgacagagaccctacgatcctcaaaacctaa

SEQ ID NO: 338944 - DNA, 498 bp, Homo sapiens
tgatatgctgtctccactaataataccaaaattagcccggtgtggtggtgcatgcctgtaatcccagcacttagggaggcctaggagagtggatcacttgagcacagaagttcgagattagcctgggcaacttgggaaaaccccgtctctaccaaaaatacaaaaattagccaggtgtgatgggacgcgcctgtagtcccagccacttgtaaggctgaggtgggaggattgcttgagccctggaggtctagggtgatcacaccactgcactccaacctgggtgacagagcgaggctccatctcaaaaaaacaaaaaagatttttctaatgtcattccacaaggatagcttatactgctattttggctgtgcctatctcagagccagaatgggcggaagtccttttttcccttttttttttttttaatgagactcttctgcctgtattgatttttagttaagtatgtcatttctacttttcatgcctgtatttcagaag

SEQ ID NO: 338945 - DNA, 569 bp, Homo sapiens
agtcctgctcttgttgcccaggctggagtgcaatggtgcaatctcggctcactgcaatctcagcctcctgggttcaagcgatgctcttgcctcagcctcccaagtagctggtattacaggtgcccaccaacacgcccgcacttagggaggcctaggagagtggatcacttgagcacagaagttcgagattagcctgggcaacttgggaaaaccccgtctctaccaaaaatacaaaaattagccaggtgtgatgggacgcgcctgtagtcccagccacttgtaaggctgaggtgggaggattgcttgagccctggaggtctagggtgatcacaccactgcactccaacctgggtgacagagcgaggctccatctcaaaaaaacaaaaaagatttttctaatgtcattccacaaggatagcttatactgctattttggctgtgcctatctcagagccagaatgggcggaagtccttttttcccttttttttttttttaatgagactcttctgcctgtattgatttttagttaagtatgtcatttctacttttcatgcctgtatttcagaag

SEQ ID NO: 338946 - DNA, 328 bp, Homo sapiens
atgactacgggggaagccgcccccataatccaatcacttcccatcaggttcctcccttttgtgtgttggtatgggcagttgtgtacattgatttgtctagtataaaatgtgtattacatgattgttcagcctatattatgtatagttcaaagaactgctaaactgattttactgttacttggaaaagtttgcaggggtgtagtgaagagtgagttttgacttactttgcacactattaaggtggggaaggaatcatgttattgtacaaaaatgaaggcaatctttcccttctttaaaccttagtcctgatgtttttttaagacaacat

SEQ ID NO: 338947 - DNA, 231 bp, Homo sapiens
cttacaaggataaaacataataaattcaagatcattctcatttctgaatgtcagtgcaaaatcctaagtaaaatagtaacaaacagaaccttactgcttgttaaaaggctaatataccatgaccaagtgaggtttgttttgggaaagtaaggaggttcaaattttaggtaactatttaattctacgtatcagtagatcaaaagaaaaaaaattatatgatctctcatcgat

SEQ ID NO: 338948 - DNA, 373 bp, Homo sapiens
ggacatgtgatccagggtgaacctactagtgagtgtctatcaaacactgtactgctaaacccagaaactagggctagacagctgtggaatgtacatatatttaagtagggctggtgggcattttaggctgtgtgcaagcagaggaggctactacagatccgctgctttatcagcgattactgtcagtacaatacaggcccaggagctgaccagcacacacatgcagcagcccacccacacaggcacaaatccttcttaaaaagcaggcaatggggagaggttgtaaatattaaactgtaatacccttgtccctgttatgcttccaatattctccctttttgccttgagctagtgaaagtgggtttctcctctt

SEQ ID NO: 338949 - DNA, 639 bp, Homo sapiens
ctggagtgttggttctgcaccctccttgttagctggcatttggcagtggcagtagttaggtcacccttcataagaaggagcccatgctgttgggcctatgtagagccttcctctctgtcactccacaggctccattgacgggcctggtactccagccttgggaagaagctggctgacagcactgacaagccatcctgtctgtccttggggtgtagttgaatgcctcttctgtgggaggtgccttgtgttgggcattcacataagataaagattggcactttgtgttccctgccttagggccgtcagcgtgcctcttctccaggcttctggtctcttatttcctttttggacccttttaatacaaaaattagccgggcatggtggtacatgcctgtaatcctagctactcgggaggctgaggcaggagaatggcatgaaccctggaggtggaggttgcagtgagccaagattgcgccactgcacttcagcctgggcgacgaagcaagactctgtcccccgccgcccacacacacacaaaaaaaattaaccacacacccacttgcttctgtagagaaacctagaactcctggtctcagaaatgtcatccaggtctcgctttcaggctttttgattattctg

SEQ ID NO: 338950 - DNA, 663 bp, Homo sapiens
acttaattttattcttttcactcagggagctaacagaatgagaggtcggcttggaagtgtggacagttttgaacggtccaacagtcttgcttcagagaaggactactcaccaggggattctccaccagggacaccgccagcgtccccaccgtcctcagcttggcaaacgtttcccgaagaggattccgactccccgcagtttcgaagacgggcacacacgttcagccacccaccttcaagcacaaagagaaagctgaatttgcaggatgggagggctcagggtgtgcgttcccctctgctgaggcagagctccagtgaacagtgcagtgatggagaagggagaaaaaggacctcatctacctgcagcaatgagtccctaagtgtgggaggaacctctgtcactcctcgccggatctcctggcggcagcgcattttcctcagggttgcttctcccatgaacaaatctccctcagcaatgcaacagcaaggtctgtgttgcactccctaaggaatttatccctctgagtgtcagaaattagctaatggaatgcacgtgctgtgtataaagagatttaagtgattacagtgtagaaatatctttctgtatgtgatacagtggtttctctttcaggtatcattagaaaacattaggcattcaatacc

SEQ ID NO: 338951 - DNA, 6640 bp, Homo sapiens
gcggccgcggggaccctcggcgtggtcctctgaccctgcaaacccgcgacggaggaaggggaggtcctgcccgaggcgccagcccgaggaggaggatgcccatttaacccgccctcgcctgccgggcgcttgcctcggtgcccgccgccggagcctccgagccgcgcccgtggaagtgctgcatggggcagggctgctgaagcgcggagttcggggtcgcgccgctcccaggcaggcgcgggagcccggtgcggcagttggcacagtttcggcggcgccttctgcgcgggagtggggggcgcggtgcgcccggccggcctccgcggtgccctggtgaggcgagagttatggagccgcccagctgcattcaggatgagccgttcccgcaccccctggagcccgagccgggcgtctcagctcagcccggccccgggaagccaagcgataagcggttccggctgtggtacgttggggggtcgtgcctggaccacaggaccacgctgcctatgctgccctggctcatggccgagatccgcaggcgcagccagaagcccgaggcgggcggctgcggggcgccggcggcccgagaggtgatcctggtgctcagcgcgcccttcctgcgttgcgtccccgcgccgggcgctggggcctcggggggcactagtccgtcggccacgcagcccaacccggcggtattcatcttcgagcacaaggcgcagcatatctcgcgcttcatccacaacagccacgacctcacctactttgcctacctgatcaaggcgcagcccgacgaccccgagtcgcagatggcctgccacgttttccgcgccacagaccccagccaggatgccaaacccagcaaagataatgaggacgccttttacaactctcagaagttcgaagtcctgtactgtggaaaggtgaccgtgacccacaagaaggccccctcaagcctcatcgatgactgcatggagaagttcagcctgcacgaacagcagcgcctgaagatccaaggcgagcagcgcggtccggacccaggagaggacctggctgacttggaggtggtggtgcccgggtcccccggagactgcctgccggaggaggctgacggcaccgacacccaccttggcttacctgccggggccagccagcctgccctgaccagctctcgggtctgcttccctgagcggattttggaagattctggctttgatgagcagcaggagtttcggtctcggtgcagcagtgtcaccggcgtgcaacggagagttcacgagggcagccagaaatcccagccgcgacggagacacgcgagcgcacccagtcacgtccagccctcggactcggagaagaacaggaccatgctcttccaggttgggcgatttgagattaaccttatcagtccagacactaaatcagttgtgctagaaaagaattttaaagatatctcctcttgttctcagggtataaagcatgtggatcactttggctttatctgccgggagtctccagagcctggacttagccagtatatttgttatgtattccagtgtgccagcgaatctctggttgatgaggtaatgctgactctgaaacaggccttcagtacggcggctgccctgcagagtgccaagacgcagattaaactgtgtgaggcctgcccgatgcactctttgcataagctctgtgaaaggattgaaggtctctacccaccaagagccaagctggtgatacagaggcatctctcatcactgacagataatgagcaagctgacatctttgaaagagttcagaaaatgaagccagtcagtgaccaggaagaaaatgaacttgtgattttacacctgaggcagctgtgtgaagccaagcagaagacacacgtgcacatcggggaaggcccttctactatttcaaatagtacaatcccagaaaatgcaacaagcagtggaaggttcaaacttgacattctgaaaaataaagctaagagatccttaactagctccctggaaaatatcttctcaaggggagctaacagaatgagaggtcggcttggaagtgtggacagttttgaacggtccaacagtcttgcttcagagaaggactactcaccaggggattctccaccagggacaccgccagcgtccccaccgtcctcagcttggcaaacgtttcccgaagaggattccgactccccgcagtttcgaagacgggcacacacgttcagccacccaccttcaagcacaaagagaaagctgaatttgcaggatgggagggctcagggtgtgcgttcccctctgctgaggcagagctccagtgaacagtgcagtgatggagaagggagaaaaaggacctcatctacctgcagcaatgagtccctaagtgtgggaggaacctctgtcactcctcgccggatctcctggcggcagcgcattttcctcagggttgcttctcccatgaacaaatctccctcagcaatgcaacagcaagatggattggacaggaacgagctgctgccactgtcccccctctctccaaccatggaggaggaaccgctggttatattcctgtctggggaggatgacccagaaaagattgaagaaagaaagaaatcaaaagaactgaggagcttgtggagaaaagctatacaccaacaaatcttgttacttcgaatggaaaaagaaaaccagaaacttgaaggagcaagcagagatgaactccagtccagaaaagttaaattagactatgaagaagttggtgcatgtcagaaagaggtcttaataacttgggataagaagttgttaaactgcagagctaaaatcagatgtgatatggaagatattcatactcttcttaaagaaggagttcccaaaagtcgacgaggagaaatttggcagtttctggctttacagtaccgactcagacacagattgcctaataaacaacagcctcctgacatatcctataaggaacttttgaagcagctcactgctcagcagcatgcgattctcgtggatttaggaaggacgtttcctactcacccttacttttcagtacagcttgggccaggacagctgtcactgtttaacctcctgaaagcctattctttgctggacaaagaagtgggatactgtcaggggatcagctttgtggctggagtcctgcttctgcacatgagtgaagagcaagcctttgaaatgctgaaattcctcatgtatgacctcggcttccgcaagcagtacagacctgacatgatgtcgctgcagattcaaatgtaccagctgtccaggctccttcatgactatcacagagatctctacaatcaccttgaagaaaatgaaatcagccccagtctttatgctgccccctggttcctcacattgtttgcctctcagttttcattaggatttgtagccagagtttttgatattatttttcttcagggaactgaagttatattcaaggttgcactcagcctactgagcagccaagagacacttataatggaatgtgagagctttgaaaatattgttgagtttcttaaaaacacgctacctgatatgaatacctctgaaatggaaaaaattattacccaggtttttgagatggatatttctaagcagttgcatgcctatgaggtggaatatcatgtgctacaggatgagcttcaggaatcttcatattcctgtgaggatagtgaaactttggagaagctggagagggccaatagccaactgaaaagacaaaacatggacctcctagaaaaattacaggtagctcatactaaaatccaggccttggaatcaaacctggaaaatcttttgacgagagagaccaaaatgaagtctttaatccggaccctggaacaagaaaaaatggcttatcaaaagacagtggagcaactccggaagctgctgcccgcggatgctctagtcaattgtgacctgttgctgagagacctaaactgcaaccctaacaacaaagccaagataggaaataagccataattgaagaggcacggcctcagcagaaagtgctccttagaatactacagagaggaagagcctgcatgtcgctggcccaaggctggaccctgaagctgatggaaccacctaatactggtgctgagctcctagtcacagcaggtggacctcgtgctcatcagagcatgccaatcctaagccattggacatatgtagactggtttttgttgttgctatgtacatataaatatatatataaaatgaacatagttcatgctttcagataaaatgagtagatgtatatttagattaatttttttagtcagaacttcatgaaatccacaccaaaggaaaggtaaactgaaatttcccttggacatatgtgaaatctttttgtctttatagtgaaacaaagccagagcatctttgtatattgcaatatacttgaaaaaaatgaatgtatttttttctccaaagaacagcatgtttcactcaatggtgaaaaggtggaaacatttatgtaactttatgtgtatctgtcttgatatctactgacattgtctatatgaggaaaatgattactggtcatgctcctgtgagttttttgggaaggtagggtcatttctccctgcctgctttgtgccaactagcatgttgcatctacatgcattatgagtctggttaggcattactttaaacatacataaagagacagtaggacattgtggctgagtctacccagctcaaggtaaaggagaatgttgctaattttttagcaaactagaccagcattattactcaaactaaaaatatcacacctgaaaaatttaatttaggacctaaaatgtctagattagctttctgctttttttatttgaataactcattcagttgtgaatgaattcctctttatttggtgccacagtcaccaaatgacaaggatttgccactttcccaccaaattgtgagtgcttgtaatttaggtctctctaccttaaattcagtataaggaaacgtaattatgattgattttttccaaagatgacaagctgtgttgaaatacattttttcttttgaccaattgacagaatctaataagctttaataatcttccccttttatgtgaaaagttttgagaactgtgaaatgtttaggaacaaactgttgaaatccattggaagggaaaaaagaaagtggtaccagtgttaccagctcaactaaaacctgcaattctgcatttcaactcttcacttcctcagcctacaaatagctcattagatgacattcacgcatgctgggtataggcaaggaaagtaattttcaaagtacatttgcagttctctttttcagagatgattctatgatagtgcctctgaaagttgatgcagcatttttgcctttccaaaaagtatttatcctcactgctttttgcagtacttgtattttcacagatggattatctggggtaattttcttcaaagggagtttgttatacacagtgaaaatgtattatagagtagaatagtaaagctctaggggtttcagaaagctttgatgaacagatgacaaacatctgaaaccccctccgcactgttacccagtgtgtatataatgacttgttatagctcagtgtgcccttgaatccatacagtttcttaaaagacaataaaatcttattaataaagttaatgtaacttctaagttctagaaaatgctgattctgtctgccccattcaattgggggctactaattgatttgttgcttggatttcctgagaatttctctatttgtaggaggggttttttctttttacggtctgttgatgacaattactttatgggtgtgatgcaccgatggtagccaaggaatctgttggggaagttcggaaagaaaccttttctttcttttattcagtttaaagtaaactttatcctggatgtttagaatcaacattaagagttatattatggtgttcagagattaagctgacttggatacaatattttcttttgaaaatgaattttctttttcatttgtgatttttaaaaaatgttgcaccagttatgcttcatgcatcgttacatcttcatcaggttaatgtaatgtctagttcctttgcaataaatatattgctgcagctttcttgacgtatactgttacttttcgggagagaagcagctcttggttagagtcttttactgcaggggtccctgggtacctgtctgtggcctgttatgaaccaggctgcacagcagtggtgggcatgcgagcaagcatgactgcctgagctctgactcctgtcagatcagccacggcattagattctcataggagcgcaaaccctattgtgaactgtgcatgcaggagatctatgttttgtgttccttaagagaatcgaatgcctgatgatctgtcactgtctcccatcatccccagatgggatcgtctagttgcaggaaaacagtcagggttcccactaattctacattatggtgagtatataataataatatggtgaggatataataataataatagaaataaagtgcacaataaatgtgcttgaatcattgaatcatcctgaaaccatcccctgccaccagtctgtggaaagattgtcttccatgaaaccagtccctggtgtcaagaaggttgaaga

SEQ ID NO: 338952 - DNA, 6805 bp, Homo sapiens
gcggccgcggggaccctcggcgtggtcctctgaccctgcaaacccgcgacggaggaaggggaggtcctgcccgaggcgccagcccgaggaggaggatgcccatttaacccgccctcgcctgccgggcgcttgcctcggtgcccgccgccggagcctccgagccgcgcccgtggaagtgctgcatggggcagggctgctgaagcgcggagttcggggtcgcgccgctcccaggcaggcgcgggagcccggtgcggcagttggcacagtttcggcggcgccttctgcgcgggagtggggggcgcggtgcgcccggccggcctccgcggtgccctggtgaggcgagagttatggagccgcccagctgcattcaggatgagccgttcccgcaccccctggagcccgagccgggcgtctcagctcagcccggccccgggaagccaagcgataagcggttccggctgtggtacgttggggggtcgtgcctggaccacaggaccacgctgcctatgctgccctggctcatggccgagatccgcaggcgcagccagaagcccgaggcgggcggctgcggggcgccggcggcccgagaggtgatcctggtgctcagcgcgcccttcctgcgttgcgtccccgcgccgggcgctggggcctcggggggcactagtccgtcggccacgcagcccaacccggcggtattcatcttcgagcacaaggcgcagcatatctcgcgcttcatccacaacagccacgacctcacctactttgcctacctgatcaaggcgcagcccgacgaccccgagtcgcagatggcctgccacgttttccgcgccacagaccccagccaggatgccaaacccagcaaagataatgaggacgccttttacaactctcagaagttcgaagtcctgtactgtggaaaggtgaccgtgacccacaagaaggccccctcaagcctcatcgatgactgcatggagaagttcagcctgcacgaacagcagcgcctgaagatccaaggcgagcagcgcggtccggacccaggagaggacctggctgacttggaggtggtggtgcccgggtcccccggagactgcctgccggaggaggctgacggcaccgacacccaccttggcttacctgccggggccagccagcctgccctgaccagctctcgggtctgcttccctgagcggattttggaagattctggctttgatgagcagcaggagtttcggtctcggtgcagcagtgtcaccggcgtgcaacggagagttcacgagggcagccagaaatcccagccgcgacggagacacgcgagcgcacccagtcacgtccagccctcggactcggagaagaacaggaccatgctcttccaggttgggcgatttgagattaaccttatcagtccagacactaaatcagttgtgctagaaaagaattttaaagatatctcctcttgttctcagggtataaagcatgtggatcactttggctttatctgccgggagtctccagagcctggacttagccagtatatttgttatgtattccagtgtgccagcgaatctctggttgatgaggtaatgctgactctgaaacaggccttcagtacggcggctgccctgcagagtgccaagacgcagattaaactgtgtgaggcctgcccgatgcactctttgcataagctctgtgaaaggattgaaggtctctacccaccaagagccaagctggtgatacagaggcatctctcatcactgacagataatgagcaagctgacatctttgaaagagttcagaaaatgaagccagtcagtgaccaggaagaaaatgaacttgtgattttacacctgaggcagctgtgtgaagccaagcagaagacacacgtgcacatcggggaaggcccttctactatttcaaatagtacaatcccagaaaatgcaacaagcagtggaaggttcaaacttgacattctgaaaaataaagctaagagatccttaactagctccctggaaaatatcttctcaaggggagctaacagaatgagaggtcggcttggaagtgtggacagttttgaacggtccaacagtcttgcttcagagaaggactactcaccaggggattctccaccagggacaccgccagcgtccccaccgtcctcagcttggcaaacgtttcccgaagaggattccgactccccgcagtttcgaagacgggcacacacgttcagccacccaccttcaagcacaaagagaaagctgaatttgcaggatgggagggctcagggtgtgcgttcccctctgctgaggcagagctccagtgaacagtgcagcaatctttcgtcagttcgacgcatgtacaaggagagtaattcttcctccagtcttccaagtcttcacacttccttctctgccccttccttcactgccccctctttcctgaaaagcttttaccagaattcaggtagactgtccccacagtatgaaaatgaaatcagtgatggagaagggagaaaaaggacctcatctacctgcagcaatgagtccctaagtgtgggaggaacctctgtcactcctcgccggatctcctggcggcagcgcattttcctcagggttgcttctcccatgaacaaatctccctcagcaatgcaacagcaagatggattggacaggaacgagctgctgccactgtcccccctctctccaaccatggaggaggaaccgctggttatattcctgtctggggaggatgacccagaaaagattgaagaaagaaagaaatcaaaagaactgaggagcttgtggagaaaagctatacaccaacaaatcttgttacttcgaatggaaaaagaaaaccagaaacttgaaggagcaagcagagatgaactccagtccagaaaagttaaattagactatgaagaagttggtgcatgtcagaaagaggtcttaataacttgggataagaagttgttaaactgcagagctaaaatcagatgtgatatggaagatattcatactcttcttaaagaaggagttcccaaaagtcgacgaggagaaatttggcagtttctggctttacagtaccgactcagacacagattgcctaataaacaacagcctcctgacatatcctataaggaacttttgaagcagctcactgctcagcagcatgcgattctcgtggatttaggaaggacgtttcctactcacccttacttttcagtacagcttgggccaggacagctgtcactgtttaacctcctgaaagcctattctttgctggacaaagaagtgggatactgtcaggggatcagctttgtggctggagtcctgcttctgcacatgagtgaagagcaagcctttgaaatgctgaaattcctcatgtatgacctcggcttccgcaagcagtacagacctgacatgatgtcgctgcagattcaaatgtaccagctgtccaggctccttcatgactatcacagagatctctacaatcaccttgaagaaaatgaaatcagccccagtctttatgctgccccctggttcctcacattgtttgcctctcagttttcattaggatttgtagccagagtttttgatattatttttcttcagggaactgaagttatattcaaggttgcactcagcctactgagcagccaagagacacttataatggaatgtgagagctttgaaaatattgttgagtttcttaaaaacacgctacctgatatgaatacctctgaaatggaaaaaattattacccaggtttttgagatggatatttctaagcagttgcatgcctatgaggtggaatatcatgtgctacaggatgagcttcaggaatcttcatattcctgtgaggatagtgaaactttggagaagctggagagggccaatagccaactgaaaagacaaaacatggacctcctagaaaaattacaggtagctcatactaaaatccaggccttggaatcaaacctggaaaatcttttgacgagagagaccaaaatgaagtctttaatccggaccctggaacaagaaaaaatggcttatcaaaagacagtggagcaactccggaagctgctgcccgcggatgctctagtcaattgtgacctgttgctgagagacctaaactgcaaccctaacaacaaagccaagataggaaataagccataattgaagaggcacggcctcagcagaaagtgctccttagaatactacagagaggaagagcctgcatgtcgctggcccaaggctggaccctgaagctgatggaaccacctaatactggtgctgagctcctagtcacagcaggtggacctcgtgctcatcagagcatgccaatcctaagccattggacatatgtagactggtttttgttgttgctatgtacatataaatatatatataaaatgaacatagttcatgctttcagataaaatgagtagatgtatatttagattaatttttttagtcagaacttcatgaaatccacaccaaaggaaaggtaaactgaaatttcccttggacatatgtgaaatctttttgtctttatagtgaaacaaagccagagcatctttgtatattgcaatatacttgaaaaaaatgaatgtatttttttctccaaagaacagcatgtttcactcaatggtgaaaaggtggaaacatttatgtaactttatgtgtatctgtcttgatatctactgacattgtctatatgaggaaaatgattactggtcatgctcctgtgagttttttgggaaggtagggtcatttctccctgcctgctttgtgccaactagcatgttgcatctacatgcattatgagtctggttaggcattactttaaacatacataaagagacagtaggacattgtggctgagtctacccagctcaaggtaaaggagaatgttgctaattttttagcaaactagaccagcattattactcaaactaaaaatatcacacctgaaaaatttaatttaggacctaaaatgtctagattagctttctgctttttttatttgaataactcattcagttgtgaatgaattcctctttatttggtgccacagtcaccaaatgacaaggatttgccactttcccaccaaattgtgagtgcttgtaatttaggtctctctaccttaaattcagtataaggaaacgtaattatgattgattttttccaaagatgacaagctgtgttgaaatacattttttcttttgaccaattgacagaatctaataagctttaataatcttccccttttatgtgaaaagttttgagaactgtgaaatgtttaggaacaaactgttgaaatccattggaagggaaaaaagaaagtggtaccagtgttaccagctcaactaaaacctgcaattctgcatttcaactcttcacttcctcagcctacaaatagctcattagatgacattcacgcatgctgggtataggcaaggaaagtaattttcaaagtacatttgcagttctctttttcagagatgattctatgatagtgcctctgaaagttgatgcagcatttttgcctttccaaaaagtatttatcctcactgctttttgcagtacttgtattttcacagatggattatctggggtaattttcttcaaagggagtttgttatacacagtgaaaatgtattatagagtagaatagtaaagctctaggggtttcagaaagctttgatgaacagatgacaaacatctgaaaccccctccgcactgttacccagtgtgtatataatgacttgttatagctcagtgtgcccttgaatccatacagtttcttaaaagacaataaaatcttattaataaagttaatgtaacttctaagttctagaaaatgctgattctgtctgccccattcaattgggggctactaattgatttgttgcttggatttcctgagaatttctctatttgtaggaggggttttttctttttacggtctgttgatgacaattactttatgggtgtgatgcaccgatggtagccaaggaatctgttggggaagttcggaaagaaaccttttctttcttttattcagtttaaagtaaactttatcctggatgtttagaatcaacattaagagttatattatggtgttcagagattaagctgacttggatacaatattttcttttgaaaatgaattttctttttcatttgtgatttttaaaaaatgttgcaccagttatgcttcatgcatcgttacatcttcatcaggttaatgtaatgtctagttcctttgcaataaatatattgctgcagctttcttgacgtatactgttacttttcgggagagaagcagctcttggttagagtcttttactgcaggggtccctgggtacctgtctgtggcctgttatgaaccaggctgcacagcagtggtgggcatgcgagcaagcatgactgcctgagctctgactcctgtcagatcagccacggcattagattctcataggagcgcaaaccctattgtgaactgtgcatgcaggagatctatgttttgtgttccttaagagaatcgaatgcctgatgatctgtcactgtctcccatcatccccagatgggatcgtctagttgcaggaaaacagtcagggttcccactaattctacattatggtgagtatataataataatatggtgaggatataataataataatagaaataaagtgcacaataaatgtgcttgaatcattgaatcatcctgaaaccatcccctgccaccagtctgtggaaagattgtcttccatgaaaccagtccctggtgtcaagaaggttgaaga

SEQ ID NO: 338953 - DNA, 4890 bp, Homo sapiens
gtacagtagctctagcgtttcatcacaaagtgtcaggggagagaatagctttcacttttttgtcatccctctcactttctggcctgtctttacggatgctgtcttacagctgcttatccaaagataagtgggttgtggtgatactgattacagctgcttatcagaagataatgggttgtagtgatactgattagcctacggcataaattaagtaaaagggggaggaaaaacagttttgtcatgactcaggaggaagatgaggcacactgtcacttttgagctctgtgttttggcaggtctgccatgacccacgtgggaaataaagggctcccttccgcttgtgtttcaggactactcaccaggggattctccaccagggacaccgccagcgtccccaccgtcctcagcttggcaaacgtttcccgaagaggattccgactccccgcagtttcgaagacgggcacacacgttcagccacccaccttcaagcacaaagagaaagctgaatttgcaggatgggagggctcagggtgtgcgttcccctctgctgaggcagagctccagtgaacagtgcagtgatggagaagggagaaaaaggacctcatctacctgcagcaatgagtccctaagtgtgggaggaacctctgtcactcctcgccggatctcctggcggcagcgcattttcctcagggttgcttctcccatgaacaaatctccctcagcaatgcaacagcaagatggattggacaggaacgagctgctgccactgtcccccctctctccaaccatggaggaggaaccgctggttatattcctgtctggggaggatgacccagaaaagattgaagaaagaaagaaatcaaaagaactgaggagcttgtggagaaaagctatacaccaacaaatcttgttacttcgaatggaaaaagaaaaccagaaacttgaaggagcaagcagagatgaactccagtccagaaaagttaaattagactatgaagaagttggtgcatgtcagaaagaggtcttaataacttgggataagaagttgttaaactgcagagctaaaatcagatgtgatatggaagatattcatactcttcttaaagaaggagttcccaaaagtcgacgaggagaaatttggcagtttctggctttacagtaccgactcagacacagattgcctaataaacaacagcctcctgacatatcctataaggaacttttgaagcagctcactgctcagcagcatgcgattctcgtggatttaggaaggacgtttcctactcacccttacttttcagtacagcttgggccaggacagctgtcactgtttaacctcctgaaagcctattctttgctggacaaagaagtgggatactgtcaggggatcagctttgtggctggagtcctgcttctgcacatgagtgaagagcaagcctttgaaatgctgaaattcctcatgtatgacctcggcttccgcaagcagtacagacctgacatgatgtcgctgcagattcaaatgtaccagctgtccaggctccttcatgactatcacagagatctctacaatcaccttgaagaaaatgaaatcagccccagtctttatgctgccccctggttcctcacattgtttgcctctcagttttcattaggatttgtagccagagtttttgatattatttttcttcagggaactgaagttatattcaaggttgcactcagcctactgagcagccaagagacacttataatggaatgtgagagctttgaaaatattgttgagtttcttaaaaacacgctacctgatatgaatacctctgaaatggaaaaaattattacccaggtttttgagatggatatttctaagcagttgcatgcctatgaggtggaatatcatgtgctacaggatgagcttcaggaatcttcatattcctgtgaggatagtgaaactttggagaagctggagagggccaatagccaactgaaaagacaaaacatggacctcctagaaaaattacaggtagctcatactaaaatccaggccttggaatcaaacctggaaaatcttttgacgagagagaccaaaatgaagtctttaatccggaccctggaacaagaaaaaatggcttatcaaaagacagtggagcaactccggaagctgctgcccgcggatgctctagtcaattgtgacctgttgctgagagacctaaactgcaaccctaacaacaaagccaagataggaaataagccataattgaagaggcacggcctcagcagaaagtgctccttagaatactacagagaggaagagcctgcatgtcgctggcccaaggctggaccctgaagctgatggaaccacctaatactggtgctgagctcctagtcacagcaggtggacctcgtgctcatcagagcatgccaatcctaagccattggacatatgtagactggtttttgttgttgctatgtacatataaatatatatataaaatgaacatagttcatgctttcagataaaatgagtagatgtatatttagattaatttttttagtcagaacttcatgaaatccacaccaaaggaaaggtaaactgaaatttcccttggacatatgtgaaatctttttgtctttatagtgaaacaaagccagagcatctttgtatattgcaatatacttgaaaaaaatgaatgtatttttttctccaaagaacagcatgtttcactcaatggtgaaaaggtggaaacatttatgtaactttatgtgtatctgtcttgatatctactgacattgtctatatgaggaaaatgattactggtcatgctcctgtgagttttttgggaaggtagggtcatttctccctgcctgctttgtgccaactagcatgttgcatctacatgcattatgagtctggttaggcattactttaaacatacataaagagacagtaggacattgtggctgagtctacccagctcaaggtaaaggagaatgttgctaattttttagcaaactagaccagcattattactcaaactaaaaatatcacacctgaaaaatttaatttaggacctaaaatgtctagattagctttctgctttttttatttgaataactcattcagttgtgaatgaattcctctttatttggtgccacagtcaccaaatgacaaggatttgccactttcccaccaaattgtgagtgcttgtaatttaggtctctctaccttaaattcagtataaggaaacgtaattatgattgattttttccaaagatgacaagctgtgttgaaatacattttttcttttgaccaattgacagaatctaataagctttaataatcttccccttttatgtgaaaagttttgagaactgtgaaatgtttaggaacaaactgttgaaatccattggaagggaaaaaagaaagtggtaccagtgttaccagctcaactaaaacctgcaattctgcatttcaactcttcacttcctcagcctacaaatagctcattagatgacattcacgcatgctgggtataggcaaggaaagtaattttcaaagtacatttgcagttctctttttcagagatgattctatgatagtgcctctgaaagttgatgcagcatttttgcctttccaaaaagtatttatcctcactgctttttgcagtacttgtattttcacagatggattatctggggtaattttcttcaaagggagtttgttatacacagtgaaaatgtattatagagtagaatagtaaagctctaggggtttcagaaagctttgatgaacagatgacaaacatctgaaaccccctccgcactgttacccagtgtgtatataatgacttgttatagctcagtgtgcccttgaatccatacagtttcttaaaagacaataaaatcttattaataaagttaatgtaacttctaagttctagaaaatgctgattctgtctgccccattcaattgggggctactaattgatttgttgcttggatttcctgagaatttctctatttgtaggaggggttttttctttttacggtctgttgatgacaattactttatgggtgtgatgcaccgatggtagccaaggaatctgttggggaagttcggaaagaaaccttttctttcttttattcagtttaaagtaaactttatcctggatgtttagaatcaacattaagagttatattatggtgttcagagattaagctgacttggatacaatattttcttttgaaaatgaattttctttttcatttgtgatttttaaaaaatgttgcaccagttatgcttcatgcatcgttacatcttcatcaggttaatgtaatgtctagttcctttgcaataaatatattgctgcagctttcttgacgtatactgttacttttcgggagagaagcagctcttggttagagtcttttactgcaggggtccctgggtacctgtctgtggcctgttatgaaccaggctgcacagcagtggtgggcatgcgagcaagcatgactgcctgagctctgactcctgtcagatcagccacggcattagattctcataggagcgcaaaccctattgtgaactgtgcatgcaggagatctatgttttgtgttccttaagagaatcgaatgcctgatgatctgtcactgtctcccatcatccccagatgggatcgtctagttgcaggaaaacagtcagggttcccactaattctacattatggtgagtatataataataatatggtgaggatataataataataatagaaataaagtgcacaataaatgtgcttgaatcattgaatcatcctgaaaccatcccctgccaccagtctgtggaaagattgtcttccatgaaaccagtccctggtgtcaagaaggttgaaga

SEQ ID NO: 338954 - DNA, 3991 bp, Homo sapiens
tgccacttcctagccatgtgaacttggggcaattacttcatctctttctgcctcagctttctgtctataaagtggacctaatagtaattgcctaccttatagttgagttgttttctgagtgcatgtgcttagtagctaggcaccctcaataaatgttttattaatgctcagtcagcaacgggtgatgttattgttaatattgtcattatcgagttcccaaaagtcgacgaggagaaatttggcagtttctggctttacagtaccgactcagacacagattgcctaataaacaacagcctcctgacatatcctataaggaacttttgaagcagctcactgctcagcagcatgcgattctcgtggatttaggaaggacgtttcctactcacccttacttttcagtacagcttgggccaggacagctgtcactgtttaacctcctgaaagcctattctttgctggacaaagaagtgggatactgtcaggggatcagctttgtggctggagtcctgcttctgcacatgagtgaagagcaagcctttgaaatgctgaaattcctcatgtatgacctcggcttccgcaagcagtacagacctgacatgatgtcgctgcagattcaaatgtaccagctgtccaggctccttcatgactatcacagagatctctacaatcaccttgaagaaaatgaaatcagccccagtctttatgctgccccctggttcctcacattgtttgcctctcagttttcattaggatttgtagccagagtttttgatattatttttcttcagggaactgaagttatattcaaggttgcactcagcctactgagcagccaagagacacttataatggaatgtgagagctttgaaaatattgttgagtttcttaaaaacacgctacctgatatgaatacctctgaaatggaaaaaattattacccaggtttttgagatggatatttctaagcagttgcatgcctatgaggtggaatatcatgtgctacaggatgagcttcaggaatcttcatattcctgtgaggatagtgaaactttggagaagctggagagggccaatagccaactgaaaagacaaaacatggacctcctagaaaaattacaggtagctcatactaaaatccaggccttggaatcaaacctggaaaatcttttgacgagagagaccaaaatgaagtctttaatccggaccctggaacaagaaaaaatggcttatcaaaagacagtggagcaactccggaagctgctgcccgcggatgctctagtcaattgtgacctgttgctgagagacctaaactgcaaccctaacaacaaagccaagataggaaataagccataattgaagaggcacggcctcagcagaaagtgctccttagaatactacagagaggaagagcctgcatgtcgctggcccaaggctggaccctgaagctgatggaaccacctaatactggtgctgagctcctagtcacagcaggtggacctcgtgctcatcagagcatgccaatcctaagccattggacatatgtagactggtttttgttgttgctatgtacatataaatatatatataaaatgaacatagttcatgctttcagataaaatgagtagatgtatatttagattaatttttttagtcagaacttcatgaaatccacaccaaaggaaaggtaaactgaaatttcccttggacatatgtgaaatctttttgtctttatagtgaaacaaagccagagcatctttgtatattgcaatatacttgaaaaaaatgaatgtatttttttctccaaagaacagcatgtttcactcaatggtgaaaaggtggaaacatttatgtaactttatgtgtatctgtcttgatatctactgacattgtctatatgaggaaaatgattactggtcatgctcctgtgagttttttgggaaggtagggtcatttctccctgcctgctttgtgccaactagcatgttgcatctacatgcattatgagtctggttaggcattactttaaacatacataaagagacagtaggacattgtggctgagtctacccagctcaaggtaaaggagaatgttgctaattttttagcaaactagaccagcattattactcaaactaaaaatatcacacctgaaaaatttaatttaggacctaaaatgtctagattagctttctgctttttttatttgaataactcattcagttgtgaatgaattcctctttatttggtgccacagtcaccaaatgacaaggatttgccactttcccaccaaattgtgagtgcttgtaatttaggtctctctaccttaaattcagtataaggaaacgtaattatgattgattttttccaaagatgacaagctgtgttgaaatacattttttcttttgaccaattgacagaatctaataagctttaataatcttccccttttatgtgaaaagttttgagaactgtgaaatgtttaggaacaaactgttgaaatccattggaagggaaaaaagaaagtggtaccagtgttaccagctcaactaaaacctgcaattctgcatttcaactcttcacttcctcagcctacaaatagctcattagatgacattcacgcatgctgggtataggcaaggaaagtaattttcaaagtacatttgcagttctctttttcagagatgattctatgatagtgcctctgaaagttgatgcagcatttttgcctttccaaaaagtatttatcctcactgctttttgcagtacttgtattttcacagatggattatctggggtaattttcttcaaagggagtttgttatacacagtgaaaatgtattatagagtagaatagtaaagctctaggggtttcagaaagctttgatgaacagatgacaaacatctgaaaccccctccgcactgttacccagtgtgtatataatgacttgttatagctcagtgtgcccttgaatccatacagtttcttaaaagacaataaaatcttattaataaagttaatgtaacttctaagttctagaaaatgctgattctgtctgccccattcaattgggggctactaattgatttgttgcttggatttcctgagaatttctctatttgtaggaggggttttttctttttacggtctgttgatgacaattactttatgggtgtgatgcaccgatggtagccaaggaatctgttggggaagttcggaaagaaaccttttctttcttttattcagtttaaagtaaactttatcctggatgtttagaatcaacattaagagttatattatggtgttcagagattaagctgacttggatacaatattttcttttgaaaatgaattttctttttcatttgtgatttttaaaaaatgttgcaccagttatgcttcatgcatcgttacatcttcatcaggttaatgtaatgtctagttcctttgcaataaatatattgctgcagctttcttgacgtatactgttacttttcgggagagaagcagctcttggttagagtcttttactgcaggggtccctgggtacctgtctgtggcctgttatgaaccaggctgcacagcagtggtgggcatgcgagcaagcatgactgcctgagctctgactcctgtcagatcagccacggcattagattctcataggagcgcaaaccctattgtgaactgtgcatgcaggagatctatgttttgtgttccttaagagaatcgaatgcctgatgatctgtcactgtctcccatcatccccagatgggatcgtctagttgcaggaaaacagtcagggttcccactaattctacattatggtgagtatataataataatatggtgaggatataataataataatagaaataaagtgcacaataaatgtgcttgaatcattgaatcatcctgaaaccatcccctgccaccagtctgtggaaagattgtcttccatgaaaccagtccctggtgtcaagaaggttgaaga

SEQ ID NO: 338955 - DNA, 4474 bp, Homo sapiens
gcggccgcggggaccctcggcgtggtcctctgaccctgcaaacccgcgacggaggaaggggaggtcctgcccgaggcgccagcccgaggaggaggatgcccatttaacccgccctcgcctgccgggcgcttgcctcggtgcccgccgccggagcctccgagccgcgcccgtggaagtgctgcatggggcagggctgctgaagcgcggagttcggggtcgcgccgctcccaggcaggcgcgggagcccggtgcggcagttggcacagtttcggcggcgccttctgcgcgggagtggggggcgcggtgcgcccggccggcctccgcggtgccctggtgaggcgagagttatggagccgcccagctgcattcaggatgagccgttcccgcaccccctggagcccgagccgggcgtctcagctcagcccggccccgggaagccaagcgataagcggttccggctgtggtacgttggggggtcgtgcctggaccacaggaccacgctgcctatgctgccctggctcatggccgagatccgcaggcgcagccagaagcccgaggcgggcggctgcggggcgccggcggcccgagaggtgatcctggtgctcagcgcgcccttcctgcgttgcgtccccgcgccgggcgctggggcctcggggggcactagtccgtcggccacgcagcccaacccggcggtattcatcttcgagcacaaggcgcagcatatctcgcgcttcatccacaacagccacgacctcacctactttgcctacctgatcaaggcgcagcccgacgaccccgagtcgcagatggcctgccacgttttccgcgccacagaccccagccaggatgccaaacccagcaaagataatgaggacgccttttacaactctcagaagttcgaagtcctgtactgtggaaaggtgaccgtgacccacaagaaggccccctcaagcctcatcgatgactgcatggagaagttcagcctgcacgaacagcagcgcctgaagatccaaggcgagcagcgcggtccggacccaggagaggacctggctgacttggaggtggtggtgcccgggtcccccggagactgcctgccggaggaggctgacggcaccgacacccaccttggcttacctgccggggccagccagcctgccctgaccagctctcgggtctgcttccctgagcggattttggaagattctggctttgatgagcagcaggagtttcggtctcggtgcagcagtgtcaccggcgtgcaacggagagttcacgagggcagccagaaatcccagccgcgacggagacacgcgagcgcacccagtcacgtccagccctcggactcggagaagaacaggaccatgctcttccaggttgggcgatttgagattaaccttatcagtccagacactaaatcagttgtgctagaaaagaattttaaagatatctcctcttgttctcagggtataaagcatgtggatcactttggctttatctgccgggagtctccagagcctggacttagccagtatatttgttatgtattccagtgtgccagcgaatctctggttgatgaggtaatgctgactctgaaacaggccttcagtacggcggctgccctgcagagtgccaagacgcagattaaactgtgtgaggcctgcccgatgcactctttgcataagctctgtgaaaggattgaaggtctctacccaccaagagccaagctggtgatacagaggcatctctcatcactgacagataatgagcaagctgacatctttgaaagagttcagaaaatgaagccagtcagtgaccaggaagaaaatgaacttgtgattttacacctgaggcagctgtgtgaagccaagcagaagacacacgtgcacatcggggaaggcccttctactatttcaaatagtacaatcccagaaaatgcaacaagcagtggaaggttcaaacttgacattctgaaaaataaagctaagagatccttaactagctccctggaaaatatcttctcaaggggagctaacagaatgagaggtcggcttggaagtgtggacagttttgaacggtccaacagtcttgcttcagagaaggactactcaccaggggattctccaccagggacaccgccagcgtccccaccgtcctcagcttggcaaacgtttcccgaagaggattccgactccccgcagtttcgaagacgggcacacacgttcagccacccaccttcaagcacaaagagaaagctgaatttgcaggatgggagggctcagggtgtgcgttcccctctgctgaggcagagctccagtgaacagtgcagtgatggagaagggagaaaaaggacctcatctacctgcagcaatgagtccctaagtgtgggaggaacctctgtcactcctcgccggatctcctggcggcagcgcattttcctcagggttgcttctcccatgaacaaatctccctcagcaatgcaacagcaagatggattggacaggaacgagctgctgccactgtcccccctctctccaaccatggaggaggaaccgctggttatattcctgtctggggaggatgacccagaaaagattgaagaaagaaagaaatcaaaagaactgaggagcttgtggagaaaagctatacaccaacaaatcttgttacttcgaatggaaaaagaaaaccagaaacttgaaggagcaagcagagatgaactccagtccagaaaagttaaattagactatgaagaagttggtgcatgtcagaaagaggtcttaataacttgggataagaagttgttaaactgcagagctaaaatcagatgtgatatggaagatattcatactcttcttaaagaaggagttcccaaaagtcgacgaggagaaatttggcagtttctggctttacagtaccgactcagacacagattgcctaataaacaacagcctcctgacatatcctataaggaacttttgaagcagctcactgctcagcagcatgcgattctcgtggatttaggaaggacgtttcctactcacccttacttttcagtacagcttgggccaggacagctgtcactgtttaacctcctgaaagcctattctttgctggacaaagaagtgggatactgtcaggggatcagctttgtggctggagtcctgcttctgcacatgagtgaagagcaagcctttgaaatgctgaaattcctcatgtatgacctcggcttccgcaagcagtacagacctgacatgatgtcgctgcagattcaaatgtaccagctgtccaggctccttcatgactatcacagagatctctacaatcaccttgaagaaaatgaaatcagccccagtctttatgctgccccctggttcctcacattgtttgcctctcagttttcattaggatttgtagccagagtttttgatattatttttcttcagggaactgaagttatattcaaggttgcactcagcctactgagcagccaagagacacttataatggaatgtgagagctttgaaaatattgttgagtttcttaaaaacacgctacctgatatgaatacctctgaaatggaaaaaattattacccaggtttttgagatggatatttctaagcagttgcatgcctatgaggtggaatatcatgtgctacaggatgagcttcaggaatcttcatattcctgtgaggatagtgaaactttggagaagctggagagggccaatagccaactgaaaagacaaaacatggacctcctagaaaaattacaggtagctcatactaaaatccaggccttggaatcaaacctggaaaatcttttgacgagagagaccaaaatgaagtctttaatccggaccctggaacaagaaaaaatggcttatcaaaagacagtggagcaactccggaagctgctgcccgcggatgctctagtcaattgtgacctgttgctgagagacctaaactgcaaccctaacaacaaagccaagataggaaataagccataattgaagaggcacggcctcagcagaaagtgctccttagaatactacagagaggaagagcctgcatgtcgctggcccaaggctggaccctgaagctgatggaaccacctaatactggtgctgagctcctagtcacagcaggtggacctcgtgctcatcagagcatgccaatcctaagccattggacatatgtagactggttttttttatttgaataactcattcagttgtgaatgaattcctctttatttggtgccacagtcaccaaatgacaaggatttgccactttcccaccaaattgtgagtgcttgtaatttaggtctctctaccttaaattcagtataaggaaacgtaattatgattgattttttccaaagatgacaagctgtgtagagcattgaactttctacatctgcatggtgatacacttacttaacatattcctgtataatcatgtttggtgtatacattga

SEQ ID NO: 338956 - DNA, 328 bp, Homo sapiens
tttatagacctgagttttgtttcttcctgtaggttgatgaggtaatgctgactctgaaacaggccttcagtacggcggctgccctgcagagtgccaagacgcagattaaactgtgtgaggcctgcccgatgcactctttgcataagctctgtgaaaggattgaaggtacagtttaatgtggctttggcaaaagagaagtttgctttggcatttgggaaatgagaaagtccctattgtcattgaatagttctttgtttcgatgtgaaacaagaacccaaagaatcatttctcatgtccactcaaatgtgagtgggctgtcaatctctgc

SEQ ID NO: 338957 - DNA, 6883 bp, Homo sapiens
gcggccgcggggaccctcggcgtggtcctctgaccctgcaaacccgcgacggaggaaggggaggtcctgcccgaggcgccagcccgaggaggaggatgcccatttaacccgccctcgcctgccgggcgcttgcctcggtgcccgccgccggagcctccgagccgcgcccgtggaagtgctgcatggggcagggctgctgaagcgcggagttcggggtcgcgccgctcccaggcaggcgcgggagcccggtgcggcagttggcacagtttcggcggcgccttctgcgcgggagtggggggcgcggtgcgcccggccggcctccgcggtgccctggtgaggcgagagttatggagccgcccagctgcattcaggatgagccgttcccgcaccccctggagcccgagccgggcgtctcagctcagcccggccccgggaagccaagcgataagcggttccggctgtggtacgttggggggtcgtgcctggaccacaggaccacgctgcctatgctgccctggctcatggccgagatccgcaggcgcagccagaagcccgaggcgggcggctgcggggcgccggcggcccgagaggtgatcctggtgctcagcgcgcccttcctgcgttgcgtccccgcgccgggcgctggggcctcggggggcactagtccgtcggccacgcagcccaacccggcggtattcatcttcgagcacaaggcgcagcatatctcgcgcttcatccacaacagccacgacctcacctactttgcctacctgatcaaggcgcagcccgacgaccccgagtcgcagatggcctgccacgttttccgcgccacagaccccagccaggttcctgatgttattagcagcataaggcaattatctaaagcggccatgaaagaggatgccaaacccagcaaagataatgaggacgccttttacaactctcagaagttcgaagtcctgtactgtggaaaggtgaccgtgacccacaagaaggccccctcaagcctcatcgatgactgcatggagaagttcagcctgcacgaacagcagcgcctgaagatccaaggcgagcagcgcggtccggacccaggagaggacctggctgacttggaggtggtggtgcccgggtcccccggagactgcctgccggaggaggctgacggcaccgacacccaccttggcttacctgccggggccagccagcctgccctgaccagctctcgggtctgcttccctgagcggattttggaagattctggctttgatgagcagcaggagtttcggtctcggtgcagcagtgtcaccggcgtgcaacggagagttcacgagggcagccagaaatcccagccgcgacggagacacgcgagcgcacccagtcacgtccagccctcggactcggagaagaacaggaccatgctcttccaggttgggcgatttgagattaaccttatcagtccagacactaaatcagttgtgctagaaaagaattttaaagatatctcctcttgttctcagggtataaagcatgtggatcactttggctttatctgccgggagtctccagagcctggacttagccagtatatttgttatgtattccagtgtgccagcgaatctctggttgatgaggtaatgctgactctgaaacaggccttcagtacggcggctgccctgcagagtgccaagacgcagattaaactgtgtgaggcctgcccgatgcactctttgcataagctctgtgaaaggattgaaggtctctacccaccaagagccaagctggtgatacagaggcatctctcatcactgacagataatgagcaagctgacatctttgaaagagttcagaaaatgaagccagtcagtgaccaggaagaaaatgaacttgtgattttacacctgaggcagctgtgtgaagccaagcagaagacacacgtgcacatcggggaaggcccttctactatttcaaatagtacaatcccagaaaatgcaacaagcagtggaaggttcaaacttgacattctgaaaaataaagctaagagatccttaactagctccctggaaaatatcttctcaaggggagctaacagaatgagaggtcggcttggaagtgtggacagttttgaacggtccaacagtcttgcttcagagaaggactactcaccaggggattctccaccagggacaccgccagcgtccccaccgtcctcagcttggcaaacgtttcccgaagaggattccgactccccgcagtttcgaagacgggcacacacgttcagccacccaccttcaagcacaaagagaaagctgaatttgcaggatgggagggctcagggtgtgcgttcccctctgctgaggcagagctccagtgaacagtgcagcaatctttcgtcagttcgacgcatgtacaaggagagtaattcttcctccagtcttccaagtcttcacacttccttctctgccccttccttcactgccccctctttcctgaaaagcttttaccagaattcaggtagactgtccccacagtatgaaaatgaaatcagacaagacactgcttcagaatcaagtgatggagaagggagaaaaaggacctcatctacctgcagcaatgagtccctaagtgtgggaggaacctctgtcactcctcgccggatctcctggcggcagcgcattttcctcagggttgcttctcccatgaacaaatctccctcagcaatgcaacagcaagatggattggacaggaacgagctgctgccactgtcccccctctctccaaccatggaggaggaaccgctggttatattcctgtctggggaggatgacccagaaaagattgaagaaagaaagaaatcaaaagaactgaggagcttgtggagaaaagctatacaccaacaaatcttgttacttcgaatggaaaaagaaaaccagaaacttgaaggagcaagcagagatgaactccagtccagaaaagttaaattagactatgaagaagttggtgcatgtcagaaagaggtcttaataacttgggataagaagttgttaaactgcagagctaaaatcagatgtgatatggaagatattcatactcttcttaaagaaggagttcccaaaagtcgacgaggagaaatttggcagtttctggctttacagtaccgactcagacacagattgcctaataaacaacagcctcctgacatatcctataaggaacttttgaagcagctcactgctcagcagcatgcgattctcgtggatttaggaaggacgtttcctactcacccttacttttcagtacagcttgggccaggacagctgtcactgtttaacctcctgaaagcctattctttgctggacaaagaagtgggatactgtcaggggatcagctttgtggctggagtcctgcttctgcacatgagtgaagagcaagcctttgaaatgctgaaattcctcatgtatgacctcggcttccgcaagcagtacagacctgacatgatgtcgctgcagattcaaatgtaccagctgtccaggctccttcatgactatcacagagatctctacaatcaccttgaagaaaatgaaatcagccccagtctttatgctgccccctggttcctcacattgtttgcctctcagttttcattaggatttgtagccagagtttttgatattatttttcttcagggaactgaagttatattcaaggttgcactcagcctactgagcagccaagagacacttataatggaatgtgagagctttgaaaatattgttgagtttcttaaaaacacgctacctgatatgaatacctctgaaatggaaaaaattattacccaggtttttgagatggatatttctaagcagttgcatgcctatgaggtggaatatcatgtgctacaggatgagcttcaggaatcttcatattcctgtgaggatagtgaaactttggagaagctggagagggccaatagccaactgaaaagacaaaacatggacctcctagaaaaattacaggtagctcatactaaaatccaggccttggaatcaaacctggaaaatcttttgacgagagagaccaaaatgaagtctttaatccggaccctggaacaagaaaaaatggcttatcaaaagacagtggagcaactccggaagctgctgcccgcggatgctctagtcaattgtgacctgttgctgagagacctaaactgcaaccctaacaacaaagccaagataggaaataagccataattgaagaggcacggcctcagcagaaagtgctccttagaatactacagagaggaagagcctgcatgtcgctggcccaaggctggaccctgaagctgatggaaccacctaatactggtgctgagctcctagtcacagcaggtggacctcgtgctcatcagagcatgccaatcctaagccattggacatatgtagactggtttttgttgttgctatgtacatataaatatatatataaaatgaacatagttcatgctttcagataaaatgagtagatgtatatttagattaatttttttagtcagaacttcatgaaatccacaccaaaggaaaggtaaactgaaatttcccttggacatatgtgaaatctttttgtctttatagtgaaacaaagccagagcatctttgtatattgcaatatacttgaaaaaaatgaatgtatttttttctccaaagaacagcatgtttcactcaatggtgaaaaggtggaaacatttatgtaactttatgtgtatctgtcttgatatctactgacattgtctatatgaggaaaatgattactggtcatgctcctgtgagttttttgggaaggtagggtcatttctccctgcctgctttgtgccaactagcatgttgcatctacatgcattatgagtctggttaggcattactttaaacatacataaagagacagtaggacattgtggctgagtctacccagctcaaggtaaaggagaatgttgctaattttttagcaaactagaccagcattattactcaaactaaaaatatcacacctgaaaaatttaatttaggacctaaaatgtctagattagctttctgctttttttatttgaataactcattcagttgtgaatgaattcctctttatttggtgccacagtcaccaaatgacaaggatttgccactttcccaccaaattgtgagtgcttgtaatttaggtctctctaccttaaattcagtataaggaaacgtaattatgattgattttttccaaagatgacaagctgtgttgaaatacattttttcttttgaccaattgacagaatctaataagctttaataatcttccccttttatgtgaaaagttttgagaactgtgaaatgtttaggaacaaactgttgaaatccattggaagggaaaaaagaaagtggtaccagtgttaccagctcaactaaaacctgcaattctgcatttcaactcttcacttcctcagcctacaaatagctcattagatgacattcacgcatgctgggtataggcaaggaaagtaattttcaaagtacatttgcagttctctttttcagagatgattctatgatagtgcctctgaaagttgatgcagcatttttgcctttccaaaaagtatttatcctcactgctttttgcagtacttgtattttcacagatggattatctggggtaattttcttcaaagggagtttgttatacacagtgaaaatgtattatagagtagaatagtaaagctctaggggtttcagaaagctttgatgaacagatgacaaacatctgaaaccccctccgcactgttacccagtgtgtatataatgacttgttatagctcagtgtgcccttgaatccatacagtttcttaaaagacaataaaatcttattaataaagttaatgtaacttctaagttctagaaaatgctgattctgtctgccccattcaattgggggctactaattgatttgttgcttggatttcctgagaatttctctatttgtaggaggggttttttctttttacggtctgttgatgacaattactttatgggtgtgatgcaccgatggtagccaaggaatctgttggggaagttcggaaagaaaccttttctttcttttattcagtttaaagtaaactttatcctggatgtttagaatcaacattaagagttatattatggtgttcagagattaagctgacttggatacaatattttcttttgaaaatgaattttctttttcatttgtgatttttaaaaaatgttgcaccagttatgcttcatgcatcgttacatcttcatcaggttaatgtaatgtctagttcctttgcaataaatatattgctgcagctttcttgacgtatactgttacttttcgggagagaagcagctcttggttagagtcttttactgcaggggtccctgggtacctgtctgtggcctgttatgaaccaggctgcacagcagtggtgggcatgcgagcaagcatgactgcctgagctctgactcctgtcagatcagccacggcattagattctcataggagcgcaaaccctattgtgaactgtgcatgcaggagatctatgttttgtgttccttaagagaatcgaatgcctgatgatctgtcactgtctcccatcatccccagatgggatcgtctagttgcaggaaaacagtcagggttcccactaattctacattatggtgagtatataataataatatggtgaggatataataataataatagaaataaagtgcacaataaatgtgcttgaatcattgaatcatcctgaaaccatcccctgccaccagtctgtggaaagattgtcttccatgaaaccagtccctggtgtcaagaaggttgaaga

SEQ ID NO: 338958 - DNA, 6367 bp, Homo sapiens
  misc_feature (6334)..(6334): n is a, c, g, or t
gcggccgcggggaccctcggcgtggtcctctgaccctgcaaacccgcgacggaggaaggggaggtcctgcccgaggcgccagcccgaggaggaggatgcccatttaacccgccctcgcctgccgggcgcttgcctcggtgcccgccgccggagcctccgagccgcgcccgtggaagtgctgcatggggcagggctgctgaagcgcggagttcggggtcgcgccgctcccaggcaggcgcgggagcccggtgcggcagttggcacagtttcggcggcgccttctgcgcgggagtggggggcgcggtgcgcccggccggcctccgcggtgccctggtgaggcgagagttatggagccgcccagctgcattcaggatgagccgttcccgcaccccctggagcccgagccgggcgtctcagctcagcccggccccgggaagccaagcgataagcggttccggctgtggtacgttggggggtcgtgcctggaccacaggaccacgctgcctatgctgccctggctcatggccgagatccgcaggcgcagccagaagcccgaggcgggcggctgcggggcgccggcggcccgagaggtgatcctggtgctcagcgcgcccttcctgcgttgcgtccccgcgccgggcgctggggcctcggggggcactagtccgtcggccacgcagcccaacccggcggtattcatcttcgagcacaaggcgcagcatatctcgcgcttcatccacaacagccacgacctcacctactttgcctacctgatcaaggcgcagcccgacgaccccgagtcgcagatggcctgccacgttttccgcgccacagaccccagccaggttcctgatgttattagcagcataaggcaattatctaaagcggccatgaaagaggatgccaaacccagcaaagataatgaggacgccttttacaactctcagaagttcgaagtcctgtactgtggaaaggtgaccgtgacccacaagaaggccccctcaagcctcatcgatgactgcatggagaagttcagcctgcacgaacagcagcgcctgaagatccaaggcgagcagcgcggtccggacccaggagaggacctggctgacttggaggtggtggtgcccgggtcccccggagactgcctgccggaggaggctgacggcaccgacacccaccttggcttacctgccggggccagccagcctgccctgaccagctctcgggtctgcttccctgagcggattttggaagattctggctttgatgagcagcaggagtttcggtctcggtgcagcagtgtcaccggcgtgcaacggagagttcacgagggcagccagaaatcccagccgcgacggagacacgcgagcgcacccagtcacgtccagccctcggactcggagaagaacaggaccatgctcttccaggttgggcgatttgagattaaccttatcagtccagacactaaatcagttgtgctagaaaagaattttaaagatatctcctcttgttctcagggtataaagcatgtggatcactttggctttatctgccgggagtctccagagcctggacttagccagtatatttgttatgtattccagtgtgccagcgaatctctggttgatgaggtaatgctgactctgaaacaggccttcagtacggcggctgccctgcagagtgccaagacgcagattaaactgtgtgaggcctgcccgatgcactctttgcataagctctgtgaaaggattgaaggtctctacccaccaagagccaagctggtgatacagaggcatctctcatcactgacagataatgagcaagctgacatctttgaaagagttcagaaaatgaagccagtcagtgaccaggaagaaaatgaacttgtgattttacacctgaggcagctgtgtgaagccaagcagaagacacacgtgcacatcggggaaggcccttctactatttcaaatagtacaatcccagaaaatgcaacaagcagtggaaggttcaaacttgacattctgaaaaataaagctaagagatccttaactagctccctggaaaatatcttctcaaggggagctaacagaatgagaggtcggcttggaagtgtggacagttttgaacggtccaacagtcttgcttcagagaaggactactcaccaggggattctccaccagggacaccgccagcgtccccaccgtcctcagcttggcaaacgtttcccgaagaggattccgactccccgcagtttcgaagacgggcacacacgttcagccacccaccttcaagcacaaagagaaagctgaatttgcaggatgggagggctcagggtgtgcgttcccctctgctgaggcagagctccagtgaacagtgcagcaatctttcgtcagttcgacgcatgtacaaggagagtaattcttcctccagtcttccaagtcttcacacttccttctctgccccttccttcactgccccctctttcctgaaaagcttttaccagaattcaggtagactgtccccacagtatgaaaatgaaatcagacaagacactgcttcagaatcaagtgatggagaagggagaaaaaggacctcatctacctgcagcaatgagtccctaagtgtgggaggaacctctgtcactcctcgccggatctcctggcggcagcgcattttcctcagggttgcttctcccatgaacaaatctccctcagcaatgcaacagcaagatggattggacaggaacgagctgctgccactgtcccccctctctccaaccatggaggaggaaccgctggttatattcctgtctggggaggatgacccagaaaagattgaagaaagaaagaaatcaaaagaactgaggagcttgtggagaaaagctatacaccaacaaatcttgttacttcgaatggaaaaagaaaaccagaaacttgaaggagcaagcagagatgaactccagtccagaaaagttaaattagactatgaagaagttggtgcatgtcagaaagaggtcttaataacttgggataagaagttgttaaactgcagagctaaaatcagatgtgatatggaagatattcatactcttcttaaagaaggagttcccaaaagtcgacgaggagaaatttggcagtttctggctttacagtaccgactcagacacagattgcctaataaacaacagcctcctgacatatcctataaggaacttttgaagcagctcactgctcagcagcatgcgattctcgtggatttaggaaggacgtttcctactcacccttacttttcagtacagcttgggccaggacagctgtcactgtttaacctcctgaaagcctattctttgctggacaaagaagtgggatactgtcaggggatcagctttgtggctggagtcctgcttctgcacatgagtgaagagcaagcctttgaaatgctgaaattcctcatgtatgacctcggcttccgcaagcagtacagacctgacatgatgtcgctgcagattcaaatgtaccagctgtccaggctccttcatgactatcacagagatctctacaatcaccttgaagaaaatgaaatcagccccagtctttatgctgccccctggttcctcacattgtttgcctctcagttttcattaggatttgtagccagagtttttgatattatttttcttcagggaactgaagttatattcaaggttgcactcagcctactgagcagccaagagacacttataatggaatgtgagagctttgaaaatattgttgagtttcttaaaaacacgctacctgatatgaatacctctgaaatggaaaaaattattacccaggtttttgagatggatatttctaagcagttgcatgcctatgaggtggaatatcatgtgctacaggatgagcttcaggaatcttcatattcctgtgaggatagtgaaactttggagaagctggagagggccaatagccaactgaaaagacaaaacatggacctcctagaaaaattacaggtagctcatactaaaatccaggccttggaatcaaacctggaaaatcttttgacgagagagaccaaaatgaagtctttaatccggaccctggaacaagaaaaaatggcttatcaaaagacagtggagcaactccggaagctgctgcccgcggatgctctagtcaattgtgacctgttgctgagagacctaaactgcaaccctaacaacaaagccaagataggaaataagccataattgaagaggcacggcctcagcagaaagtgctccttagaatactacagagaggaagagcctgcatgtcgctggcccaaggctggaccctgaagctgatggaaccacctaatactggtgctgagctcctagtcacagcaggtggacctcgtgctcatcagagcatgccaatcctaagccattggacatatgtagactggtttttgttgttgctatgtacatataaatatatatataaaatgaacatagttcatgctttcagataaaatgagtagatgtatatttagattaatttttttagtcagaacttcatgaaatccacaccaaaggaaaggtaaactgaaatttcccttggacatatgtgaaatctttttgtctttatagtgaaacaaagccagagcatctttgtatattgcaatatacttgaaaaaaatgaatgtatttttttctccaaagaacagcatgtttcactcaatggtgaaaaggtggaaacatttatgtaactttatgtgtatctgtcttgatatctactgacattgtctatatgaggaaaatgattactggtcatgctcctgtgagttttttgggaaggtagggtcatttctccctgcctgctttgtgccaactagcatgttgcatctacatgcattatgagtctggttaggcattactttaaacatacataaagagacagtaggacattgtggctgagtctacccagctcaaggtaaaggagaatgttgctaattttttagcaaactagaccagcattattactcaaactaaaaatatcacacctgaaaaatttaatttaggacctaaaatgtctagattagctttctgctttttttatttgaataactcattcagttgtgaatgaattcctctttatttggtgccacagtcaccaaatgacaaggatttgccactttcccaccaaattgtgagtgcttgtaatttaggtctctctaccttaaattcagtataaggaaacgtaattatgattgattttttccaaagatgacaagctgtgttgaaatacattttttcttttgaccaattgacagaatctaataagctttaataatcttccccttttatgtgaaaagttttgagaactgtgaaatgtttaggaacaaactgttgaaatccattggaagggaaaaaagaaagtggtaccagtgttaccagctcaactaaaacctgcaattctgcatttcaactcttcacttcctcagcctacaaatagctcattagatgacattcacgcatgctgggtataggcaaggaaagtaattttcaaagtacatttgcagttctctttttcagagatgattctatgatagtgcctctgaaagttgatgcagcatttttgcctttccaaaaagtatttatcctcactgctttttgcagtacttgtattttcacagatggattatctggggtaattttcttcaaagggagtttgttatacacagtgaaaatgtattatagagtagaatagtaaagctctaggggtttcagaaagctttgatgaacagatgacaaacatctgaaaccccctccgcactgttacccagtgtgtatataatgacttgttatagctcagtgtgcccttgaatccatacagtttcttaaaagacaataaaatcttattaataaagttaatgtaacttctaagttctagaaaatgctgattctgtctgccccattcaattgggggctactaattgatttgttgcttggatttcctgagaatttctctatttgtaggaggggttttttctttttacggtctgttgatgacaattactttatgggtgtgatgcaccgatggtagccaaggaatctgttggggaagttcggaaagaaaccttttctttcttttattcagtttaaagtaaactttatcctggatgtttagaatcaacattaagagttatattatggtgttcagagattaagctgacttggatacaatattttcttttgaaaatgaattttctttttcatttgtgatttttaaaaaatgggcgccccggtatgcctcaaggtaccattcattttttccccaggttaagtgaagtgtngagtcccttgcgcaaataaatattttgtccccc

SEQ ID NO: 338959 - DNA, 5990 bp, Homo sapiens
ataggatttttccagcagctgttgattcagttgaagtaaagaggaacagatagctatgaaagtctcaaagttacgtgagcatgttaactcgggttctgctccagctgtcttcatttcaggaccagctgctatcatggaattgttcctgatgttattagcagcataaggcaattatctaaagcggccatgaaagaggatgccaaacccagcaaagataatgaggacgccttttacaactctcagaagttcgaagtcctgtactgtggaaaggtgaccgtgacccacaagaaggccccctcaagcctcatcgatgactgcatggagaagttcagcctgcacgaacagcagcgcctgaagatccaaggcgagcagcgcggtccggacccaggagaggacctggctgacttggaggtggtggtgcccgggtcccccggagactgcctgccggaggaggctgacggcaccgacacccaccttggcttacctgccggggccagccagcctgccctgaccagctctcgggtctgcttccctgagcggattttggaagattctggctttgatgagcagcaggagtttcggtctcggtgcagcagtgtcaccggcgtgcaacggagagttcacgagggcagccagaaatcccagccgcgacggagacacgcgagcgcacccagtcacgtccagccctcggactcggagaagaacaggaccatgctcttccaggttgggcgatttgagattaaccttatcagtccagacactaaatcagttgtgctagaaaagaattttaaagatatctcctcttgttctcagggtataaagcatgtggatcactttggctttatctgccgggagtctccagagcctggacttagccagtatatttgttatgtattccagtgtgccagcgaatctctggttgatgaggtaatgctgactctgaaacaggccttcagtacggcggctgccctgcagagtgccaagacgcagattaaactgtgtgaggcctgcccgatgcactctttgcataagctctgtgaaaggattgaaggtctctacccaccaagagccaagctggtgatacagaggcatctctcatcactgacagataatgagcaagctgacatctttgaaagagttcagaaaatgaagccagtcagtgaccaggaagaaaatgaacttgtgattttacacctgaggcagctgtgtgaagccaagcagaagacacacgtgcacatcggggaaggcccttctactatttcaaatagtacaatcccagaaaatgcaacaagcagtggaaggttcaaacttgacattctgaaaaataaagctaagagatccttaactagctccctggaaaatatcttctcaaggggagctaacagaatgagaggtcggcttggaagtgtggacagttttgaacggtccaacagtcttgcttcagagaaggactactcaccaggggattctccaccagggacaccgccagcgtccccaccgtcctcagcttggcaaacgtttcccgaagaggattccgactccccgcagtttcgaagacgggcacacacgttcagccacccaccttcaagcacaaagagaaagctgaatttgcaggatgggagggctcagggtgtgcgttcccctctgctgaggcagagctccagtgaacagtgcagtgatggagaagggagaaaaaggacctcatctacctgcagcaatgagtccctaagtgtgggaggaacctctgtcactcctcgccggatctcctggcggcagcgcattttcctcagggttgcttctcccatgaacaaatctccctcagcaatgcaacagcaagatggattggacaggaacgagctgctgccactgtcccccctctctccaaccatggaggaggaaccgctggttatattcctgtctggggaggatgacccagaaaagattgaagaaagaaagaaatcaaaagaactgaggagcttgtggagaaaagctatacaccaacaaatcttgttacttcgaatggaaaaagaaaaccagaaacttgaaggagcaagcagagatgaactccagtccagaaaagttaaattagactatgaagaagttggtgcatgtcagaaagaggtcttaataacttgggataagaagttgttaaactgcagagctaaaatcagatgtgatatggaagatattcatactcttcttaaagaaggagttcccaaaagtcgacgaggagaaatttggcagtttctggctttacagtaccgactcagacacagattgcctaataaacaacagcctcctgacatatcctataaggaacttttgaagcagctcactgctcagcagcatgcgattctcgtggatttaggaaggacgtttcctactcacccttacttttcagtacagcttgggccaggacagctgtcactgtttaacctcctgaaagcctattctttgctggacaaagaagtgggatactgtcaggggatcagctttgtggctggagtcctgcttctgcacatgagtgaagagcaagcctttgaaatgctgaaattcctcatgtatgacctcggcttccgcaagcagtacagacctgacatgatgtcgctgcagattcaaatgtaccagctgtccaggctccttcatgactatcacagagatctctacaatcaccttgaagaaaatgaaatcagccccagtctttatgctgccccctggttcctcacattgtttgcctctcagttttcattaggatttgtagccagagtttttgatattatttttcttcagggaactgaagttatattcaaggttgcactcagcctactgagcagccaagagacacttataatggaatgtgagagctttgaaaatattgttgagtttcttaaaaacacgctacctgatatgaatacctctgaaatggaaaaaattattacccaggtttttgagatggatatttctaagcagttgcatgcctatgaggtggaatatcatgtgctacaggatgagcttcaggaatcttcatattcctgtgaggatagtgaaactttggagaagctggagagggccaatagccaactgaaaagacaaaacatggacctcctagaaaaattacaggtagctcatactaaaatccaggccttggaatcaaacctggaaaatcttttgacgagagagaccaaaatgaagtctttaatccggaccctggaacaagaaaaaatggcttatcaaaagacagtggagcaactccggaagctgctgcccgcggatgctctagtcaattgtgacctgttgctgagagacctaaactgcaaccctaacaacaaagccaagataggaaataagccataattgaagaggcacggcctcagcagaaagtgctccttagaatactacagagaggaagagcctgcatgtcgctggcccaaggctggaccctgaagctgatggaaccacctaatactggtgctgagctcctagtcacagcaggtggacctcgtgctcatcagagcatgccaatcctaagccattggacatatgtagactggtttttgttgttgctatgtacatataaatatatatataaaatgaacatagttcatgctttcagataaaatgagtagatgtatatttagattaatttttttagtcagaacttcatgaaatccacaccaaaggaaaggtaaactgaaatttcccttggacatatgtgaaatctttttgtctttatagtgaaacaaagccagagcatctttgtatattgcaatatacttgaaaaaaatgaatgtatttttttctccaaagaacagcatgtttcactcaatggtgaaaaggtggaaacatttatgtaactttatgtgtatctgtcttgatatctactgacattgtctatatgaggaaaatgattactggtcatgctcctgtgagttttttgggaaggtagggtcatttctccctgcctgctttgtgccaactagcatgttgcatctacatgcattatgagtctggttaggcattactttaaacatacataaagagacagtaggacattgtggctgagtctacccagctcaaggtaaaggagaatgttgctaattttttagcaaactagaccagcattattactcaaactaaaaatatcacacctgaaaaatttaatttaggacctaaaatgtctagattagctttctgctttttttatttgaataactcattcagttgtgaatgaattcctctttatttggtgccacagtcaccaaatgacaaggatttgccactttcccaccaaattgtgagtgcttgtaatttaggtctctctaccttaaattcagtataaggaaacgtaattatgattgattttttccaaagatgacaagctgtgttgaaatacattttttcttttgaccaattgacagaatctaataagctttaataatcttccccttttatgtgaaaagttttgagaactgtgaaatgtttaggaacaaactgttgaaatccattggaagggaaaaaagaaagtggtaccagtgttaccagctcaactaaaacctgcaattctgcatttcaactcttcacttcctcagcctacaaatagctcattagatgacattcacgcatgctgggtataggcaaggaaagtaattttcaaagtacatttgcagttctctttttcagagatgattctatgatagtgcctctgaaagttgatgcagcatttttgcctttccaaaaagtatttatcctcactgctttttgcagtacttgtattttcacagatggattatctggggtaattttcttcaaagggagtttgttatacacagtgaaaatgtattatagagtagaatagtaaagctctaggggtttcagaaagctttgatgaacagatgacaaacatctgaaaccccctccgcactgttacccagtgtgtatataatgacttgttatagctcagtgtgcccttgaatccatacagtttcttaaaagacaataaaatcttattaataaagttaatgtaacttctaagttctagaaaatgctgattctgtctgccccattcaattgggggctactaattgatttgttgcttggatttcctgagaatttctctatttgtaggaggggttttttctttttacggtctgttgatgacaattactttatgggtgtgatgcaccgatggtagccaaggaatctgttggggaagttcggaaagaaaccttttctttcttttattcagtttaaagtaaactttatcctggatgtttagaatcaacattaagagttatattatggtgttcagagattaagctgacttggatacaatattttcttttgaaaatgaattttctttttcatttgtgatttttaaaaaatgttgcaccagttatgcttcatgcatcgttacatcttcatcaggttaatgtaatgtctagttcctttgcaataaatatattgctgcagctttcttgacgtatactgttacttttcgggagagaagcagctcttggttagagtcttttactgcaggggtccctgggtacctgtctgtggcctgttatgaaccaggctgcacagcagtggtgggcatgcgagcaagcatgactgcctgagctctgactcctgtcagatcagccacggcattagattctcataggagcgcaaaccctattgtgaactgtgcatgcaggagatctatgttttgtgttccttaagagaatcgaatgcctgatgatctgtcactgtctcccatcatccccagatgggatcgtctagttgcaggaaaacagtcagggttcccactaattctacattatggtgagtatataataataatatggtgaggatataataataataatagaaataaagtgcacaataaatgtgcttgaatcattgaatcatcctgaaaccatcccctgccaccagtctgtggaaagattgtcttccatgaaaccagtccctggtgtcaagaaggttgaaga

SEQ ID NO: 338960 - DNA, 4402 bp, Homo sapiens
cagagctgcttttgccatatctcagcaaccaactactttttcaagatgtcgatttttagtacaagataaagggtcaatggtttgttattgatggagaagggagaaaaaggacctcatctacctgcagcaatgagtccctaagtgtgggaggaacctctgtcactcctcgccggatctcctggcggcagcgcattttcctcagggttgcttctcccatgaacaaatctccctcagcaatgcaacagcaagatggattggacaggaacgagctgctgccactgtcccccctctctccaaccatggaggaggaaccgctggttatattcctgtctggggaggatgacccagaaaagattgaagaaagaaagaaatcaaaagaactgaggagcttgtggagaaaagctatacaccaacaaatcttgttacttcgaatggaaaaagaaaaccagaaacttgaaggagcaagcagagatgaactccagtccagaaaagttaaattagactatgaagaagttggtgcatgtcagaaagaggtcttaataacttgggataagaagttgttaaactgcagagctaaaatcagatgtgatatggaagatattcatactcttcttaaagaaggagttcccaaaagtcgacgaggagaaatttggcagtttctggctttacagtaccgactcagacacagattgcctaataaacaacagcctcctgacatatcctataaggaacttttgaagcagctcactgctcagcagcatgcgattctcgtggatttaggaaggacgtttcctactcacccttacttttcagtacagcttgggccaggacagctgtcactgtttaacctcctgaaagcctattctttgctggacaaagaagtgggatactgtcaggggatcagctttgtggctggagtcctgcttctgcacatgagtgaagagcaagcctttgaaatgctgaaattcctcatgtatgacctcggcttccgcaagcagtacagacctgacatgatgtcgctgcagattcaaatgtaccagctgtccaggctccttcatgactatcacagagatctctacaatcaccttgaagaaaatgaaatcagccccagtctttatgctgccccctggttcctcacattgtttgcctctcagttttcattaggatttgtagccagagtttttgatattatttttcttcagggaactgaagttatattcaaggttgcactcagcctactgagcagccaagagacacttataatggaatgtgagagctttgaaaatattgttgagtttcttaaaaacacgctacctgatatgaatacctctgaaatggaaaaaattattacccaggtttttgagatggatatttctaagcagttgcatgcctatgaggtggaatatcatgtgctacaggatgagcttcaggaatcttcatattcctgtgaggatagtgaaactttggagaagctggagagggccaatagccaactgaaaagacaaaacatggacctcctagaaaaattacaggtagctcatactaaaatccaggccttggaatcaaacctggaaaatcttttgacgagagagaccaaaatgaagtctttaatccggaccctggaacaagaaaaaatggcttatcaaaagacagtggagcaactccggaagctgctgcccgcggatgctctagtcaattgtgacctgttgctgagagacctaaactgcaaccctaacaacaaagccaagataggaaataagccataattgaagaggcacggcctcagcagaaagtgctccttagaatactacagagaggaagagcctgcatgtcgctggcccaaggctggaccctgaagctgatggaaccacctaatactggtgctgagctcctagtcacagcaggtggacctcgtgctcatcagagcatgccaatcctaagccattggacatatgtagactggtttttgttgttgctatgtacatataaatatatatataaaatgaacatagttcatgctttcagataaaatgagtagatgtatatttagattaatttttttagtcagaacttcatgaaatccacaccaaaggaaaggtaaactgaaatttcccttggacatatgtgaaatctttttgtctttatagtgaaacaaagccagagcatctttgtatattgcaatatacttgaaaaaaatgaatgtatttttttctccaaagaacagcatgtttcactcaatggtgaaaaggtggaaacatttatgtaactttatgtgtatctgtcttgatatctactgacattgtctatatgaggaaaatgattactggtcatgctcctgtgagttttttgggaaggtagggtcatttctccctgcctgctttgtgccaactagcatgttgcatctacatgcattatgagtctggttaggcattactttaaacatacataaagagacagtaggacattgtggctgagtctacccagctcaaggtaaaggagaatgttgctaattttttagcaaactagaccagcattattactcaaactaaaaatatcacacctgaaaaatttaatttaggacctaaaatgtctagattagctttctgctttttttatttgaataactcattcagttgtgaatgaattcctctttatttggtgccacagtcaccaaatgacaaggatttgccactttcccaccaaattgtgagtgcttgtaatttaggtctctctaccttaaattcagtataaggaaacgtaattatgattgattttttccaaagatgacaagctgtgttgaaatacattttttcttttgaccaattgacagaatctaataagctttaataatcttccccttttatgtgaaaagttttgagaactgtgaaatgtttaggaacaaactgttgaaatccattggaagggaaaaaagaaagtggtaccagtgttaccagctcaactaaaacctgcaattctgcatttcaactcttcacttcctcagcctacaaatagctcattagatgacattcacgcatgctgggtataggcaaggaaagtaattttcaaagtacatttgcagttctctttttcagagatgattctatgatagtgcctctgaaagttgatgcagcatttttgcctttccaaaaagtatttatcctcactgctttttgcagtacttgtattttcacagatggattatctggggtaattttcttcaaagggagtttgttatacacagtgaaaatgtattatagagtagaatagtaaagctctaggggtttcagaaagctttgatgaacagatgacaaacatctgaaaccccctccgcactgttacccagtgtgtatataatgacttgttatagctcagtgtgcccttgaatccatacagtttcttaaaagacaataaaatcttattaataaagttaatgtaacttctaagttctagaaaatgctgattctgtctgccccattcaattgggggctactaattgatttgttgcttggatttcctgagaatttctctatttgtaggaggggttttttctttttacggtctgttgatgacaattactttatgggtgtgatgcaccgatggtagccaaggaatctgttggggaagttcggaaagaaaccttttctttcttttattcagtttaaagtaaactttatcctggatgtttagaatcaacattaagagttatattatggtgttcagagattaagctgacttggatacaatattttcttttgaaaatgaattttctttttcatttgtgatttttaaaaaatgttgcaccagttatgcttcatgcatcgttacatcttcatcaggttaatgtaatgtctagttcctttgcaataaatatattgctgcagctttcttgacgtatactgttacttttcgggagagaagcagctcttggttagagtcttttactgcaggggtccctgggtacctgtctgtggcctgttatgaaccaggctgcacagcagtggtgggcatgcgagcaagcatgactgcctgagctctgactcctgtcagatcagccacggcattagattctcataggagcgcaaaccctattgtgaactgtgcatgcaggagatctatgttttgtgttccttaagagaatcgaatgcctgatgatctgtcactgtctcccatcatccccagatgggatcgtctagttgcaggaaaacagtcagggttcccactaattctacattatggtgagtatataataataatatggtgaggatataataataataatagaaataaagtgcacaataaatgtgcttgaatcattgaatcatcctgaaaccatcccctgccaccagtctgtggaaagattgtcttccatgaaaccagtccctggtgtcaagaaggttgaaga

SEQ ID NO: 338961 - DNA, 492 bp, Homo sapiens
gactgagccccctaccctaagattgcgtcattgttccctaaatatctgtgtctatattttcattaagattaaaaaaaatggcagtagtagtgataagatctcatctagacagtattttctcaggggcagtagggtggaaaagagacttgtgtcaaaatggcctggagaacttatttaaaatatagtctttcagacctcatttcatgtgttaaaagtatctgatgatgaggtccaggagtctgcatttttaataaactgctagttatatgttatgccaagtatgagaaccctggtttaaggtctttagaagtattatcaacatagatttctttgaaaaacctaagatgcctgtagaagaaagacgaacaagaaaatgtattggcacttcaggtcgttgagcttttttttctttttaaatttttctttgaagtgatttccatgtcttcatttagtgaaggattctaattacaaagactttctcattttgtaccc

SEQ ID NO: 338962 - DNA, 400 bp, Homo sapiens
gttcacgccattctcctgcctcagattcccgagtagctgggactacaggcacccaccaccacgcccggctaattttttgtatttttagtagagatggggtttcaccgtgttagccaggatggtctcgatctcctgacctcgtgatccgcccgcctcggcctcccaaagtgctgggattacaggcgtgagccactgagctgggcctctaagctacttctttaagcttttctcgttttccctgagtatctcccatgaatacattttatacatgttaataaagttctgtttgtttttccttgttaatctgtctcctgttaccaaggtcccagctaagaactcagaaaggtagagggaaaattgttttttccttccttacactgggaaaccaagtcaagccagt

SEQ ID NO: 338963 - DNA, 173 bp, Homo sapiens
ggtgatggattgcagctggagtatgagatggtcctcaccaatggcaagtccttctggacacgacacttctccgctgatgagtttgggatcctggagacagatgtgaccttcctcctcatcttcatcctcatcttcttcctctcttgttactttggatgtgagtctggcacatg

SEQ ID NO: 338964 - DNA, 306 bp, Homo sapiens
atcagaatctacatcccacaggaagccagtaccttccccaccagccacccaaaccgtttctccatgatcactctcagaggaagtcctacatctcaggcacacaagatcagtcagtctacccaggaaggggtgggccacgctcacagacaagcactgccccacaggggccttcaggggctcctgccatattcctgatcacggcagagggtgtctcagggggtgctggtctacccttcacactgctctccacttgcttatcttcctaacagaaagaacaggactatagctcaaatagcctctgactgg

SEQ ID NO: 338965 - DNA, 261 bp, Homo sapiens
tgaagcctgggagaaccgtgagacgaccggagcccattgccccatccaggatgctatttccttcaggtctgaggacaaacatagctcagactctgctatttaagagaggaagaagtaaatcaggttttcttctagcaactactctggattcagcacatgttaggctctgattctgcaaagatacctcgaaattgggcagagccattcctaggtagagaaccacttacagctgttttgtacagaggctgcagttccctatcc

SEQ ID NO: 338966 - DNA, 566 bp, Homo sapiens
gtgtccttatagtagaatgatttataatcctttgggtatataccaagtaatgggattgctgggtcaaatggtatttctgctttacatattttaacttactcgatgatatgtatatgatcaacactcaaatgggcccatgatgagatgcttagggggcattcatgaccaactcaggttgccaggcctctccactgggatttctgattgagtagctctaggtggggacccaggaatctgtgtttttcacaagtactcaggtaacccttatatacaggtgggtttgagaaacactgagtcatgatttctctgttcttgtttatgtttgctgagcaggtacagtgacatttgtgtctgtttgcatgcatgtggccattcgcttgaatttcgccttttctagcccgagtctccttacctgtacaatgggaattgtaataggatctacttcctgccatgtgtgaacattcagtgagatgaagtactcagagcatggtgtctgggatgtggtaagtggtcagtgttaccattgttattggttatggctgttatttagggacacgcaaagtata

SEQ ID NO: 338967 - DNA, 1017 bp, Homo sapiens
ggcgcctgtgcacacagacaacaatgggtcacagttacagaacctgggctcaggtgtgccctctctcgtttctcagctgggggccaacacatttgtaactgtgtttccatgaaaaaacgcatcctaggttccaaacaactaatatactgatgaacctttagaatgaactggacatttttccttgagagaacagctttgaaatgaggaccctgtggtccaacccttctcaatcatggctcccccaaaataactccaatgtgaactgttcaggggtagggggagggggagagcaacagaataacctaatcttaagaattcctctctaatccccagctcagaaagcgtcttttacagtcatcccctctgcagtgtcccagactaagcaaacaaacaaaaaaacatagagccatccccaaagaccaatatgcttgcaatccaagatgggcaagcgacccatctccagtccacatttcagggagacaacagaaaatttttctgattcttcacaaatgggaagaatcaaaagtgaactgttaccagaagcagaaggctgactgcacagccactgtgatgagtttccaagccttgcacaaatacgccgagaacgctgtggctgtacgaactgccttcaatcagacccgacctggccatgtgttatcaaggtcactccttcaggtatgactactccaagcctcaaatctctgtaaaacccaaggagatccacaagatcatctgctccagcgactcccttccccatttcacagattcctcagagaggggcagggatcaacgctaggcatttagttggagggctggatccagcccccaaatctttatccttggctaggaaaacctctgctacccatttcctcatgaccagaggaggcaggagggcagtgtgaaggaattggcttttgccctgctctgcctgtcctggcttcaagaggctggtgccgtccaaaccgctccgttatccaggctttttgaccacgctatgctccaaccccgacacggata

SEQ ID NO: 338968 - DNA, 291 bp, Homo sapiens
ggacacaaatgagttgtagatttggtctttttacataatcccgtatttctcaaagattttcttcattcctttttctttttttttttattcttgtctgactgtcttatttcagaaagccagtctttaagcgctgagatattttcctctgcttagcctattctactgttaatacttgcgattgcattatgaaattcctgtagtatgtttttcagcaatatcaggttgggttatgttcttttctatactggctattttgtctgtcagctcctgtattattttattgtgagtctt

SEQ ID NO: 338969 - DNA, 377 bp, Homo sapiens
cggagggagctggagccagagccagatctcaggaaactggggtcattgcatagaggctgccagacagtctgcagagctcagcggcctgggttcaaaccttctcgcacactgccactgtcggttactttggctttctagagccagattccttggccatgaaatgggtactgcttacttcccaggttattttgagaatgaagtgagatgaagtcaacagtagatgtatctgtccgttgtccctgccctgctgtgggatgacagagtgattttggacaagaccaaggcctcgctgggcatcactgtcttcttcagaaagcaatggggctaggccaggtgcacagtggctcacgcctctaatccctgcactttgggaggcc

SEQ ID NO: 338970 - DNA, 233 bp, Homo sapiens
catttgaccctcgtgacatctgttctttcttcttcttccttctcaaaaatatttcttggattccttgacgacattttctcctgttgtctttctctctctctgcattcattatcttactttatttctgccgatcttaaacgagggtgatatccacatcctttcctatctgctactgcttactccacattctctccatggttcatcacattccctccatggttcatcacattcct

SEQ ID NO: 338971 - DNA, 348 bp, Homo sapiens
caaacatcctattaaacaaaagcactcaccaatggactcaaaatgtaaaatctaacctgtggtatatctgggagatatcacatccttctcatggctatgtgaaggctagatttgaaagagtaagtatgcaaatagaagaccagtcaaaaagataccagtttttcacaagaaaggcaatggagtcctgacctgagatagagagtacattcaaagaatttgttattactgagtatggtatggagagagagggagagtgactcttaggtttcttacgggtgcaccatcaactgaggcagatcataccaggggaatattgatgcaggattttttgctgcttagttcgctgaa

SEQ ID NO: 338972 - DNA, 181 bp, Homo sapiens
taaaaatatgactgagtatatgtatatattccccccacattccaaagataaacactgttaagcatgtaaagcacattttactgtatatatatgggtggcatatgtgtgtgagtgtgtgtgtgtatacatatatacacatacacttctagacatttatatacatgtgttgtgtgtatatgtt

SEQ ID NO: 338973 - DNA, 603 bp, Homo sapiens
gagctcgccggtaaagagggtaaagttgaagatacaggagaaggaaataaaccatcaagagcataaggttaacagcatctgacaaagtccaagaggaggagatccaggggtcagataagtggataaacgtaaacagagatacattctgattacttcagacagatacataacatgggcatgctaggtctgctagttaattctaattgtagaaataaatagttacaggtagttttccctttattgtttcccaaatcaaacttataggtaaatagattttaaaatagaagctttggtgattgaggccaagtggggcagttaaaatttggtcgaaaacccagtcttactgtcttgaagaactagacgacatatcctgggacaaccatagcagttggaaagtgaggctgtggggaaaataccagaaagggagagtcacgaaaacagagccaacagtttgtatacaaactctgtccaaatccttcattgacttctgaagtccacaagtactcatgctccaaagagctgaattatggacaaaataattgaacaggtatttcagttgcagggagggtttggagtctgaggtgagccaagttaactgcttgc

SEQ ID NO: 338974 - DNA, 583 bp, Homo sapiens
  misc_feature (550)..(550): n is a, c, g, or t
ggacactccccgaccctcgccactgaggcaagagggaatatgagttcaggggaaggcattttggaaaactgatctgacttttggtttggtgccaaaaagggtttatgagccattatgggcacaggcttgaaagcttcaaatagctgcgagttagcaaaggtcatggccttggcttctaggaaaatcgtggagccctggaacaggaaatccagggatggtgtcaccttgaagtgtacctgacaataatttttgagttgaaatacaggggcttgagatattcatcataattacatggctcagtaatacaaaccatctcctgatttggaatttgcagatgtctgttttataaaatcaaagtcactgattaatctagaattggcattgcgtcttacaatcacagtagcattttgaattgggcatatgccaatgcattaataaataagtaaaaggtagaattaatagcatcaaactgccgggtgcagtggctcatgcctgtaatcccagcactttgtgagcccaaaagcttaggggaagctgggaacaggagttnttcttttttcttttttttcctttgagacagtct

SEQ ID NO: 338975 - DNA, 242 bp, Homo sapiens
tataatccagtatttgccaaaagcttgtgtaaggcaactagaatttagacacatggtataaggaagggttttaactactattctttaggctttctctgctgtgcctcgcattaaataatatatcctcagaaagcaatatccttgggtcaaattatttttccccactacaaaaaataaatatttaacagttgatgttgtcatcttgcttacagtagagcagcaacataaggaaggcagtccag

SEQ ID NO: 338976 - DNA, 583 bp, Homo sapiens
  misc_feature (19)..(20): n is a, c, g, or t
gtcatcagctcggtaccanntcgacggagactctccttcccttagctttctgaagctaggggaaggagaggtgtctttttgttgtgtctttgggtttgaaatagtattcttcatcctaggaaaaagggcttttagactataattgagacttgcattaaatagctgcaaaattcttgcctgagaaacgtttaaatgatgtctttaatctgaccaaattgaattgaatatttctattattggaaaaagctacgtattaatttatttttaaatagccattgctttcagatcttatctttgtttattaagtataaaaagaggaaaggaaacttttacctaaaatggaggtatttgatattcctccaggaaatgacacaggattgggcaccctttggggtttaagtgactcatagatattggtactgaaaacaaaacaaaacaaaagatcagttagaatctagctaatgatcaattatagcacagaatagaagtatttccagaaaaatgaactcatttcttaatagctatgtaggggtgaaatcacaggatttctgagatttgctttaaaataattcatggaagagag

SEQ ID NO: 338977 - DNA, 133 bp, Homo sapiens
ggggtagatgtaaaagtttacttaggcatggaagacattagaccttttaaaagcaaagtgggctatttcaatctaagaagttagttaatgtaccttagctttctgaagctaggggaaggagaggtgtcttttt

SEQ ID NO: 338978 - DNA, 181 bp, Homo sapiens
agatgcgtttcaccatgttgtccaggctggtctcaattcctgggctagagtaatttgcccatcttggactcccaaagtgctgggattacaggcatgagccactgcacccagcctgaattcttagcaataatctttgaaatctgcaaatagacatgacttacttggcatcatcaaacaagat

SEQ ID NO: 338979 - DNA, 191 bp, Homo sapiens
tcttgtgtcaattttagaaatttgtattttttctagaaaaatcagccatttaaaaatttttaaatctttttaaaatttatgtttgtctattatttctagtattgattatgtttaatgacactcaaagttctttttctatatatttttttaaattgaagaaccaccttgtaatttttttatccaatctgcta

SEQ ID NO: 338980 - DNA, 348 bp, Homo sapiens
aggtttgctgcttaagcgtggcgctcagatcggggaccgggtggagggagttggtgggggctttcctttgatttttcaaaaacccttggacagaattccttctttttcggtaacctttccccgcgtgttaactccgcccctcggttgttcgggaagttctcccacacacctagccttccttactgcagttccaacccctgcacagagttcagccgcggttgtttcttggtggaggttggcaaggagctcttaaaaccatagcccttttctggccgcatttgaagtcatctgaaaagaggctttgtgaagctggatctgcttagtgaagtcaacttggcccccttttcc

SEQ ID NO: 338981 - DNA, 332 bp, Homo sapiens
accaaccccaaatttaagcctcaaaacaaaaacactccccagcagcagccaccttggggttctagttattttggagatactgatacgaggttgagatccttgggtgagaggcccacactcctccaacccccatgtctgcttgtcttgtgggggtggggaacgatggaaactcacagagccagatctccccgagtttgagttgcactggctgcctgggtgtgtcctcctgaggtaagtgtccctgcgaagtgcaagtgtgggcagacagatctcaggtgggtggggagggactgagtcaccaaggaggtgatttgcaaaactcaggtcccaga

SEQ ID NO: 338982 - DNA, 151 bp, Homo sapiens
acataaaatggggtaggaaatgtttcttcttttcagtgtctagaagagtttttatagatttccttctgatctttattttctttcttctggttgctttgtattttattagttcttctgtttctagatttttttttttttttttttttttttg

SEQ ID NO: 338983 - DNA, 436 bp, Homo sapiens
agatggacaattgaacttagtcccattgatgaatgtccctgcaggccagatgacgacttagcagtgatcatgccttatgtctgcatttcaagctcctgaccatgcctagtacacaagaggcctccatgaatgtttactggatgagtggatgagcaagggtgtgagagaacaaactactgggggctggtagaataaaccacaccttctctggcacacacggtcaacatagcatcattaatgtgtggttagcctgtaatcatctacatgacaaagcatgactcagtgataacatgcatttcatagttatttcttacatttctctagccttttcctatccacttccactcctgtgaagtgccatgaacatatagtatcatctgggacgatcaaagaggtagacttaatccagatcaggtagttaatgacagaccttgag

SEQ ID NO: 338984 - DNA, 410 bp, Homo sapiens
aaccccttgattcctttactgtaagggaggaacatttgacctatatgagtgaaacggaataccatgataacaggagaatctttctggagggaatatccaaacaaactaagactctcctgctaagctcattgccttttgcggtttagctgtaccttactctcatgttgcagagagaaagttggagaaggaaagtctacattgaccacagaatatcagagcttagaaggaacttggactgtacaaagaaaatgagctttctgagaggcagcatgcagtggtgaagaaaaaaagaatctggagctggattgcttagtttagattgtctttccattgctagtcatatgatcttggacaactgattaatttctcttcatctggagaagatgatggtttactccatgtggtggtgt

SEQ ID NO: 338985 - DNA, 403 bp, Homo sapiens
aaccccttgattcctttactgtaagggaggaacatttgacctatatgagtgaaacggaataccatgataacaggagaatctttctggagggaatatccaaacaaactaagactctcctgctaagctcattgccttttgcggtttagctgtaccttactctcatgttgcagagagaaagttggagaaggaaagtctacattgaccacagaatatcagagcttagaaggaacttggactgtacaaagaaaatgagctttctgagtcgtgcatgtaatccatcagggagccaccattgaggtcttccttgtgggtaaagaggacaattgtgtgtcccatggcatcctctccaaagatctccttcaccctctgtgcagcctgctggtcctgtgaggtatagcggccc

SEQ ID NO: 338986 - DNA, 185 bp, Homo sapiens
taatgtgggatttgaaacactggtggaaataattaagatttcaacagttattcagtttacttaattgtcagccaataattaaaattttatagaacttggggaaatttgactgccgggtgatggattcccatgagtctccttcttcctgaacgtctctgaattttggggggttattaccctcggtt

SEQ ID NO: 338987 - DNA, 600 bp, Homo sapiens
caggacacatatttagtggctgcagggcctgagaaggaacctaagtttggactctctgaaaagctggggtaccagccttggctctgtctcttaccagtaactgggccagtcctcacaatttcctgaaccacagcttccccatctgtaaaatgagagtcatgaccttgaatgattgctataaggagttcaagggcctggcacttcataggaactcagagaatgctagcttttgatattatgttcctatatgatccaaaacactttttgtttttcttaattttttttttttttgagacggagtcttgctctgttgcccaggctggagtgcaatggcatgatcttggattactgcaacctctgccttccaggtgcaagctattttcgtgcctcagcctcccaagtagctgggattacagatgtgcaccaccacacctggctaatttttgtatttttagtagagacagtatttcaccatgttggccgggctggtctcggactcccaacctcaggtgatccgccttccttggcctcccaaagtgcttgggattacaggcgtgagccactgcacctggccttttaaattttaaatgtagagatggg

SEQ ID NO: 338988 - DNA, 591 bp, Homo sapiens
caaacttctagaggatcctcgacggtgaactgccaaactctacctcgtcccagtggtgaactgctaactcagccgcatcccgatggtgaactgccaaactttacctcgtcccgatagtgaactgcctaactctaccgcatcctgatgaactgcttaatggcgttgtccctgggtacacattgggtgcagctcctgcagtcatgggctgctcacagccgtggcccttttggcacaaccattgttccttcttgtcttggaaacgaggacccgagggagaccatccgtccatcctaaaattgggacgtttggttttctgttgttgagttggagttatttgtagagtctagagatcagtctctaggagacgtgtgatctgcagacatttccctccatctctgggttgcatttttctgtccattgatggtgtccttcgatgcatgagaacagcctttgatgtacatgtaggggttggtcaggcagaaggacggtgtgggtggaagcgctgatgcctgaagaagggcaccgtaggcagagagaccgcatggctggcttgcagggctgggcccgcacggagagacagatgtgcacaga

SEQ ID NO: 338989 - DNA, 285 bp, Homo sapiens
catggattaacataaagttaatgctttatttggggtgagcgggggaaggactttttttctctccagcaagtgtaatcactcagtttcatcctcttctgtgatgaattgagaacaatgtagcaaatcctcctcctttacaaaggtttgggcttttgttttctgcctttcctaatttaaagtaacttaaattggcttgaatggaaacttccaggatatactccagggaaataaggccagttagacaaatttgggcttagtgagacaactctgtttaagaaggaaaaa

SEQ ID NO: 338990 - DNA, 246 bp, Homo sapiens
tgtgaaggatgggactggagggtccttaatttgagaaaccctctgctcaataagatggagaaaaggctgctgtgtatttattctgcagagaaaaatctaaactttgatgcttctggaatttaaatcttcattttttgtcataatattttcctctgtcactcaaattcaacagaatctaattagactctttcttcatctggggtctgttaacccctttacaagactagttttttttttttttggagg

SEQ ID NO: 338991 - DNA, 173 bp, Homo sapiens
caggcttagaatattctggcatcagaaggcactcagtaaacatagagaggaagaaaggaagaagatgaaatcaggagtacagattaaagtgttatctttggaagacaggcaagacatcctttgggacagaagggaaggagagaaagctggggaacatgcagataatacaagag

SEQ ID NO: 338992 - DNA, 478 bp, Homo sapiens
tctaggcctggaacatgctgctgctccttctagctgaacacccatctgtgatgtccacccccagttcccctttcctcaaatcaccatctcattttgatctcaatgcccaatgttccttcctcaggggcagcctctttctggcctcactcctcacgcttgcactcacagagcagcgtcacccctatgtgtcacctgagtccaactccaaccactccctcttggagctctaccagagactccaggctagggtgccctgggcaatttcttccatcttcctatctgctcctgtccttggtcccttggggctgggttcgtcagtcctagcctcatgtccccctacccttggtatcccaatctttaccccctactctgtgtagcaccttcattctaaggtcatggtcctttctacatgtctcatttgtatgttttttaaaaaaatctaggctgtgcgtggtgggtcacacctgtaatcccagca

SEQ ID NO: 338993 - DNA, 849 bp, Homo sapiens
  misc_feature (746)..(746): n is a, c, g, or t
  misc_feature (749)..(749): n is a, c, g, or t
  misc_feature (754)..(754): n is a, c, g, or t
  misc_feature (771)..(771): n is a, c, g, or t
  misc_feature (776)..(777): n is a, c, g, or t
  misc_feature (784)..(785): n is a, c, g, or t
  misc_feature (791)..(791): n is a, c, g, or t
  misc_feature (797)..(797): n is a, c, g, or t
  misc_feature (801)..(801): n is a, c, g, or t
  misc_feature (804)..(804): n is a, c, g, or t
  misc_feature (806)..(806): n is a, c, g, or t
gggaatcggacgccccaggtcaggcacccaggtttccagccccagtctaaggtggggtccgagcgcaggcagaacttgccctggccctgggtctagggcgctgggctctgaggctgagagctgggtgggaagtgcctggcggggccggttaggaaccacccgagactcagctaggggtgcatccaccctgctcctcccggcggctccgggaaggggagggagtgtatactgcgtgaaaggggaggtgagaaaggaggaggagaaggctgaaggagagggagggacaggaagagagaccacgtaagaatcatcccctcttacttccttgccctgtgtgcccatcgaaaggggacagtggctgtcaccaacaaatggtagtatgagaaccgtttgtgataatagaaacccagactgtgcttaaatgtgctagactaccatacagccacttgaagagtgaggtggaggccgggcgcggtggttcacgcctgtaatcccagcactttgggaggcggaggttggggatcacctgaggtcaggagtttgagaccagcctgaccaacatggtgaaaaccctctctactgaaaatacaaaaaaattagccgggcatggtggtgggcgcctgtaatcccagttactcggaaggctgaggcaggagaatcgcttgaactcggcaggcagagatgcagtgagctgaacaacagagccagactccgcctcaaaaaaaaaaaaaaaaaaaaaaacccgnggnctttntggggggggaaaagggntttgnntgggccnncagtgntcctgncccnttntntcacggggaattccggccccaagggggcgtaatcgaacccgtc

SEQ ID NO: 338994 - DNA, 490 bp, Homo sapiens
acccagttaaactggaatttcagatgcacagatgcatacttttttagtgtgagaatgtcctgtgtaatttttgggacatactaaaaagctatttcttgtttatctaaaattctatgttaactcgctgtcctgcatcttacctggcaaccttactcccctgcccccagccccaggaacctccccaactctcttccttatacctggagtagctcctcacccccttttccagcttcccagccccttcttcccgtcttctgcagggacgtggctcggggctatgagaacgtgcccattccctgtgtcaacggtgtggatggggagccctgccctgaggattacaagtacatctcagagaactgcgagacgtccaccatgaacatcgatcgcaacatcacccacctgcagtgcaggtgagtagggggcccggggcctccccaaaaggacaccgagagctgccaagtacagttggacaagcttcaaaccagcaaag

SEQ ID NO: 338995 - DNA, 485 bp, Homo sapiens
taaaaataaaataaaaaacatttttaagtatataatttaatggtattaaatactttcatcatgtgcaatcatcagtcaccataactcatcttgtaaaactgaaactctgtacccattaaaacataactctccattccctccaccccctagcccctggcaaggaccactgtcctttctttctctataaatttgagtaagtactttatctaagtgtaatcatacagtatttatccttttgtgactggcttatttcacttagcataatgtcctcaaggttcatctatgttgtaccatgtcagaatttctttcctttcacctgggcagcataccaagaccccatctctaaaagaagtttaaaagaatgtttcaaaggccaggcccagtgactcacgcctgtaatcccgtactttctggggaggatcacttgacaccaggagttcaagaccagcctgggcaacatggcaagacctcttctctaccaaaaa

SEQ ID NO: 338996 - DNA, 420 bp, Homo sapiens
acccagttaaactggaatttcagatgcacagatgcatacttttttagtgtgagaatgtcctgtgtaatttttgggacatactaaaaagctatttcttgtttatctaaaattctatgttaactcgctgtcctgcatcttacctggcaaccttactcccctgcccccagccccaggaacctccccaactctcttccttatacctggagtagctcctcacccccttttccagcttcccagccccttcttcccgtcttctgcagggacgtggctcggggctatgagaacgtgcccattccctgtgtcaacggtgtggatggggagccctgccctgaggatgcaggtgagtagggggcccggggcctccccaaaaggacaccgagagctgccaagtacagttggacaagcttcaaaccagcaaag

SEQ ID NO: 338997 - DNA, 4140 bp, Homo sapiens
  misc_feature (3967)..(3967): n is a, c, g, or t
  misc_feature (3972)..(3972): n is a, c, g, or t
  misc_feature (3974)..(3974): n is a, c, g, or t
aagcggcgatggcggcggcggcgggagctgcagcggcggcggccgccgagggggaggcccccgctgagatgggggcgctgctgctggagaaggaaaccagaggagccaccgagagagttcatggctctttgggggacacccctcgtagtgaagaaaccctgcccaaggccaaccccgactccctggagcctgctggcccctcatctccagcctctgtcactgtcactgttggtgatgagggggctgacacccctgtaggggctacaccactcattggggatgaatctgagaatcttgagggagatggggacctccgtgggggccggatcctgctgggccatgccacaaagtcattcccctcttcccccagcaaggggggttcctgtcctagccgggccaagatgtcaatgacaggggcgggaaaatcacctccatctgtccagagtttggctatgaggctactgagtatgccaggagcccagggagctgcagcagcagggtctgaaccccctccagccaccacgagcccagagggacagcccaaggtccaccgagcccgcaaaaccatgtccaaaccaggaaatggacagcccccggtccctgagaagcggccccctgaaatacagcatttccgcatgagtgatgatgtccactcactgggaaaggtgacctcagatctggccaaaaggaggaagctgaactcaggaggtggcctgtcggaggagttaggttctgcccggcgttcaggagaagtgaccctgacgaaaggggaccccgggtccctggaggagtgggagacggtggtgggtgatgacttcagtctctactatgattcctactctgtggatgagcgcgtggactccgacagcaagtctgaagttgaagctctaactgaacaactaagtgaagaggaggaggaggaagaggaggaagaagaagaagaggaagaggaggaggaagaggaagaagaagaggaagatgaggagtcagggaatcagtcagataggagtggttccagtggccggcgcaaggccaagaagaaatggcgaaaagacagcccatgggtgaagccgtctcggaaacggcgcaagcgggagcctccgcgggccaaggagccacgaggagtgaatggtgtgggctcctcaggccccagtgagtacatggaggtccctctggggtccctggagctgcccagcgaggggaccctctcccccaaccacgctggggtgtccaatgacacatcttcgctggagacagagcgagggtttgaggagttgcccctgtgcagctgccgcatggaggcacccaagattgaccgcatcagcgagagggcggggcacaagtgcatggccactgagagtgtggacggagagctgtcaggctgcaatgccgccatcctcaagcgggagaccatgaggccatccagccgtgtggccctgatggtgctctgtgagacccaccgcgcccgcatggtcaaacaccactgctgcccgggctgcggctacttctgcacggcgggcaccttcctggagtgccaccctgacttccgtgtggcccaccgcttccacaaggcctgtgtgtctcagctgaatgggatggtcttctgtccccactgtggggaggatgcttctgaagctcaagaggtgaccatcccccggggtgacggggtgaccccaccggccggcactgcagctcctgcacccccacccctgtcccaggatgtccccgggagagcagacacttctcagcccagtgcccggatgcgagggcatggggaaccccggcgcccgccctgcgatcccctggctgacaccattgacagctcagggccctccctgaccctgcccaatgggggctgcctttcagccgtggggctgccactggggccaggccgggaggccctggaaaaggccctggtcatccaggagtcagagaggcggaagaagctccgtttccaccctcggcagttgtacctgtccgtgaagcagggcgagctgcagaaggtgatcctgatgctgttggacaacctggaccccaacttccagagcgaccagcagagcaagcgcacgcccctgcatgcagccgcccagaagggctccgtggagatctgccatgtgctgctgcaggctggagccaacataaatgcagtggacaaacagcagcggacgccactgatggaggccgtggtgaacaaccacctggaggtagcccgttacatggtgcagcgtggtggctgtgtctatagcaaggaggaggacggttccacctgcctccaccacgcagccaaaatcgggaacttggagatggtcagcctgctgctgagcacaggacaggtggacgtcaacgcccaggacagtggggggtggacgcccatcatctgggctgcagagcacaagcacatcgaggtgatccgcatgctactgacgcggggcgccgacgtcaccctcactgacaacgaggagaacatctgcctgcactgggcctccttcacgggcagcgccgccatcgccgaagtccttctgaatgcgcgctgtgacctccatgctgtcaactaccatggggacacccccctgcacatcgcagctcgggagagctaccatgactgcgtgctgttattcctgtcacgtggggccaaccctgagctgcggaacaaagagggggacacagcatgggacctgactcccgagcgctccgacgtgtggtttgcgcttcaactcaaccgcaagctccgacttggggtgggaaatcgggccatccgcacagagaagatcatctgccgggacgtggctcggggctatgagaacgtgcccattccctgtgtcaacggtgtggatggggagccctgccctgaggattacaagtacatctcagagaactgcgagacgtccaccatgaacatcgatcgcaacatcacccacctgcagcactgcacgtgtgtggacgactgctctagctccaactgcctgtgcggccagctcagcatccggtgctggtatgacaaggatgggcgattgctccaggaatttaacaagattgagcctccgctgattttcgagtgtaaccaggcgtgctcatgctggagaaactgcaagaaccgggtcgtacagagtggcatcaaggtgcggctacagctctaccgaacagccaagatgggctggggggtccgcgccctgcagaccatcccacaggggaccttcatctgcgagtatgtcggggagctgatctctgatgctgaggctgatgtgagagaggatgattcttacctcttcgacttagacaacaaggatggagaggtgtactgcatagatgcccgttactatggcaacatcagccgcttcatcaaccacctgtgtgaccccaacatcattcccgtccgggtcttcatgctgcaccaagacctgcgatttccacgcatcgccttcttcagttcccgagacatccggactggggaggagctagggtttgactatggcgaccgcttctgggacatcaaaagcaaatatttcacctgccaatgtggctctgagaagtgcaagcactcagccgaagccattgccctggagcagagccgtctggcccgcctggacccacaccctgagctgctgcccgagctcggctccctgccccctgtcaacacatgagaacggaccacaccctctctccccagcatggatggccacagctcagccgcctcctctgccaccagctgctcgcagcccatgcctgggggtgctgccatcttctctccccaccaccctttcacacattcctgaccagagatcccagccaggccctggaggtctgacagcccctccctcccagagctggttcctccctgggagggcaacttcagggctggccaccccccgtgttccccatcctcagttgaagtttgatgaattgaagtcgggcctctatgccaactggttccttttgttctcaataaatgttgggtttgctcaacaanacacnanaacaaaaaaaggggggggcttaattacccccaaggcccagttcgtacccttttgtcaagggccctagggcggttaaaggagaggggcgtaaacaggggaaagtcggtttggagcccctggggactgcaccccaagtacggaaagtagaaacccgcgatgtgaaaag

SEQ ID NO: 338998 - DNA, 3856 bp, Homo sapiens
aagcggcgatggcggcggcggcgggagctgcagcggcggcggccgccgagggggaggcccccgctgagatgggggcgctgctgctggagaaggaaaccagaggagccaccgagagagttcatggctctttgggggacacccctcgtagtgaagaaaccctgcccaaggccaaccccgactccctggagcctgctggcccctcatctccagcctctgtcactgtcactgttggtgatgagggggctgacacccctgtaggggctacaccactcattggggatgaatctgagaatcttgagggagatggggacctccgtgggggccggatcctgctgggccatgccacaaagtcattcccctcttcccccagcaaggggggttcctgtcctagccgggccaagatgtcaatgacaggggcgggaaaatcacctccatctgtccagagtttggctatgaggctactgagtatgccaggagcccagggagctgcagcagcagggtctgaaccccctccagccaccacgagcccagagggacagcccaaggtccaccgagcccgcaaaaccatgtccaaaccaggaaatggacagcccccggtccctgagaagcggccccctgaaatacagcatttccgcatgagtgatgatgtccactcactgggaaaggtgacctcagatctggccaaaaggaggaagctgaactcaggaggtggcctgtcggaggagttaggttctgcccggcgttcaggagaagtgaccctgacgaaaggggaccccgggtccctggaggagtgggagacggtggtgggtgatgacttcagtctctactatgattcctactctgtggatgagcgcgtggactccgacagcaagtctgaagttgaagctctaactgaacaactaagtgaagaggaggaggaggaagaggaggaagaagaagaagaggaagaggaggaggaagaggaagaagaagaggaagatgaggagtcagggaatcagtcagataggagtggttccagtggccggcgcaaggccaagaagaaatggcgaaaagacagcccatgggtgaagccgtctcggaaacggcgcaagcgggagcctccgcgggccaaggagccacgaggggtgtccaatgacacatcttcgctggagacagagcgagggtttgaggagttgcccctgtgcagctgccgcatggaggcacccaagattgaccgcatcagcgagagggcggggcacaagtgcatggccactgagagtgtggacggagagctgtcaggctgcaatgccgccatcctcaagcgggagaccatgaggccatccagccgtgtggccctgatggtgctctgtgagacccaccgcgcccgcatggtcaaacaccactgctgcccgggctgcggctacttctgcacggcgggcaccttcctggagtgccaccctgacttccgtgtggcccaccgcttccacaaggcctgtgtgtctcagctgaatgggatggtcttctgtccccactgtggggaggatgcttctgaagctcaagaggtgaccatcccccggggtgacggggtgaccccaccggccggcactgcagctcctgcacccccacccctgtcccaggatgtccccgggagagcagacacttctcagcccagtgcccggatgcgagggcatggggaaccccggcgcccgccctgcgatcccctggctgacaccattgacagctcagggccctccctgaccctgcccaatgggggctgcctttcagccgtggggctgccactggggccaggccgggaggccctggaaaaggccctggtcatccaggagtcagagaggcggaagaagctccgtttccaccctcggcagttgtacctgtccgtgaagcagggcgagctgcagaaggtgatcctgatgctgttggacaacctggaccccaacttccagagcgaccagcagagcaagcgcacgcccctgcatgcagccgcccagaagggctccgtggagatctgccatgtgctgctgcaggctggagccaacataaatgcagtggacaaacagcagcggacgccactgatggaggccgtggtgaacaaccacctggaggtagcccgttacatggtgcagcgtggtggctgtgtctatagcaaggaggaggacggttccacctgcctccaccacgcagccaaaatcgggaacttggagatggtcagcctgctgctgagcacaggacaggtggacgtcaacgcccaggacagtggggggtggacgcccatcatctgggctgcagagcacaagcacatcgaggtgatccgcatgctactgacgcggggcgccgacgtcaccctcactgacaacgaggagaacatctgcctgcactgggcctccttcacgggcagcgccgccatcgccgaagtccttctgaatgcgcgctgtgacctccatgctgtcaactaccatggggacacccccctgcacatcgcagctcgggagagctaccatgactgcgtgctgttattcctgtcacgtggggccaaccctgagctgcggaacaaagagggggacacagcatgggacctgactcccgagcgctccgacgtgtggtttgcgcttcaactcaaccgcaagctccgacttggggtgggaaatcgggccatccgcacagagaagatcatctgccgggacgtggctcggggctatgagaacgtgcccattccctgtgtcaacggtgtggatggggagccctgccctgaggattacaagtacatctcagagaactgcgagacgtccaccatgaacatcgatcgcaacatcacccacctgcagcactgcacgtgtgtggacgactgctctagctccaactgcctgtgcggccagctcagcatccggtgctggtatgacaaggatgggcgattgctccaggaatttaacaagattgagcctccgctgattttcgagtgtaaccaggcgtgctcatgctggagaaactgcaagaaccgggtcgtacagagtggcatcaaggtgcggctacagctctaccgaacagccaagatgggctggggggtccgcgccctgcagaccatcccacaggggaccttcatctgcgagtatgtcggggagctgatctctgatgctgaggctgatgtgagagaggatgattcttacctcttcgacttagacaacaaggatggagaggtgtactgcatagatgcccgttactatggcaacatcagccgcttcatcaaccacctgtgtgaccccaacatcattcccgtccgggtcttcatgctgcaccaagacctgcgatttccacgcatcgccttcttcagttcccgagacatccggactggggaggagctagggtttgactatggcgaccgcttctgggacatcaaaagcaaatatttcacctgccaatgtggctctgagaagtgcaagcactcagccgaagccattgccctggagcagagccgtctggcccgcctggacccacaccctgagctgctgcccgagctcggctccctgccccctgtcaacacatgagaacggaccacaccctctctccccagcatggatggccacagctcagccgcctcctctgccaccagctgctcgcagcccatgcctgggggtgctgccatcttctctccccaccaccctttcacacattcctgaccagagatcccagccaggccctggaggtctgacagcccctccctcccagagctggttcctccctgggagggcaacttcagggctggccaccccccgtgttccccatcctcagttgaagtttgatgaattgaagtcgggcctctatgccaactggttccttttgttctcaataaatgttgggtttg

SEQ ID NO: 338999 - DNA, 3788 bp, Homo sapiens
aagcggcgatggcggcggcggcgggagctgcagcggcggcggccgccgagggggaggcccccgctgagatgggggcgctgctgctggagaaggaaaccagaggagccaccgagagagttcatggctctttgggggacacccctcgtagtgaagaaaccctgcccaaggccaaccccgactccctggagcctgctggcccctcatctccagcctctgtcactgtcactgttggtgatgagggggctgacacccctgtaggggctacaccactcattggggatgaatctgagaatcttgagggagatggggacctccgtgggggccggatcctgctgggccatgccacaaagtcattcccctcttcccccagcaaggggggttcctgtcctagccgggccaagatgtcaatgacaggggcgggaaaatcacctccatctgtccagagtttggctatgaggctactgagtatgccaggagcccagggagctgcagcagcagggtctgaaccccctccagccaccacgagcccagagggacagcccaaggtccaccgagcccgcaaaaccatgtccaaaccaggaaatggacagcccccggtccctgagaagcggccccctgaaatacagcatttccgcatgagtgatgatgtccactcactgggaaaggtgacctcagatctggccaaaaggaggaagctgaactcaggaggtggcctgtcggaggagttaggttctgcccggcgttcaggagaagtgaccctgacgaaaggggaccccgggtccctggaggagtgggagacggtggtgggtgatgacttcagtctctactatgattcctactctgtggatgagcgcgtggactccgacagcaagtctgaagttgaagctctaactgaacaactaagtgaagaggaggaggaggaagaggaggaagaagaagaagaggaagaggaggaggaagaggaagaagaagaggaagatgaggagtcagggaatcagtcagataggagtggttccagtggccggcgcaaggccaagaagaaatggcgaaaagacagcccatgggtgaagccgtctcggaaacggcgcaagcgggagcctccgcgggccaaggagccacgaggagtgaatggtgtgggctcctcaggccccagtgagtacatggaggtccctctggggtccctggagctgcccagcgaggggaccctctcccccaaccacgctggggtgtccaatgacacatcttcgctggagacagagcgagggtttgaggagttgcccctgtgcagctgccgcatggaggcacccaagattgaccgcatcagcgagagggcggggcacaagtgcatggccactgagagtgtggacggagagctgtcaggctgcaatgccgccatcctcaagcgggagaccatgaggccatccagccgtgtggccctgatggtgctctgtgagacccaccgcgcccgcatggtcaaacaccactgctgcccgggctgcggctacttctgcacggcgggcaccttcctggagtgccaccctgacttccgtgtggcccaccgcttccacaaggcctgtgtgtctcagctgaatgggatggtcttctgtccccactgtggggaggatgcttctgaagctcaagaggtgaccatcccccggggtgacggggtgaccccaccggccggcactgcagctcctgcacccccacccctgtcccaggatgtccccgggagagcagacacttctcagcccagtgcccggatgcgagggcatggggaaccccggcgcccgccctgcgatcccctggctgacaccattgacagctcagggccctccctgaccctgcccaatgggggctgcctttcagccgtggggctgccactggggccaggccgggaggccctggaaaaggccctggtcatccaggagtcagagaggcggaagaagctccgtttccaccctcggcagttgtacctgtccgtgaagcagggcgagctgcagaaggtgatcctgatgctgttggacaacctggaccccaacttccagagcgaccagcagagcaagcgcacgcccctgcatgcagccgcccagaagggctccgtggagatctgccatgtgctgctgcaggctggagccaacataaatgcagtggacaaacagcagcggacgccactgatggaggccgtggtgaacaaccacctggaggtagcccgttacatggtgcagcgtggtggctgtgtctatagcaaggaggaggacggttccacctgcctccaccacgcagccaaaatcgggaacttggagatggtcagcctgctgctgagcacaggacaggtggacgtcaacgcccaggacagtggggggtggacgcccatcatctgggctgcagagcacaagcacatcgaggtgatccgcatgctactgacgcggggcgccgacgtcaccctcactgacaacgaggagaacatctgcctgcactgggcctccttcacgggcagcgccgccatcgccgaagtccttctgaatgcgcgctgtgacctccatgctgtcaactaccatggggacacccccctgcacatcgcagctcgggagagctaccatgactgcgtgctgttattcctgtcacgtggggccaaccctgagctgcggaacaaagagggggacacagcatgggacctgactcccgagcgctccgacgtgtggtttgcgcttcaactcaaccgcaagctccgacttggggtgggaaatcgggccatccgcacagagaagatcatctgccgggacgtggctcggggctatgagaacgtgcccattccctgtgtcaacggtgtggatggggagccctgccctgaggattacaagtacatctcagagaactgcgagacgtccaccatgaacatcgatcgcaacatcacccacctgcagcactgcacgtgtgtggacgactgctctagctccaactgcctgtgcggccagctcagcatccggtgctggtatgacaaggatgggcgattgctccaggaatttaacaagattgagcctccgctgattttcgagtgtaaccaggcgtgctcatgctggagaaactgcaagaaccgggtcgtacagagtggcatcaaggtgcggctacagctctaccgaacagccaagatgggctggggggtccgcgccctgcagaccatcccacaggggaccttcatctgcgagtatgtcggggagctgatctctgatgctgaggctgatgtgagagaggatgattcttacctcttcgacttagacaacaaggatggagaggtgtactgcatagatgcccgttactatggcaacatcagccgcttcatcaaccacctgtgtgaccccaacatcattcccgtccgggtcttcatgctgcaccaagacctgcgatttccacgcatcgccttcttcagttcccgagacatccggactggggaggagctagggtttgactatggcgaccgcttctgggacatcaaaagcaaatatttcacctgccaatgtggctctgagaagtgcaagcactcagccgaagccattgccctggagcagagccgtctggcccgcctggacccacaccctgagctgctgcccgagctcggctccctgccccctgtcaacacatgagaacggaccacaccctctctccccagcatggatggccacagctcagccgcctcctctgccaccagctgctcgcagcccatgcctgggggtgctgccatcttctctccccaccaccctttcttttgttctcaataaatgttgggtttg

SEQ ID NO: 339000 - DNA, 3879 bp, Homo sapiens
aagcggcgatggcggcggcggcgggagctgcagcggcggcggccgccgagggggaggcccccgctgagatgggggcgctgctgctggagaaggaaaccagaggagccaccgagagagttcatggctctttgggggacacccctcgtagtgaagaaaccctgcccaaggccaaccccgactccctggagcctgctggcccctcatctccagcctctgtcactgtcactgttggtgatgagggggctgacacccctgtaggggctacaccactcattggggatgaatctgagaatcttgagggagatggggacctccgtgggggccggatcctgctgggccatgccacaaagtcattcccctcttcccccagcaaggggggttcctgtcctagccgggccaagatgtcaatgacaggggcgggaaaatcacctccatctgtccagagtttggctatgaggctactgagtatgccaggagcccagggagctgcagcagcagggtctgaaccccctccagccaccacgagcccagagggacagcccaaggtccaccgagcccgcaaaaccatgtccaaaccaggaaatggacagcccccggtccctgagaagcggccccctgaaatacagcatttccgcatgagtgatgatgtccactcactgggaaaggtgacctcagatctggccaaaaggaggaagctgaactcaggaggtggcctgtcggaggagttaggttctgcccggcgttcaggagaagtgaccctgacgaaaggggaccccgggtccctggaggagtgggagacggtggtgggtgatgacttcagtctctactatgattcctactctgtggatgagcgcgtggactccgacagcaagtctgaagttgaagctctaactgaacaactaagtgaagaggaggaggaggaagaggaggaagaagaagaagaggaagaggaggaggaagaggaagaagaagaggaagatgaggagtcagggaatcagtcagataggagtggttccagtggccggcgcaaggccaagaagaaatggcgaaaagacagcccatgggtgaagccgtctcggaaacggcgcaagcgggagcctccgcgggccaaggagccacgaggagtgaatggtgtgggctcctcaggccccagtgagtacatggaggtccctctggggtccctggagctgcccagcgaggggaccctctcccccaaccacgctggggtgtccaatgacacatcttcgctggagacagagcgagggtttgaggagttgcccctgtgcagctgccgcatggaggcacccaagattgaccgcatcagcgagagggcggggcacaagtgcatggccactgagagtgtggacggagagctgtcaggctgcaatgccgccatcctcaagcgggagaccatgaggccatccagccgtgtggccctgatggtgctctgtgagacccaccgcgcccgcatggtcaaacaccactgctgcccgggctgcggctacttctgcacggcgggcaccttcctggagtgccaccctgacttccgtgtggcccaccgcttccacaaggcctgtgtgtctcagctgaatgggatggtcttctgtccccactgtggggaggatgcttctgaagctcaagaggtgaccatcccccggggtgacggggtgaccccaccggccggcactgcagctcctgcacccccacccctgtcccaggatgtccccgggagagcagacacttctcagcccagtgcccggatgcgagggcatggggaaccccggcgcccgccctgcgatcccctggctgacaccattgacagctcagggccctccctgaccctgcccaatgggggctgcctttcagccgtggggctgccactggggccaggccgggaggccctggaaaaggccctggtcatccaggagtcagagaggcggaagaagctccgtttccaccctcggcagttgtacctgtccgtgaagcagggcgagctgcagaaggtgatcctgatgctgttggacaacctggaccccaacttccagagcgaccagcagagcaagcgcacgcccctgcatgcagccgcccagaagggctccgtggagatctgccatgtgctgctgcaggctggagccaacataaatgcagtggacaaacagcagcggacgccactgatggaggccgtggtgaacaaccacctggaggtagcccgttacatggtgcagcgtggtggctgtgtctatagcaaggaggaggacggttccacctgcctccaccacgcagccaaaatcgggaacttggagatggtcagcctgctgctgagcacaggacaggtggacgtcaacgcccaggacagtggggggtggacgcccatcatctgggctgcagagcacaagcacatcgaggtgatccgcatgctactgacgcggggcgccgacgtcaccctcactgacaacgaggagaacatctgcctgcactgggcctccttcacgggcagcgccgccatcgccgaagtccttctgaatgcgcgctgtgacctccatgctgtcaactaccatggggacacccccctgcacatcgcagctcgggagagctaccatgactgcgtgctgttattcctgtcacgtggggccaaccctgagctgcggaacaaagagggggacacagcatgggacctgactcccgagcgctccgacgtgtggtttgcgcttcaactcaaccgcaagctccgacttggggtgggaaatcgggccatccgcacagagaagatcatctgccgggacgtggctcggggctatgagaacgtgcccattccctgtgtcaacggtgtggatggggagccctgccctgaggattacaagtacatctcagagaactgcgagacgtccaccatgaacatcgatcgcaacatcacccacctgcagcactgcacgtgtgtggacgactgctctagctccaactgcctgtgcggccagctcagcatccggtgctggtatgacaaggatgggcgattgctccaggaatttaacaagattgagcctccgctgattttcgagtgtaaccaggcgtgctcatgctggagaaactgcaagaaccgggtcgtacagagtggcatcaaggtgcggctacagctctaccgaacagccaagatgggctggggggtccgcgccctgcagaccatcccacaggggaccttcatctgcgagtatgtcggggagctgatctctgatgctgaggctgatgtgagagaggatgattcttacctcttcgacttagacaacaaggatggagaggtgtactgcatagatgcccgttactatggcaacatcagccgcttcatcaaccacctgtgtgaccccaacatcattcccgtccgggtcttcatgctgcaccaagacctgcgatttccacgcatcgccttcttcagttcccgagacatccggactggggaggagctagggtttgactatggcgaccgcttctgggacatcaaaagcaaatatttcacctgccaatgtggctctgagaagtgcaagcactcagccgaagccattgccctggagcagagccgtctggcccgcctggacccacaccctgagctgctgcccgagctcggctccctgccccctgtcaacacatgagaacggaccacaccctctctccccagcatggatggccacagctcagccgcctcctctgccaccagctgctcgcagcccatgcctggggtgttgcattttttccaacaccttaaattctgacagagatcagcagcctgggtaagctccttcaagggtctctgaagggatgtgccccgtccattctgagtgataagggctcacacgctgtcaatggggaaaaaacggtttgggagaaagg

SEQ ID NO: 339001 - DNA, 4043 bp, Homo sapiens
aagcggcgatggcggcggcggcgggagctgcagcggcggcggccgccgagggggaggcccccgctgagatgggggcgctgctgctggagaaggaaaccagaggagccaccgagagagttcatggctctttgggggacacccctcgtagtgaagaaaccctgcccaaggccaaccccgactccctggagcctgctggcccctcatctccagcctctgtcactgtcactgttggtgatgagggggctgacacccctgtaggggctacaccactcattggggatgaatctgagaatcttgagggagatggggacctccgtgggggccggatcctgctgggccatgccacaaagtcattcccctcttcccccagcaaggggggttcctgtcctagccgggccaagatgtcaatgacaggggcgggaaaatcacctccatctgtccagagtttggctatgaggctactgagtatgccaggagcccagggagctgcagcagcagggtctgaaccccctccagccaccacgagcccagagggacagcccaaggtccaccgagcccgcaaaaccatgtccaaaccaggaaatggacagcccccggtccctgagaagcggccccctgaaatacagcatttccgcatgagtgatgatgtccactcactgggaaaggtgacctcagatctggccaaaaggaggaagctgaactcaggaggtggcctgtcggaggagttaggttctgcccggcgttcaggagaagtgaccctgacgaaaggggaccccgggtccctggaggagtgggagacggtggtgggtgatgacttcagtctctactatgattcctactctgtggatgagcgcgtggactccgacagcaagtctgaagttgaagctctaactgaacaactaagtgaagaggaggaggaggaagaggaggaagaagaagaagaggaagaggaggaggaagaggaagaagaagaggaagatgaggagtcagggaatcagtcagataggagtggttccagtggccggcgcaaggccaagaagaaatggcgaaaagacagcccatgggtgaagccgtctcggaaacggcgcaagcgggagcctccgcgggccaaggagccacgaggagtgaatggtgtgggctcctcaggccccagtgagtacatggaggtccctctggggtccctggagctgcccagcgaggggaccctctcccccaaccacgctggggtgtccaatgacacatcttcgctggagacagagcgagggtttgaggagttgcccctgtgcagctgccgcatggaggcacccaagattgaccgcatcagcgagagggcggggcacaagtgcatggccactgagagtgtggacggagagctgtcaggctgcaatgccgccatcctcaagcgggagaccatgaggccatccagccgtgtggccctgatggtgctctgtgagacccaccgcgcccgcatggtcaaacaccactgctgcccgggctgcggctacttctgcacggcgggcaccttcctggagtgccaccctgacttccgtgtggcccaccgcttccacaaggcctgtgtgtctcagctgaatgggatggtcttctgtccccactgtggggaggatgcttctgaagctcaagaggtgaccatcccccggggtgacggggtgaccccaccggccggcactgcagctcctgcacccccacccctgtcccaggatgtccccgggagagcagacacttctcagcccagtgcccggatgcgagggcatggggaaccccggcgcccgccctgcgatcccctggctgacaccattgacagctcagggccctccctgaccctgcccaatgggggctgcctttcagccgtggggctgccactggggccaggccgggaggccctggaaaaggccctggtcatccaggagtcagagaggcggaagaagctccgtttccaccctcggcagttgtacctgtccgtgaagcagggcgagctgcagaaggtgatcctgatgctgttggacaacctggaccccaacttccagagcgaccagcagagcaagcgcacgcccctgcatgcagccgcccagaagggctccgtggagatctgccatgtgctgctgcaggctggagccaacataaatgcagtggacaaacagcagcggacgccactgatggaggccgtggtgaacaaccacctggaggtagcccgttacatggtgcagcgtggtggctgtgtctatagcaaggaggaggacggttccacctgcctccaccacgcagccaaaatcgggaacttggagatggtcagcctgctgctgagcacaggacaggtggacgtcaacgcccaggacagtggggggtggacgcccatcatctgggctgcagagcacaagcacatcgaggtgatccgcatgctactgacgcggggcgccgacgtcaccctcactgacaacgaggagaacatctgcctgcactgggcctccttcacgggcagcgccgccatcgccgaagtccttctgaatgcgcgctgtgacctccatgctgtcaactaccatggggacacccccctgcacatcgcagctcgggagagctaccatgactgcgtgctgtgagcccctgccccgcccttgatgcccctgcccccacttcttgcagcctcagaccctgcattgggcatcctgtcccctcttcaggttattcctgtcacgtggggccaaccctgagctgcggaacaaagagggggacacagcatgggacctgactcccgagcgctccgacgtgtggtttgcgcttcaactcaaccgcaagctccgacttggggtgggaaatcgggccatccgcacagagaagatcatctgccgggacgtggctcggggctatgagaacgtgcccattccctgtgtcaacggtgtggatggggagccctgccctgaggattacaagtacatctcagagaactgcgagacgtccaccatgaacatcgatcgcaacatcacccacctgcagcactgcacgtgtgtggacgactgctctagctccaactgcctgtgcggccagctcagcatccggtgctggtatgacaaggatgggcgattgctccaggaatttaacaagattgagcctccgctgattttcgagtgtaaccaggcgtgctcatgctggagaaactgcaagaaccgggtcgtacagagtggcatcaaggtgcggctacagctctaccgaacagccaagatgggctggggggtccgcgccctgcagaccatcccacaggggaccttcatctgcgagtatgtcggggagctgatctctgatgctgaggctgatgtgagagaggatgattcttacctcttcgacttagacaacaaggatggagaggtgtactgcatagatgcccgttactatggcaacatcagccgcttcatcaaccacctgtgtgaccccaacatcattcccgtccgggtcttcatgctgcaccaagacctgcgatttccacgcatcgccttcttcagttcccgagacatccggactggggaggagctagggtttgactatggcgaccgcttctgggacatcaaaagcaaatatttcacctgccaatgtggctctgagaagtgcaagcactcagccgaagccattgccctggagcagagccgtctggcccgcctggacccacaccctgagctgctgcccgagctcggctccctgccccctgtcaacacatgagaacggaccacaccctctctccccagcatggatggccacagctcagccgcctcctctgccaccagctgctcgcagcccatgcctgggggtgctgccatcttctctccccaccaccctttcacacattcctgaccagagatcccagccaggccctggaggtctgacagcccctccctcccagagctggttcctccctgggagggcaacttcagggctggccaccccccgtgttccccatcctcagttgaagtttgatgaattgaagtcgggcctctatgccaactggttccttttgttctcaataaatgttgggtttg

SEQ ID NO: 339002 - DNA, 3436 bp, Homo sapiens
gcacgggcaccacgggccccgcagagtgttttaaatcggcacgaggcatgtcaaaccaggaaatggaccccccggtccctgagaagcggccccctgaaatacagcatttccgcatgagtgatgatgtccactcactgggaaaggtgacctcagatctggccaaaaggaggaagctgaactcaggaggtggcctgtcggaggagttaggttctgcccggcgttcaggagaagtgaccctgacgaaaggggaccccgggtccctggaggagtgggagacggtggtgggtgatgacttcagtctctactatgattcctactctgtggatgagcgcgtggactccgacagcaagtctgaagttgaagctctaactgaacaactaagtgaagaggaggaggaggaagaggaggaagaagaagaagaggaagaggaggaggaagaggaagaagaagaggaagatgaggagtcagggaatcagtcagataggagtggttccagtggccggcgcaaggccaagaagaaatggcgaaaagacagcccatgggtgaagccgtctcggaaacggcgcaagcgggagcctccgcgggccaaggagccacgaggagtgaatggtgtgggctcctcaggccccagtgagtacatggaggtccctctggggtccctggagctgcccagcgaggggaccctctcccccaaccacgctggggtgtccaatgacacatcttcgctggagacagagcgagggtttgaggagttgcccctgtgcagctgccgcatggaggcacccaagattgaccgcatcagcgagagggcggggcacaagtgcatggccactgagagtgtggacggagagctgtcaggctgcaatgccgccatcctcaagcgggagaccatgaggccatccagccgtgtggccctgatggtgctctgtgagacccaccgcgcccgcatggtcaaacaccactgctgcccgggctgcggctacttctgcacggcgggcaccttcctggagtgccaccctgacttccgtgtggcccaccgcttccacaaggcctgtgtgtctcagctgaatgggatggtcttctgtccccactgtggggaggatgcttctgaagctcaagaggtgaccatcccccggggtgacggggtgaccccaccggccggcactgcagctcctgcacccccacccctgtcccaggatgtccccgggagagcagacacttctcagcccagtgcccggatgcgagggcatggggaaccccggcgcccgccctgcgatcccctggctgacaccattgacagctcagggccctccctgaccctgcccaatgggggctgcctttcagccgtggggctgccactggggccaggccgggaggccctggaaaaggccctggtcatccaggagtcagagaggcggaagaagctccgtttccaccctcggcagttgtacctgtccgtgaagcagggcgagctgcagaaggtgatcctgatgctgttggacaacctggaccccaacttccagagcgaccagcagagcaagcgcacgcccctgcatgcagccgcccagaagggctccgtggagatctgccatgtgctgctgcaggctggagccaacataaatgcagtggacaaacagcagcggacgccactgatggaggccgtggtgaacaaccacctggaggtagcccgttacatggtgcagcgtggtggctgtgtctatagcaaggaggaggacggttccacctgcctccaccacgcagccaaaatcgggaacttggagatggtcagcctgctgctgagcacaggacaggtggacgtcaacgcccaggacagtggggggtggacgcccatcatctgggctgcagagcacaagcacatcgaggtgatccgcatgctactgacgcggggcgccgacgtcaccctcactgacaacgaggagaacatctgcctgcactgggcctccttcacgggcagcgccgccatcgccgaagtccttctgaatgcgcgctgtgacctccatgctgtcaactaccatggggacacccccctgcacatcgcagctcgggagagctaccatgactgcgtgctgttattcctgtcacgtggggccaaccctgagctgcggaacaaagagggggacacagcatgggacctgactcccgagcgctccgacgtgtggtttgcgcttcaactcaaccgcaagctccgacttggggtgggaaatcgggccatccgcacagagaagatcatctgccgggacgtggctcggggctatgagaacgtgcccattccctgtgtcaacggtgtggatggggagccctgccctgaggattacaagtacatctcagagaactgcgagacgtccaccatgaacatcgatcgcaacatcacccacctgcagcactgcacgtgtgtggacgactgctctagctccaactgcctgtgcggccagctcagcatccggtgctggtatgacaaggatgggcgattgctccaggaatttaacaagattgagcctccgctgattttcgagtgtaaccaggcgtgctcatgctggagaaactgcaagaaccgggtcgtacagagtggcatcaaggtgcggctacagctctaccgaacagccaagatgggctggggggtccgcgccctgcagaccatcccacaggggaccttcatctgcgagtatgtcggggagctgatctctgatgctgaggctgatgtgagagaggatgattcttacctcttcgacttagacaacaaggatggagaggtgtactgcatagatgcccgttactatggcaacatcagccgcttcatcaaccacctgtgtgaccccaacatcattcccgtccgggtcttcatgctgcaccaagacctgcgatttccacgcatcgccttcttcagttcccgagacatccggactggggaggagctagggtttgactatggcgaccgcttctgggacatcaaaagcaaatatttcacctgccaatgtggctctgagaagtgcaagcactcagccgaagccattgccctggagcagagccgtctggcccgcctggacccacaccctgagctgctgcccgagctcggctccctgccccctgtcaacacatgagaacggaccacaccctctctccccagcatggatggccacagctcagccgcctcctctgccaccagctgctcgcagcccatgcctgggggtgctgccatcttctctccccaccaccctttcacacattcctgaccagagatcccagccaggccctggaggtctgacagcccctccctcccagagctggttcctccctgggagggcaacttcagggctggccaccccccgtgttccccatcctcagttgaagtttgatgaattgaagtcgggcctctatgccaactggttccttttgttctcaataaatgttgggtttg

SEQ ID NO: 339003 - DNA, 2068 bp, Homo sapiens
cgccattctgcctcagcctccctagtagctgggactacaggcgcctgccaccacgcccagctaattttttctattttttagtagagacagggtttcaccgtgttggccacaatggcctccatctcctgacctcgtgatccgcccgcctcggcctcccaaagtgctgggattacaggcatgagccaccgcgcccgaccctactagtcccattttttagatgaagaaactgcgacccagagacgttaagtgacttacccagggtcccacagcttgtgaatggtggagctgggattcacacacacagccaatcttgaccatttgctgctttggtgagcagggccagctgcccccaccctcactcccttcccacccacaggacagtggggggtggacgcccatcatctgggctgcagagcacaagcacatcgaggtgatccgcatgctactgacgcggggcgccgacgtcaccctcactgacaacgaggagaacatctgcctgcactgggcctccttcacgggcagcgccgccatcgccgaagtccttctgaatgcgcgctgtgacctccatgctgtcaactaccatggggacacccccctgcacatcgcagctcgggagagctaccatgactgcgtgctgtgagcccctgccccgcccttgatgcccctgcccccacttcttgcagcctcagaccctgcattgggcatcctgtcccctcttcaggttattcctgtcacgtggggccaaccctgagctgcggaacaaagagggggacacagcatgggacctgactcccgagcgctccgacgtgtggtttgcgcttcaactcaaccgcaagctccgacttggggtgggaaatcgggccatccgcacagagaagatcatctgccgggacgtggctcggggctatgagaacgtgcccattccctgtgtcaacggtgtggatggggagccctgccctgaggattacaagtacatctcagagaactgcgagacgtccaccatgaacatcgatcgcaacatcacccacctgcagcactgcacgtgtgtggacgactgctctagctccaactgcctgtgcggccagctcagcatccggtgctggtatgacaaggatgggcgattgctccaggaatttaacaagattgagcctccgctgattttcgagtgtaaccaggcgtgctcatgctggagaaactgcaagaaccgggtcgtacagagtggcatcaaggtgcggctacagctctaccgaacagccaagatgggctggggggtccgcgccctgcagaccatcccacaggggaccttcatctgcgagtatgtcggggagctgatctctgatgctgaggctgatgtgagagaggatgattcttacctcttcgacttagacaacaaggatggagaggtgtactgcatagatgcccgttactatggcaacatcagccgcttcatcaaccacctgtgtgaccccaacatcattcccgtccgggtcttcatgctgcaccaagacctgcgatttccacgcatcgccttcttcagttcccgagacatccggactggggaggagctagggtttgactatggcgaccgcttctgggacatcaaaagcaaatatttcacctgccaatgtggctctgagaagtgcaagcactcagccgaagccattgccctggagcagagccgtctggcccgcctggacccacaccctgagctgctgcccgagctcggctccctgccccctgtcaacacatgagaacggaccacaccctctctccccagcatggatggccacagctcagccgcctcctctgccaccagctgctcgcagcccatgcctgggggtgctgccatcttctctccccaccaccctttcacacattcctgaccagagatcccagccaggccctggaggtctgacagcccctccctcccagagctggttcctccctgggagggcaacttcagggctggccaccccccgtgttccccatcctcagttgaagtttgatgaattgaagtcgggcctctatgccaactggttccttttgttctcaataaatgttgggtttg

SEQ ID NO: 339004 - DNA, 1095 bp, Homo sapiens
  misc_feature (33)..(33): n is a, c, g, or t
  misc_feature (68)..(68): n is a, c, g, or t
  misc_feature (75)..(75): n is a, c, g, or t
  misc_feature (77)..(77): n is a, c, g, or t
  misc_feature (84)..(85): n is a, c, g, or t
gcctgagataaagtactttcaaagatgcaaacnccacctgaacttgatgcaactaaccacctgcagantgaactntntgacaanngtctgctccaactgcctgtgcggccagctcagcatccggtgctggtatgacaaggatgggcgattgctccaggaatttaacaagattgagcctccgctgattttcgagtgtaaccaggcgtgctcatgctggagaaactgcaagaaccgggtcgtacagagtggcatcaaggtgcggctacagctctaccgaacagccaagatgggctggggggtccgcgccctgcagaccatcccacaggggaccttcatctgcgagtatgtcggggagctgatctctgatgctgaggctgatgtgagagaggatgattcttacctcttcgacttagacaacaaggatggagaggtgtactgcatagatgcccgttactatggcaacatcagccgcttcatcaaccacctgtgtgaccccaacatcattcccgtccgggtcttcatgctgcaccaagacctgcgatttccacgcatcgccttcttcagttcccgagacatccggactggggaggagctagggtttgactatggcgaccgcttctgggacatcaaaagcaaatatttcacctgccaatgtggctctgagaagtgcaagcactcagccgaagccattgccctggagcagagccgtctggcccgcctggacccacaccctgagctgctgcccgagctcggctccctgccccctgtcaacacatgagaacggaccacaccctctctccccagcatggatggccacagctcagccgcctcctctgccaccagctgctcgcagcccatgcctgggggtgctgccatcttctctccccaccaccctttcacacattcctgaccagagatcccagccaggccctggaggtctgacagcccctccctcccagagctggttcctccctgggagggcaacttcagggctggccaccccccgtgttccccatcctcagttgaagtttgatgaattgaagtcgggcctctatgccaactggttccttttgttctcaataaatgttgggtttg

SEQ ID NO: 339005 - DNA, 2603 bp, Homo sapiens
aagcggcgatggcggcggcggcgggagctgcagcggcggcggccgccgagggggaggcccccgctgagatgggggcgctgctgctggagaaggaaaccagaggagccaccgagagagttcatggctctttgggggacacccctcgtagtgaagaaaccctgcccaaggccaaccccgactccctggagcctgctggcccctcatctccagcctctgtcactgtcactgttggtgatgagggggctgacacccctgtaggggctacaccactcattggggatgaatctgagaatcttgagggagatggggacctccgtgggggccggatcctgctgggccatgccacaaagtcattcccctcttcccccagcaaggggggttcctgtcctagccgggccaagatgtcaatgacaggggcgggaaaatcacctccatctgtccagagtttggctatgaggctactgagtatgccaggagcccagggagctgcagcagcagggtctgaaccccctccagccaccacgagcccagagggacagcccaaggtccaccgagcccgcaaaaccatgtccaaaccaggaaatggacagcccccggtccctgagaagcggccccctgaaatacagcatttccgcatgagtgatgatgtccactcactgggaaaggtgacctcagatctggccaaaaggaggaagctgaactcaggaggtggcctgtcggaggagttaggttctgcccggcgttcaggagaagtgaccctgacgaaaggggaccccgggtccctggaggagtgggagacggtggtgggtgatgacttcagtctctactatgattcctactctgtggatgagcgcgtggactccgacagcaagtctgaagttgaagctctaactgaacaactaagtgaagaggaggaggaggaagaggaggaagaagaagaagaggaagaggaggaggaagaggaagaagaagaggaagatgaggagtcagggaatcagtcagataggagtggttccagtggccggcgcaaggccaagaagaaatggcgaaaagacagcccatgggtgaagccgtctcggaaacggcgcaagcgggagcctccgcgggccaaggagccacgaggagtgaatggtgtgggctcctcaggccccagtgagtacatggaggtccctctggggtccctggagctgcccagcgaggggaccctctcccccaaccacgctggggtgtccaatgacacatcttcgctggagacagagcgagggtttgaggagttgcccctgtgcagctgccgcatggaggcacccaagattgaccgcatcagcgagagggcggggcacaagtgcatggccactgagagtgtggacggagagctgtcaggctgcaatgccgccatcctcaagcgggagaccatgaggccatccagccgtgtggccctgatggtgctctgtgagacccaccgcgcccgcatggtcaaacaccactgctgcccgggctgcggctacttctgcacggcgggcaccttcctggagtgccaccctgacttccgtgtggcccaccgcttccacaaggcctgtgtgtctcagctgaatgggatggtcttctgtccccactgtggggaggatgcttctgaagctcaagaggtgaccatcccccggggtgacggggtgaccccaccggccggcactgcagctcctgcacccccacccctgtcccaggatgtccccgggagagcagacacttctcagcccagtgcccggatgcgagggcatggggaaccccggcgcccgccctgcgatcccctggctgacaccattgacagctcagggccctccctgaccctgcccaatgggggctgcctttcagccgtggggctgccactggggccaggccgggaggccctggaaaaggccctggtcatccaggagtcagagaggcggaagaagctccgtttccaccctcggcagttgtacctgtccgtgaagcagggcgagctgcagaaggtgatcctgatgctgttggacaacctggaccccaacttccagagcgaccagcagagcaagcgcacgcccctgcatgcagccgcccagaagggctccgtggagatctgccatgtgctgctgcaggctggagccaacataaatgcagtggacaaacagcagcggacgccactgatggaggccgtggtgaacaaccacctggaggtagcccgttacatggtgcagcgtggtggctgtgtctatagcaaggaggaggacggttccacctgcctccaccacgcagccaaaatcgggaacttggagatggtcagcctgctgctgagcacaggacaggtggacgtcaacgcccagctgctcgcagcccatgcctgggggtgctgccatcttctctccccaccaccctttcacacattcctgaccagagatcccagccaggccctggaggtctgacagcccctccctcccagagctggttcctccctgggagggcaacttcagggctggccaccccccgtgttccccatcctcagttgaagtttgatgaattgaagtcgggcctctatgccaactggttccttttgttctcaataaatgttgggtttg

SEQ ID NO: 339006 - DNA, 1211 bp, Homo sapiens
aagcggcgatggcggcggcggcgggagctgcagcggcggcggccgccgagggggaggcccccgctgagatgggggcgctgctgctggagaaggaaaccagaggagccaccgagagagttcatggctctttgggggacacccctcgtagtgaagaaaccctgcccaaggccaaccccgactccctggagcctgctggcccctcatctccagcctctgtcactgtcactgttggtgatgagggggctgacacccctgtaggggctacaccactcattggggatgaatctgagaatcttgagggagatggggacctccgtgggggccggatcctgctgggccatgccacaaagtcattcccctcttcccccagcaaggggggttcctgtcctagccgggccaagatgtcaatgacaggggcgggaaaatcacctccatctgtccagagtttggctatgaggctactgagtatgccaggagcccagggagctgcagcagcagggtctgaaccccctccagccaccacgagcccagagggacagcccaaggtccaccgagcccgcaaaaccatgtccaaaccaggaaatggacagcccccggtccctgagaagcggccccctgaaatacagcatttccgcatgagtgatgatgtccactcactgggaaaggtgacctcagatctggccaaaaggaggaagctgaactcaggaggtggcctgtcggaggagttaggttctgcccggcgttcaggagaagtgaccctgacgaaaggggaccccgggtccctggaggagtgggagacggtggtgggtgatgacttcagtctctactatgattcctactctgtggatgagcgcgtggactccgacagcaagtctgaagttgaagctctaactgaacaactaagtgaagaggaggaggaggaagaggaggaagaagaagaagaggaagaggaggaggaagaggaagaagaagaggaagatgaggagtcagggaatcagtcagataggagtggttccagtggccggcgcaaggccaagaagaaatggcgaaaagacagcccatgggtgaagccgtctcggaaacggcgcaagcgggagcctccgcgggccaaggagccacgagagtgaaggtgagggccctcaggcccagggagcatggagtccactggggtcctgagctgccaagaagggacctatcccaaaagcggggtc

SEQ ID NO: 339007 - DNA, 751 bp, Homo sapiens
aagcggcgatggcggcggcggcgggagctgcagcggcggcggccgccgagggggaggcccccgctgagatgggggcgctgctgctggagaaggaaaccagaggagccaccgagagagttcatggctctttgggggacacccctcgtagtgaagaaaccctgcccaaggccaaccccgactccctggagcctgctggcccctcatctccagcctctgtcactgtcactgttggtgatgagggggctgacacccctgtaggggctacaccactcattggggatgaatctgagaatcttgagggagatggggacctccgtgggggccggatcctgctgggccatgccacaaagtcattcccctcttcccccagcaaggggggttcctgtcctagccgggccaagatgtcaatgacaggggcgggaaaatcacctccatctgtccagagtttggctatgaggctactgagtatgccaggagcccagggagctgcagcagcagggtctgaaccccctccagccaccacgagcccagagggacagcccaaggtccaccgagcccgcaaaaccatgtccaaaccaggaaatggacagcataccaagaccccatctctaaaagaagtttaaaagaatgtttcaaaggccaggcccagtgactcacgcctgtaatcccgtactttctggggaggatcacttgacaccaggagttcaagaccagcctgggcaacatggcaagacctcttctctaccaaaaa

SEQ ID NO: 339008 - DNA, 219 bp, Homo sapiens
gaggacccgccaggggtcccagtaggtgaggtgcagagcctccctcagctcctcttttcctccatccaaggggtgtccaatgacacatcttcgctggagacagagcgagggtttgaggagttgcccctgtgcagctgccgcatggaggcacccaagattgaccgcatcagcgagagggcggggcacaagtgcatggccactgagagtgtggacggagag

SEQ ID NO: 339009 - DNA, 221 bp, Homo sapiens
cacacattcctgaccagagatcccagccaggccctggaggtctgacagcccctccctcccagagctggttcctccctgggagggcaacttcagggctggccaccccccgtgttccccatcctcagttgaagtttgatgaattgaagtcgggcctctatgccaactggttccttttgttctcaataaatgttgggtttggtaataaactgcgatttttgtgt

SEQ ID NO: 339010 - DNA, 3958 bp, Homo sapiens
aagcggcgatggcggcggcggcgggagctgcagcggcggcggccgccgagggggaggcccccgctgagatgggggcgctgctgctggagaaggaaaccagaggagccaccgagagagttcatggctctttgggggacacccctcgtagtgaagaaaccctgcccaaggccaaccccgactccctggagcctgctggcccctcatctccagcctctgtcactgtcactgttggtgatgagggggctgacacccctgtaggggctacaccactcattggggatgaatctgagaatcttgagggagatggggacctccgtgggggccggatcctgctgggccatgccacaaagtcattcccctcttcccccagcaaggggggttcctgtcctagccgggccaagatgtcaatgacaggggcgggaaaatcacctccatctgtccagagtttggctatgaggctactgagtatgccaggagcccagggagctgcagcagcagggtctgaaccccctccagccaccacgagcccagagggacagcccaaggtccaccgagcccgcaaaaccatgtccaaaccaggaaatggacagcccccggtccctgagaagcggccccctgaaatacagcatttccgcatgagtgatgatgtccactcactgggaaaggtgacctcagatctggccaaaaggaggaagctgaactcaggaggtggcctgtcggaggagttaggttctgcccggcgttcaggagaagtgaccctgacgaaaggggaccccgggtccctggaggagtgggagacggtggtgggtgatgacttcagtctctactatgattcctactctgtggatgagcgcgtggactccgacagcaagtctgaagttgaagctctaactgaacaactaagtgaagaggaggaggaggaagaggaggaagaagaagaagaggaagaggaggaggaagaggaagaagaagaggaagatgaggagtcagggaatcagtcagataggagtggttccagtggccggcgcaaggccaagaagaaatggcgaaaagacagcccatgggtgaagccgtctcggaaacggcgcaagcgggagcctccgcgggccaaggagccacgaggagtgaatggtgtgggctcctcaggccccagtgagtacatggaggtccctctggggtccctggagctgcccagcgaggggaccctctcccccaaccacgctggggtgtccaatgacacatcttcgctggagacagagcgagggtttgaggagttgcccctgtgcagctgccgcatggaggcacccaagattgaccgcatcagcgagagggcggggcacaagtgcatggccactgagagtgtggacggagagctgtcaggctgcaatgccgccatcctcaagcgggagaccatgaggccatccagccgtgtggccctgatggtgctctgtgagacccaccgcgcccgcatggtcaaacaccactgctgcccgggctgcggctacttctgcacggcgggcaccttcctggagtgccaccctgacttccgtgtggcccaccgcttccacaaggcctgtgtgtctcagctgaatgggatggtcttctgtccccactgtggggaggatgcttctgaagctcaagaggtgaccatcccccggggtgacggggtgaccccaccggccggcactgcagctcctgcacccccacccctgtcccaggatgtccccgggagagcagacacttctcagcccagtgcccggatgcgagggcatggggaaccccggcgcccgccctgcgatcccctggctgacaccattgacagctcagggccctccctgaccctgcccaatgggggctgcctttcagccgtggggctgccactggggccaggccgggaggccctggaaaaggccctggtcatccaggagtcagagaggcggaagaagctccgtttccaccctcggcagttgtacctgtccgtgaagcagggcgagctgcagaaggtgatcctgatgctgttggacaacctggaccccaacttccagagcgaccagcagagcaagcgcacgcccctgcatgcagccgcccagaagggctccgtggagatctgccatgtgctgctgcaggctggagccaacataaatgcagtggacaaacagcagcggacgccactgatggaggccgtggtgaacaaccacctggaggtagcccgttacatggtgcagcgtggtggctgtgtctatagcaaggaggaggacggttccacctgcctccaccacgcagccaaaatcgggaacttggagatggtcagcctgctgctgagcacaggacaggtggacgtcaacgcccaggacagtggggggtggacgcccatcatctgggctgcagagcacaagcacatcgaggtgatccgcatgctactgacgcggggcgccgacgtcaccctcactgacaacgaggagaacatctgcctgcactgggcctccttcacgggcagcgccgccatcgccgaagtccttctgaatgcgcgctgtgacctccatgctgtcaactaccatggggacacccccctgcacatcgcagctcgggagagctaccatgactgcgtgctgttattcctgtcacgtggggccaaccctgagctgcggaacaaagagggggacacagcatgggacctgactcccgagcgctccgacgtgtggtttgcgcttcaactcaaccgcaagctccgacttggggtgggaaatcgggccatccgcacagagaagatcatctgccgggacgtggctcggggctatgagaacgtgcccattccctgtgtcaacggtgtggatggggagccctgccctgaggattacaagtacatctcagagaactgcgagacgtccaccatgaacatcgatcgcaacatcacccacctgcagcactgcacgtgtgtggacgactgctctagctccaactgcctgtgcggccagctcagcatccggtgctggtatgacaaggatgggcgattgctccaggaatttaacaagattgagcctccgctgattttcgagtgtaaccaggcgtgctcatgctggagaaactgcaagaaccgggtcgtacagagtggcatcaaggtgcggctacagctctaccgaacagccaagatgggctggggggtccgcgccctgcagaccatcccacaggggaccttcatctgcgagtatgtcggggagctgatctctgatgctgaggctgatgtgagagaggatgattcttacctcttcgacttagacaacaaggatggagaggtgtactgcatagatgcccgttactatggcaacatcagccgcttcatcaaccacctgtgtgaccccaacatcattcccgtccgggtcttcatgctgcaccaagacctgcgatttccacgcatcgccttcttcagttcccgagacatccggactggggaggagctagggtttgactatggcgaccgcttctgggacatcaaaagcaaatatttcacctgccaatgtggctctgagaagtgcaagcactcagccgaagccattgccctggagcagagccgtctggcccgcctggacccacaccctgagctgctgcccgagctcggctccctgccccctgtcaacacatgagaacggaccacaccctctctccccagcatggatggccacagctcagccgcctcctctgccaccagctgctcgcagcccatgcctgggggtgctgccatcttctctccccaccaccctttcacacattcctgaccagagatcccagccaggccctggaggtctgacagcccctccctcccagagctggttcctccctgggagggcaacttcagggctggccaccccccgtgttccccatcctcagttgaagtttgatgaattgaagtcgggcctctatgccaactggttccttttgttctcaataaatgttgggtttg

SEQ ID NO: 339011 - DNA, 3997 bp, Homo sapiens
aagcggcgatggcggcggcggcgggagctgcagcggcggcggccgccgagggggaggcccccgctgagatgggggcgctgctgctggagaaggaaaccagaggagccaccgagagagttcatggctctttgggggacacccctcgtagtgaagaaaccctgcccaaggccaaccccgactccctggagcctgctggcccctcatctccagcctctgtcactgtcactgttggtgatgagggggctgacacccctgtaggggctacaccactcattggggatgaatctgagaatcttgagggagatggggacctccgtgggggccggatcctgctgggccatgccacaaagtcattcccctcttcccccagcaaggggggttcctgtcctagccgggccaagatgtcaatgacaggggcgggaaaatcacctccatctgtccagagtttggctatgaggctactgagtatgccaggagcccagggagctgcagcagcagggtctgaaccccctccagccaccacgagcccagagggacagcccaaggtccaccgagcccgcaaaaccatgtccaaaccaggaaatggacagcccccggtccctgagaagcggccccctgaaatacagcatttccgcatgagtgatgatgtccactcactgggaaaggtgacctcagatctggccaaaaggaggaagctgaactcaggaggtggcctgtcggaggagttaggttctgcccggcgttcaggagaagtgaccctgacgaaaggggaccccgggtccctggaggagtgggagacggtggtgggtgatgacttcagtctctactatgattcctactctgtggatgagcgcgtggactccgacagcaagtctgaagttgaagctctaactgaacaactaagtgaagaggaggaggaggaagaggaggaagaagaagaagaggaagaggaggaggaagaggaagaagaagaggaagatgaggagtcagggaatcagtcagataggagtggttccagtggccggcgcaaggccaagaagaaatggcgaaaagacagcccatgggtgaagccgtctcggaaacggcgcaagcgggagcctccgcgggccaaggagccacgaggagtgaatggtgtgggctcctcaggccccagtgagtacatggaggtccctctggggtccctggagctgcccagcgaggggaccctctcccccaaccacgctggggtgtccaatgacacatcttcgctggagacagagcgagggtttgaggagttgcccctgtgcagctgccgcatggaggcacccaagattgaccgcatcagcgagagggcggggcacaagtgcatggccactgagagtgtggacggagagctgtcaggctgcaatgccgccatcctcaagcgggagaccatgaggccatccagccgtgtggccctgatggtgctctgtgagacccaccgcgcccgcatggtcaaacaccactgctgcccgggctgcggctacttctgcacggcgggcaccttcctggagtgccaccctgacttccgtgtggcccaccgcttccacaaggcctgtgtgtctcagctgaatgggatggtcttctgtccccactgtggggaggatgcttctgaagctcaagaggtgaccatcccccggggtgacggggtgaccccaccggccggcactgcagctcctgcacccccacccctgtcccaggatgtccccgggagagcagacacttctcagcccagtgcccggatgcgagggcatggggaaccccggcgcccgccctgcgatcccctggctgacaccattgacagctcagggccctccctgaccctgcccaatgggggctgcctttcagccgtggggctgccactggggccaggccgggaggccctggaaaaggccctggtcatccaggagtcagagaggcggaagaagctccgtttccaccctcggcagttgtacctgtccgtgaagcagggcgagctgcagaaggtgatcctgatgctgttggacaacctggaccccaacttccagagcgaccagcagagcaagcgcacgcccctgcatgcagccgcccagaagggctccgtggagatctgccatgtgctgctgcaggctggagccaacataaatgcagtggacaaacagcagcggacgccactgatggaggccgtggtgaacaaccacctggaggtagcccgttacatggtgcagcgtggtggctgtgtctatagcaaggaggaggacggttccacctgcctccaccacgcagccaaaatcgggaacttggagatggtcagcctgctgctgagcacaggacaggtggacgtcaacgcccagggccagctgcccccaccctcactcccttcccacccacaggacagtggggggtggacgcccatcatctgggctgcagagcacaagcacatcgaggtgatccgcatgctactgacgcggggcgccgacgtcaccctcactgacaacgaggagaacatctgcctgcactgggcctccttcacgggcagcgccgccatcgccgaagtccttctgaatgcgcgctgtgacctccatgctgtcaactaccatggggacacccccctgcacatcgcagctcgggagagctaccatgactgcgtgctgttattcctgtcacgtggggccaaccctgagctgcggaacaaagagggggacacagcatgggacctgactcccgagcgctccgacgtgtggtttgcgcttcaactcaaccgcaagctccgacttggggtgggaaatcgggccatccgcacagagaagatcatctgccgggacgtggctcggggctatgagaacgtgcccattccctgtgtcaacggtgtggatggggagccctgccctgaggattacaagtacatctcagagaactgcgagacgtccaccatgaacatcgatcgcaacatcacccacctgcagcactgcacgtgtgtggacgactgctctagctccaactgcctgtgcggccagctcagcatccggtgctggtatgacaaggatgggcgattgctccaggaatttaacaagattgagcctccgctgattttcgagtgtaaccaggcgtgctcatgctggagaaactgcaagaaccgggtcgtacagagtggcatcaaggtgcggctacagctctaccgaacagccaagatgggctggggggtccgcgccctgcagaccatcccacaggggaccttcatctgcgagtatgtcggggagctgatctctgatgctgaggctgatgtgagagaggatgattcttacctcttcgacttagacaacaaggatggagaggtgtactgcatagatgcccgttactatggcaacatcagccgcttcatcaaccacctgtgtgaccccaacatcattcccgtccgggtcttcatgctgcaccaagacctgcgatttccacgcatcgccttcttcagttcccgagacatccggactggggaggagctagggtttgactatggcgaccgcttctgggacatcaaaagcaaatatttcacctgccaatgtggctctgagaagtgcaagcactcagccgaagccattgccctggagcagagccgtctggcccgcctggacccacaccctgagctgctgcccgagctcggctccctgccccctgtcaacacatgagaacggaccacaccctctctccccagcatggatggccacagctcagccgcctcctctgccaccagctgctcgcagcccatgcctgggggtgctgccatcttctctccccaccaccctttcacacattcctgaccagagatcccagccaggccctggaggtctgacagcccctccctcccagagctggttcctccctgggagggcaacttcagggctggccaccccccgtgttccccatcctcagttgaagtttgatgaattgaagtcgggcctctatgccaactggttccttttgttctcaataaatgttgggtttg

SEQ ID NO: 339012 - DNA, 4055 bp, Homo sapiens
aagcggcgatggcggcggcggcgggagctgcagcggcggcggccgccgagggggaggcccccgctgagatgggggcgctgctgctggagaaggaaaccagaggagccaccgagagagttcatggctctttgggggacacccctcgtagtgaagaaaccctgcccaaggccaaccccgactccctggagcctgctggcccctcatctccagcctctgtcactgtcactgttggtgatgagggggctgacacccctgtaggggctacaccactcattggggatgaatctgagaatcttgagggagatggggacctccgtgggggccggatcctgctgggccatgccacaaagtcattcccctcttcccccagcaaggggggttcctgtcctagccgggccaagatgtcaatgacaggggcgggaaaatcacctccatctgtccagagtttggctatgaggctactgagtatgccaggagcccagggagctgcagcagcagggtctgaaccccctccagccaccacgagcccagagggacagcccaaggtccaccgagcccgcaaaaccatgtccaaaccaggaaatggacagcccccggtccctgagaagcggccccctgaaatacagcatttccgcatgagtgatgatgtccactcactgggaaaggtgacctcagatctggccaaaaggaggaagctgaactcaggaggtggcctgtcggaggagttaggttctgcccggcgttcaggagaagtgaccctgacgaaaggggaccccgggtccctggaggagtgggagacggtggtgggtgatgacttcagtctctactatgattcctactctgtggatgagcgcgtggactccgacagcaagtctgaagttgaagctctaactgaacaactaagtgaagaggaggaggaggaagaggaggaagaagaagaagaggaagaggaggaggaagaggaagaagaagaggaagatgaggagtcagggaatcagtcagataggagtggttccagtggccggcgcaaggccaagaagaaatggcgaaaagacagcccatgggtgaagccgtctcggaaacggcgcaagcgggagcctccgcgggccaaggagccacgaggagtgaatggtgtgggctcctcaggccccagtgagtacatggaggtccctctggggtccctggagctgcccagcgaggggaccctctcccccaaccacgctggggtgtccaatgacacatcttcgctggagacagagcgagggtttgaggagttgcccctgtgcagctgccgcatggaggcacccaagattgaccgcatcagcgagagggcggggcacaagtgcatggccactgagagtgtggacggagagctgtcaggctgcaatgccgccatcctcaagcgggagaccatgaggccatccagccgtgtggccctgatggtgctctgtgagacccaccgcgcccgcatggtcaaacaccactgctgcccgggctgcggctacttctgcacggcgggcaccttcctggagtgccaccctgacttccgtgtggcccaccgcttccacaaggcctgtgtgtctcagctgaatgggatggtcttctgtccccactgtggggaggatgcttctgaagctcaagaggtgaccatcccccggggtgacggggtgaccccaccggccggcactgcagctcctgcacccccacccctgtcccaggatgtccccgggagagcagacacttctcagcccagtgcccggatgcgagggcatggggaaccccggcgcccgccctgcgatcccctggctgacaccattgacagctcagggccctccctgaccctgcccaatgggggctgcctttcagccgtggggctgccactggggccaggccgggaggccctggaaaaggccctggtcatccaggagtcagagaggcggaagaagctccgtttccaccctcggcagttgtacctgtccgtgaagcagggcgagctgcagaaggtgatcctgatgctgttggacaacctggaccccaacttccagagcgaccagcagagcaagcgcacgcccctgcatgcagccgcccagaagggctccgtggagatctgccatgtgctgctgcaggtcagcacgggcccggccccatgcctcattcaccaggcccttaggcccctcccctgccccatgcctccctggtgccagccctcctgccccctcacaggctggagccaacataaatgcagtggacaaacagcagcggacgccactgatggaggccgtggtgaacaaccacctggaggtagcccgttacatggtgcagcgtggtggctgtgtctatagcaaggaggaggacggttccacctgcctccaccacgcagccaaaatcgggaacttggagatggtcagcctgctgctgagcacaggacaggtggacgtcaacgcccaggacagtggggggtggacgcccatcatctgggctgcagagcacaagcacatcgaggtgatccgcatgctactgacgcggggcgccgacgtcaccctcactgacaacgaggagaacatctgcctgcactgggcctccttcacgggcagcgccgccatcgccgaagtccttctgaatgcgcgctgtgacctccatgctgtcaactaccatggggacacccccctgcacatcgcagctcgggagagctaccatgactgcgtgctgttattcctgtcacgtggggccaaccctgagctgcggaacaaagagggggacacagcatgggacctgactcccgagcgctccgacgtgtggtttgcgcttcaactcaaccgcaagctccgacttggggtgggaaatcgggccatccgcacagagaagatcatctgccgggacgtggctcggggctatgagaacgtgcccattccctgtgtcaacggtgtggatggggagccctgccctgaggattacaagtacatctcagagaactgcgagacgtccaccatgaacatcgatcgcaacatcacccacctgcagcactgcacgtgtgtggacgactgctctagctccaactgcctgtgcggccagctcagcatccggtgctggtatgacaaggatgggcgattgctccaggaatttaacaagattgagcctccgctgattttcgagtgtaaccaggcgtgctcatgctggagaaactgcaagaaccgggtcgtacagagtggcatcaaggtgcggctacagctctaccgaacagccaagatgggctggggggtccgcgccctgcagaccatcccacaggggaccttcatctgcgagtatgtcggggagctgatctctgatgctgaggctgatgtgagagaggatgattcttacctcttcgacttagacaacaaggatggagaggtgtactgcatagatgcccgttactatggcaacatcagccgcttcatcaaccacctgtgtgaccccaacatcattcccgtccgggtcttcatgctgcaccaagacctgcgatttccacgcatcgccttcttcagttcccgagacatccggactggggaggagctagggtttgactatggcgaccgcttctgggacatcaaaagcaaatatttcacctgccaatgtggctctgagaagtgcaagcactcagccgaagccattgccctggagcagagccgtctggcccgcctggacccacaccctgagctgctgcccgagctcggctccctgccccctgtcaacacatgagaacggaccacaccctctctccccagcatggatggccacagctcagccgcctcctctgccaccagctgctcgcagcccatgcctgggggtgctgccatcttctctccccaccaccctttcacacattcctgaccagagatcccagccaggccctggaggtctgacagcccctccctcccagagctggttcctccctgggagggcaacttcagggctggccaccccccgtgttccccatcctcagttgaagtttgatgaattgaagtcgggcctctatgccaactggttccttttgttctcaataaatgttgggtttg

SEQ ID NO: 339013 - DNA, 3979 bp, Homo sapiens
aagcggcgatggcggcggcggcgggagctgcagcggcggcggccgccgagggggaggcccccgctgagatgggggcgctgctgctggagaaggaaaccagaggagccaccgagagagttcatggctctttgggggacacccctcgtagtgaagaaaccctgcccaaggccaaccccgactccctggagcctgctggcccctcatctccagcctctgtcactgtcactgttggtgatgagggggctgacacccctgtaggggctacaccactcattggggatgaatctgagaatcttgagggagatggggacctccgtgggggccggatcctgctgggccatgccacaaagtcattcccctcttcccccagcaaggggggttcctgtcctagccgggccaagatgtcaatgacaggggcgggaaaatcacctccatctgtccagagtttggctatgaggctactgagtatgccaggagcccagggagctgcagcagcagggtctgaaccccctccagccaccacgagcccagagggacagcccaaggtccaccgagcccgcaaaaccatgtccaaaccaggaaatggacagcccccggtccctgagaagcggccccctgaaatacagcatttccgcatgagtgatgatgtccactcactgggaaaggtgacctcagatctggccaaaaggaggaagctgaactcaggaggtggcctgtcggaggagttaggttctgcccggcgttcaggagaagtgaccctgacgaaaggggaccccgggtccctggaggagtgggagacggtggtgggtgatgacttcagtctctactatgattcctactctgtggatgagcgcgtggactccgacagcaagtctgaagttgaagctctaactgaacaactaagtgaagaggaggaggaggaagaggaggaagaagaagaagaggaagaggaggaggaagaggaagaagaagaggaagatgaggagtcagggaatcagtcagataggagtggttccagtggccggcgcaaggccaagaagaaatggcgaaaagacagcccatgggtgaagccgtctcggaaacggcgcaagcgggagcctccgcgggccaaggagccacgaggagtgaatggtgtgggctcctcaggccccagtgagtacatggaggtccctctggggtccctggagctgcccagcgaggggaccctctcccccaaccacgctggggtgtccaatgacacatcttcgctggagacagagcgagggtttgaggagttgcccctgtgcagctgccgcatggaggcacccaagattgaccgcatcagcgagagggcggggcacaagtgcatggccactgagagtgtggacggagagctgtcaggctgcaatgccgccatcctcaagcgggagaccatgaggccatccagccgtgtggccctgatggtgctctgtgagacccaccgcgcccgcatggtcaaacaccactgctgcccgggctgcggctacttctgcacggcgggcaccttcctggagtgccaccctgacttccgtgtggcccaccgcttccacaaggcctgtgtgtctcagctgaatgggatggtcttctgtccccactgtggggaggatgcttctgaagctcaagaggtgaccatcccccggggtgacggggtgaccccaccggccggcactgcagctcctgcacccccacccctgtcccaggatgtccccgggagagcagacacttctcagcccagtgcccggatgcgagggcatggggaaccccggcgcccgccctgcgatcccctggctgacaccattgacagctcagggccctccctgaccctgcccaatgggggctgcctttcagccgtggggctgccactggggccaggccgggaggccctggaaaaggccctggtcatccaggagtcagagaggcggaagaagctccgtttccaccctcggcagttgtacctgtccgtgaagcagggcgagctgcagaaggtgatcctgatgctgttggacaacctggaccccaacttccagagcgaccagcagagcaagcgcacgcccctgcatgcagccgcccagaagggctccgtggagatctgccatgtgctgctgcaggctggagccaacataaatgcagtggacaaacagcagcggacgccactgatggaggccgtggtgaacaaccacctggaggtagcccgttacatggtgcagcgtggtggctgtgtctatagcaaggaggaggacggttccacctgcctccaccacgcagccaaaatcgggaacttggagatggtcagcctgctgctgagcacaggacaggtggacgtcaacgcccaggacagtggggggtggacgcccatcatctgggctgcagagcacaagcacatcgaggtgatccgcatgctactgacgcggggcgccgacgtcaccctcactgacaacgtgagtgagcgtttggttgaggaggagaacatctgcctgcactgggcctccttcacgggcagcgccgccatcgccgaagtccttctgaatgcgcgctgtgacctccatgctgtcaactaccatggggacacccccctgcacatcgcagctcgggagagctaccatgactgcgtgctgttattcctgtcacgtggggccaaccctgagctgcggaacaaagagggggacacagcatgggacctgactcccgagcgctccgacgtgtggtttgcgcttcaactcaaccgcaagctccgacttggggtgggaaatcgggccatccgcacagagaagatcatctgccgggacgtggctcggggctatgagaacgtgcccattccctgtgtcaacggtgtggatggggagccctgccctgaggattacaagtacatctcagagaactgcgagacgtccaccatgaacatcgatcgcaacatcacccacctgcagcactgcacgtgtgtggacgactgctctagctccaactgcctgtgcggccagctcagcatccggtgctggtatgacaaggatgggcgattgctccaggaatttaacaagattgagcctccgctgattttcgagtgtaaccaggcgtgctcatgctggagaaactgcaagaaccgggtcgtacagagtggcatcaaggtgcggctacagctctaccgaacagccaagatgggctggggggtccgcgccctgcagaccatcccacaggggaccttcatctgcgagtatgtcggggagctgatctctgatgctgaggctgatgtgagagaggatgattcttacctcttcgacttagacaacaaggatggagaggtgtactgcatagatgcccgttactatggcaacatcagccgcttcatcaaccacctgtgtgaccccaacatcattcccgtccgggtcttcatgctgcaccaagacctgcgatttccacgcatcgccttcttcagttcccgagacatccggactggggaggagctagggtttgactatggcgaccgcttctgggacatcaaaagcaaatatttcacctgccaatgtggctctgagaagtgcaagcactcagccgaagccattgccctggagcagagccgtctggcccgcctggacccacaccctgagctgctgcccgagctcggctccctgccccctgtcaacacatgagaacggaccacaccctctctccccagcatggatggccacagctcagccgcctcctctgccaccagctgctcgcagcccatgcctgggggtgctgccatcttctctccccaccaccctttcacacattcctgaccagagatcccagccaggccctggaggtctgacagcccctccctcccagagctggttcctccctgggagggcaacttcagggctggccaccccccgtgttccccatcctcagttgaagtttgatgaattgaagtcgggcctctatgccaactggttccttttgttctcaataaatgttgggtttg

SEQ ID NO: 339014 - DNA, 2919 bp, Homo sapiens
gtagaaggcctcgcgttagtcggacgacgactaacacggagatttaggagtcaggaatcagtcagataggagtggttccagtggccggcgcaaggccaagaagaaatggcgaaaagacagcccatgggtgaagccgtctcggaaacggcgcaagcgggagcctccgcgggccaaggagccacgaggggtgtccaatgacacatcttcgctggagacagagcgagggtttgaggagttgcccctgtgcagctgccgcatggaggcacccaagattgaccgcatcagcgagagggcggggcacaagtgcatggccactgagagtgtggacggagagctgtcaggctgcaatgccgccatcctcaagcgggagaccatgaggccatccagccgtgtggccctgatggtgctctgtgagacccaccgcgcccgcatggtcaaacaccactgctgcccgggctgcggctacttctgcacggcgggcaccttcctggagtgccaccctgacttccgtgtggcccaccgcttccacaaggcctgtgtgtctcagctgaatgggatggtcttctgtccccactgtggggaggatgcttctgaagctcaagaggtgaccatcccccggggtgacggggtgaccccaccggccggcactgcagctcctgcacccccacccctgtcccaggatgtccccgggagagcagacacttctcagcccagtgcccggatgcgagggcatggggaaccccggcgcccgccctgcgatcccctggctgacaccattgacagctcagggccctccctgaccctgcccaatgggggctgcctttcagccgtggggctgccactggggccaggccgggaggccctggaaaaggccctggtcatccaggagtcagagaggcggaagaagctccgtttccaccctcggcagttgtacctgtccgtgaagcagggcgagctgcagaaggtgatcctgatgctgttggacaacctggaccccaacttccagagcgaccagcagagcaagcgcacgcccctgcatgcagccgcccagaagggctccgtggagatctgccatgtgctgctgcaggctggagccaacataaatgcagtggacaaacagcagcggacgccactgatggaggccgtggtgaacaaccacctggaggtagcccgttacatggtgcagcgtggtggctgtgtctatagcaaggaggaggacggttccacctgcctccaccacgcagccaaaatcgggaacttggagatggtcagcctgctgctgagcacaggacaggtggacgtcaacgcccaggacagtggggggtggacgcccatcatctgggctgcagagcacaagcacatcgaggtgatccgcatgctactgacgcggggcgccgacgtcaccctcactgacaacgaggagaacatctgcctgcactgggcctccttcacgggcagcgccgccatcgccgaagtccttctgaatgcgcgctgtgacctccatgctgtcaactaccatggggacacccccctgcacatcgcagctcgggagagctaccatgactgcgtgctgttattcctgtcacgtggggccaaccctgagctgcggaacaaagagggggacacagcatgggacctgactcccgagcgctccgacgtgtggtttgcgcttcaactcaaccgcaagctccgacttggggtgggaaatcgggccatccgcacagagaagatcatctgccgggacgtggctcggggctatgagaacgtgcccattccctgtgtcaacggtgtggatggggagccctgccctgaggattacaagtacatctcagagaactgcgagacgtccaccatgaacatcgatcgcaacatcacccacctgcagcactgcacgtgtgtggacgactgctctagctccaactgcctgtgcggccagctcagcatccggtgctggtatgacaaggatgggcgattgctccaggaatttaacaagattgagcctccgctgattttcgagtgtaaccaggcgtgctcatgctggagaaactgcaagaaccgggtcgtacagagtggcatcaaggtgcggctacagctctaccgaacagccaagatgggctggggggtccgcgccctgcagaccatcccacaggggaccttcatctgcgagtatgtcggggagctgatctctgatgctgaggctgatgtgagagaggatgattcttacctcttcgacttagacaacaaggatggagaggtgtactgcatagatgcccgttactatggcaacatcagccgcttcatcaaccacctgtgtgaccccaacatcattcccgtccgggtcttcatgctgcaccaagacctgcgatttccacgcatcgccttcttcagttcccgagacatccggactggggaggagctagggtttgactatggcgaccgcttctgggacatcaaaagcaaatatttcacctgccaatgtggctctgagaagtgcaagcactcagccgaagccattgccctggagcagagccgtctggcccgcctggacccacaccctgagctgctgcccgagctcggctccctgccccctgtcaacacatgagaacggaccacaccctctctccccagcatggatggccacagctcagccgcctcctctgccaccagctgctcgcagcccatgcctgggggtgctgccatcttctctccccaccaccctttcacacattcctgaccagagatcccagccaggccctggaggtctgacagcccctccctcccagagctggttcctccctgggagggcaacttcagggctggccaccccccgtgttccccatcctcagttgaagtttgatgaattgaagtcgggcctctatgccaactggttccttttgttctcaataaatgttgggtttg

SEQ ID NO: 339015 - DNA, 1248 bp, Homo sapiens
  misc_feature (53)..(53): n is a, c, g, or t
ccagctctgactcaaggtcaagcaggatcccgttgagctgctccatctgtagngcgtagcgggcctccacctccctcaggctgttctccaagctggccttcagatttctcatggagtccaggtcgatctccaaggactggactgttacaagtacatctcagagaactgcgagacgtccaccatgaacatcgatcgcaacatcacccacctgcagcactgcacgtgtgtggacgactgctctagctccaactgcctgtgcggccagctcagcatccggtgctggtatgacaaggatgggcgattgctccaggaatttaacaagattgagcctccgctgattttcgagtgtaaccaggcgtgctcatgctggagaaactgcaagaaccgggtcgtacagagtggcatcaaggtgcggctacagctctaccgaacagccaagatgggctggggggtccgcgccctgcagaccatcccacaggggaccttcatctgcgagtatgtcggggagctgatctctgatgctgaggctgatgtgagagaggatgattcttacctcttcgacttagacaacaaggatggagaggtgtactgcatagatgcccgttactatggcaacatcagccgcttcatcaaccacctgtgtgaccccaacatcattcccgtccgggtcttcatgctgcaccaagacctgcgatttccacgcatcgccttcttcagttcccgagacatccggactggggaggagctagggtttgactatggcgaccgcttctgggacatcaaaagcaaatatttcacctgccaatgtggctctgagaagtgcaagcactcagccgaagccattgccctggagcagagccgtctggcccgcctggacccacaccctgagctgctgcccgagctcggctccctgccccctgtcaacacatgagaacggaccacaccctctctccccagcatggatggccacagctcagccgcctcctctgccaccagctgctcgcagcccatgcctgggggtgctgccatcttctctccccaccaccctttcacacattcctgaccagagatcccagccaggccctggaggtctgacagcccctccctcccagagctggttcctccctgggagggcaacttcagggctggccaccccccgtgttccccatcctcagttgaagtttgatgaattgaagtcgggcctctatgccaactggttccttttgttctcaataaatgttgggtttg

SEQ ID NO: 339016 - DNA, 2587 bp, Homo sapiens
aagcggcgatggcggcggcggcgggagctgcagcggcggcggccgccgagggggaggcccccgctgagatgggggcgctgctgctggagaaggaaaccagaggagccaccgagagagttcatggctctttgggggacacccctcgtagtgaagaaaccctgcccaaggccaaccccgactccctggagcctgctggcccctcatctccagcctctgtcactgtcactgttggtgatgagggggctgacacccctgtaggggctacaccactcattggggatgaatctgagaatcttgagggagatggggacctccgtgggggccggatcctgctgggccatgccacaaagtcattcccctcttcccccagcaaggggggttcctgtcctagccgggccaagatgtcaatgacaggggcgggaaaatcacctccatctgtccagagtttggctatgaggctactgagtatgccaggagcccagggagctgcagcagcagggtctgaaccccctccagccaccacgagcccagagggacagcccaaggtccaccgagcccgcaaaaccatgtccaaaccaggaaatggacagcccccggtccctgagaagcggccccctgaaatacagcatttccgcatgagtgatgatgtccactcactgggaaaggtgacctcagatctggccaaaaggaggaagctgaactcaggaggtggcctgtcggaggagttaggttctgcccggcgttcaggagaagtgaccctgacgaaaggggaccccgggtccctggaggagtgggagacggtggtgggtgatgacttcagtctctactatgattcctactctgtggatgagcgcgtggactccgacagcaagtctgaagttgaagctctaactgaacaactaagtgaagaggaggaggaggaagaggaggaagaagaagaagaggaagaggaggaggaagaggaagaagaagaggaagatgaggagtcagggaatcagtcagataggagtggttccagtggccggcgcaaggccaagaagaaatggcgaaaagacagcccatgggtgaagccgtctcggaaacggcgcaagcgggagcctccgcgggccaaggagccacgaggagtgaatggtgtgggctcctcaggccccagtgagtacatggaggtccctctggggtccctggagctgcccagcgaggggaccctctcccccaaccacgctggggtgtccaatgacacatcttcgctggagacagagcgagggtttgaggagttgcccctgtgcagctgccgcatggaggcacccaagattgaccgcatcagcgagagggcggggcacaagtgcatggccactgagagtgtggacggagagctgtcaggctgcaatgccgccatcctcaagcgggagaccatgaggccatccagccgtgtggccctgatggtgctctgtgagacccaccgcgcccgcatggtcaaacaccactgctgcccgggctgcggctacttctgcacggcgggcaccttcctggagtgccaccctgacttccgtgtggcccaccgcttccacaaggcctgtgtgtctcagctgaatgggatggtcttctgtccccactgtggggaggatgcttctgaagctcaagaggtgaccatcccccggggtgacggggtgaccccaccggccggcactgcagctcctgcacccccacccctgtcccaggatgtccccgggagagcagacacttctcagcccagtgcccggatgcgagggcatggggaaccccggcgcccgccctgcgatcccctggctgacaccattgacagctcagggccctccctgaccctgcccaatgggggctgcctttcagccgtggggctgccactggggccaggccgggaggccctggaaaaggccctggtcatccaggagtcagagaggcggaagaagctccgtttccaccctcggcagttgtacctgtccgtgaagcagggcgagctgcagaaggtgatcctgatgctgttggacaacctggaccccaacttccagagcgaccagcagagcaagcgcacgcccctgcatgcagccgcccagaagggctccgtggagatctgccatgtgctgctgcaggctggagccaacataaatgcagtggacaaacagcagcggacgccactgatggaggccgtggtgaacaaccacctggaggtagcccgttacatggtgcagcgtggtggctgtgtctatagcaaggaggaggacggttccacctgcctccaccacgcagccaaaatcgggaacttggagatggtcagcctgctgctgagcacaggacaggtggacgtcaacgcccaggacagtggggggtggacgcccatcatctgggctgcagagcacaagcacatcgaggtgatccgcatgctactgacgcggggcgccgacgtcaccctcactgacaacgaggagaacatctgcctgcactgggcctccttcacgggcagcgccgccatcgccgaagtccttctgaatgcgcgctgtgacctccatgctgtcaactaccacgccacccctgctggtaccgagctcgattc

SEQ ID NO: 339017 - DNA, 1113 bp, Homo sapiens
aagcggcgatggcggcggcggcgggagctgcagcggcggcggccgccgagggggaggcccccgctgagatgggggcgctgctgctggagaaggaaaccagaggagccaccgagagagttcatggctctttgggggacacccctcgtagtgaagaaaccctgcccaaggccaaccccgactccctggagcctgctggcccctcatctccagcctctgtcactgtcactgttggtgatgagggggctgacacccctgtaggggctacaccactcattggggatgaatctgagaatcttgagggagatggggacctccgtgggggccggatcctgctgggccatgccacaaagtcattcccctcttcccccagcaaggggggttcctgtcctagccgggccaagatgtcaatgacaggggcgggaaaatcacctccatctgtccagagtttggctatgaggctactgagtatgccaggagcccagggagctgcagcagcagggtctgaaccccctccagccaccacgagcccagagggacagcccaaggtccaccgagcccgcaaaaccatgtccaaaccaggaaatggacagcccccggtccctgagaagcggccccctgaaatacagcatttccgcatgagtgatgatgtccactcactgggaaaggtgacctcagatctggccaaaaggaggaagctgaactcaggaggtggcctgtcggaggagttaggttctgcccggcgttcaggagaagtgaccctgacgaaaggggaccccgggtccctggaggagtgggagacggtggtgggtgatgacttcagtctctactatgattcctactctgtggatgagcgcgtggactccgacagcaagtctgaagttgaagctctaactgaacaactaagtgaagaggaggaggaggaagaggaggaagaagaagaagaggaagaggaggaggaagaggaagaagcaggaagccctctcaagaccctgttccatacttgtacaataggtatctctagctcctgctactgctagcaagattattagcttccgctgttgcctgaagcatggactttggatgtggaagttcttctcctgatatatactcata

SEQ ID NO: 339018 - DNA, 714 bp, Homo sapiens
aagcggcgatggcggcggcggcgggagctgcagcggcggcggccgccgagggggaggcccccgctgagatgggggcgctgctgctggagaaggaaaccagaggagccaccgagagagttcatggctctttgggggacacccctcgtagtgaagaaaccctgcccaaggccaaccccgactccctggagcctgctggcccctcatctccagcctctgtcactgtcactgttggtgatgagggggctgacacccctgtaggggctacaccactcattggggatgaatctgagaatcttgagggagatggggacctccgtgggggccggatcctgctgggccatgccacaaagtcattcccctcttcccccagcaaggggggttcctgtcctagccgggccaagatgtcaatgacaggggcgggaaaatcacctccatctgtccagagtttggctatgaggctactgagtatgccaggagcccagggagctgcagcagcagggtctgaaccccctccagccaccacgagcccagagggacagcccaaggtccaccgagcccgcaaaaccatgtccaaaccaggaaatggacaggtgagtgggatgggagagatgggataatcaaccataaacctttggtgagctcttttacagtttcacttaaggcttctactccatttactcattcacatatttaagcaaggggctgctgtgtgtc

SEQ ID NO: 339019 - DNA, 577 bp, Homo sapiens
tctggactctcaattctattctgtatgtccatatgcttatccttatgccagtaccacactgttttaattactgtaccttgtagtaagttatgaaatcaggacatatgagtcttccgacattttaaagaatgtcttccttaatttctgtatatttgtgaattttctagttatcattctgttactgatttctagcttcattccatgtagtcagagataatgttttatatgacttcagtcttccaaaatttattgagacacttttagtgggctaacatatggcctatcctggagaatctatacttgagaagaatgtatattctgctgttattgggtggaatgccttgtatatctctcttaggtctactttataattttgttcaagtcctctgttacttatcgatcttctgtctaggtgttctgttcattattgaacgtggttcattaaaagtctccaaatatctgtaggccacagttggtggggacaaaaaagtctccaaatattttttctgcacttctgtcagaacttgcttcatgtttgggggctcttgtttattgcatatgttttttaatagcttga

SEQ ID NO: 339020 - DNA, 588 bp, Homo sapiens
aaagaataactcattgtttcaggattagagagattaaaggcttggttaggttctagaatagatgacttaaaatgcatttgggaatttaaaaaaattctctcattctctataacatctctgactttctttccctcttttttttctatcagtctctttctctagcccttttttcgcctttgtctttagtcttcacctttctggattcctcaacctttcactgtaggctccaagtctctatctttctgtctctgggcttttgtcccccctctcttggtctgtgtcaccccctttttggatttcttttccctccatataactctttctcttttctctgtctctttctttcttgtctctctcttctcccccacaccctttttctctctgtctctctccctctcttatttcctttttatgggtctccatcaacctctttctctgggtctcggtctctctctctcgtgggtctcggtttccctcgtctctggggttctgtctccctctgtctctgggtctctgtctctgggtctctgtctactcctatgtctctgggtctctgtatctctctctgggtctctgtctcactctgtc

SEQ ID NO: 339021 - DNA, 149 bp, Homo sapiens
cttgacacactggtgctgtgaggaggaagatgtgggcactcttaggtccctggtcctaggggtctgtgctggggtggggctcgttgacctgcatcctggctggccctgtgactctgcctgtttacagtgagcagctcctggccaaaagc

SEQ ID NO: 339022 - DNA, 1081 bp, Homo sapiens
tgagtgttcagtgttcactgttttttgtttttttttagacggagccttgctctgttgcccaagctacagtgcagtggtgcaatcttggctcaccgcaacctccgccgccggggttcaagcagttcttctgcctcagcctcccgagtagctggggttacaggtgaccgctaccatgcctggctaatttttgcatttttaatagacatggggttttgccatgttggccagtctggtctcgaactcccgacctcaggtgatcctcccgcctcagccccccaaactgcagagattacaggcgtgagccatcgcacctggccttgttcattgttatatttgtctatttgaacagaaagaaaaggaagtgaataactaccttcaatggcagtaagataagttacttaatgggctacaaaaaggaataccaatacatggaagtaccaatacctgctacaacatggatggaccgtgaaaacattacgttaagcgagagaagccaggaacaaaggaccatatattgtatgattccattgatatgaaatgtccagaatagacaaacctacgcagacagaaagtagattaagggttgccagagtcaaggagaaatggggataggagttgggggtggtagttgctgacagctaatgacagataaacggtgtggggtttctttttggagtaatgaatatgtcctaagttgtagtgatgcacaattctgcaaatatactaaaagccatttaattatagactggcatgggaattatacctaaataaagctgttttgaaaaatgataaatgactactctttctctaggtactggatttatatgctcaatttatctttcatcattcagaaaaacaaaaggaaatgaaggacaatatttttattttatatatttatttttgagaccaagtctcgctctgtcacccacctgttgcaagtcaaagttcaaagaaatgcaccatgcacttgctcacccagattacatcccaaatgttacgctgaggcattctggaatgttattaccaagatgtttccatgtcacaatgacattgcaaccacctcctcactgaacatcacatg

SEQ ID NO: 339023 - DNA, 2568 bp, Homo sapiens
aggcgcagtttgccggccgccatcgcgcactggggctccgggcggctgggaccggcctggggtagctgcgcagcaggtctgtgggttctggcaccacctgagcccactgggcatctggtcatccctggcacctctcctttggagccaccttgtccctggctagacagtcacattttccagtgccgttttggaaagatgttgcctttggagaaggcgtttgcctcccccaggagctccccagccccgccggatctgcccacgccggggtcagcagccggagtccagcaggaagaacccgagaccatccctgagaggacccctgctgacctggagttctcccgcctgcgtttccgggaatttgtctaccaggaggctgccgggccccaccagaccctggcccggctgcatgagctgtgccgccagtggctgatgcctgaggcgcgctccaaggagcagatgctggagctgctggtgctggagcagttcctgggcatcctgcctgataaggtccggccctgggtggtggcacagtaccctgagagctgcaagaaggcagcctccctggtggagggcctcgctgatgtcctggaagagccagggatgctgctgggctcccctgcgggctcatcctcaattcttagcgatggagtgtacgagaggcacatggaccctctgctgctaccaggcgagctcgcgagccccagccaggcccttggagctggggagatcccggcaccttctgagacaccctggctttctccggaccccctgtttctggaacagaggagggtcagagaagcaaagaccgaagaggacggccctgccaacaccgagcagaagctgaagtcctttccagaggaccctcagcacctgggggagtggggccacctggaccctgccgaggagaacctgaagagctaccggaagctgctcctgtgggggtatcagctttcccagcctgacgctgcctccaggctggacactgaggaactccggttggtggaaagagatccacaaggaagcagcctcccagaaggcgggaggcggcaggagagcgctgggtgcgcctgcgaggaggccgcccccgcgggggtgctgcctgagctgcctacggaggcgccccctggggacgcccttgccgatcccccgtcgggcaccactgaggaggaggaagagcagcctgggaaggccccggacccgcaggacccccaggacgcggagtccgactctgccaccggatcgcagaggcagtccgtcatccagcagcctgccccggacaggggcacggcgaaactgggaaccaagaggccgcaccccgaggatggggacgggcagagcctcgagggcgtctctagctccggcgacagcgcagggctggaggccgggcagggccctggggctgacgagccgggcttgtcccgcgggaagccctatgcctgcggcgagtgcggggaggccttcgcgtggctctcgcacctgatggagcaccacagcagccatggcggccggaagcgctacgcctgtcagggctgctggaagaccttccacttcagcctggccctagccgagcaccagaagacccacgagaaggagaaaagctacgcgctggggggcgcccggggcccccaaccgtccacccgcgaagcccaggcgggggctagggcgggcggtcccccagagagcgtggagggcgaggctccccccgcacccccagaggcgcagaggtgagccgctgtgctgtcccgttccggaggggccgctttgccggccgtgaatcccagacgaggcattgggcctttccacgcccctgggtggcggcttcctgtggtgtttgtggacgtcctctgcctgtgccctgaatccgctcctgaggctaagcgctcccaacgagaagggtccacgggaagccctcacctctgtaaacacaccctgggccagcgctcgcatccgaggggagccgccggatgtggaagaagactcggctttcctgcagccatttagtgccgccccatgctaggttatttgacattgtgcagtgtagagttgccttaaagtgcgtgatctgccagtgctttcttcaagtcacccttgccccgattcctcctgtttgcgctccccagggttgctcaagtggaaattttgtcagctgtttagccttttcgtacttggcgtgatgtcaacttcacttctaatctgcaaaagcagaagctgtttcctagtttacctcgcgtgtgtttacctatatggagtagctcgcagagatcacagaaatgcttgcagcctaaggcagggttttcagaccgtgggtcccagcccatttagtaaaatgggaaatcaattagcaagtggtcaccagcattacacagcaatgaagcagaataaagtaggccagaatgcatcatgtagtaaaggcaaatactgttttgtgaaacttttcacccatacatctaaatgtgagaactggttgcaatgtaagacatttcttgctgggaagttgtgagcaaaataagttgaaaacactaataaagatctgtctgtctgagcaaaggagactaaactccttgggct

SEQ ID NO: 339024 - DNA, 2627 bp, Homo sapiens
aggcgcagtttgccggccgccatcgcgcactggggctccgggcggctgggaccggcctggggtagctgcgcagcaggtgggtcggtcccggggatgcagcgcgggggtcagagagcgaccccaacagggtagacggtctgtgggttctggcaccacctgagcccactgggcatctggtcatccctggcacctctcctttggagccaccttgtccctggctagacagtcacattttccagtgccgttttggaaagatgttgcctttggagaaggcgtttgcctcccccaggagctccccagccccgccggatctgcccacgccggggtcagcagccggagtccagcaggaagaacccgagaccatccctgagaggacccctgctgacctggagttctcccgcctgcgtttccgggaatttgtctaccaggaggctgccgggccccaccagaccctggcccggctgcatgagctgtgccgccagtggctgatgcctgaggcgcgctccaaggagcagatgctggagctgctggtgctggagcagttcctgggcatcctgcctgataaggtccggccctgggtggtggcacagtaccctgagagctgcaagaaggcagcctccctggtggagggcctcgctgatgtcctggaagagccagggatgctgctgggctcccctgcgggctcatcctcaattcttagcgatggagtgtacgagaggcacatggaccctctgctgctaccaggcgagctcgcgagccccagccaggcccttggagctggggagatcccggcaccttctgagacaccctggctttctccggaccccctgtttctggaacagaggagggtcagagaagcaaagaccgaagaggacggccctgccaacaccgagcagaagctgaagtcctttccagaggaccctcagcacctgggggagtggggccacctggaccctgccgaggagaacctgaagagctaccggaagctgctcctgtgggggtatcagctttcccagcctgacgctgcctccaggctggacactgaggaactccggttggtggaaagagatccacaaggaagcagcctcccagaaggcgggaggcggcaggagagcgctgggtgcgcctgcgaggaggccgcccccgcgggggtgctgcctgagctgcctacggaggcgccccctggggacgcccttgccgatcccccgtcgggcaccactgaggaggaggaagagcagcctgggaaggccccggacccgcaggacccccaggacgcggagtccgactctgccaccggatcgcagaggcagtccgtcatccagcagcctgccccggacaggggcacggcgaaactgggaaccaagaggccgcaccccgaggatggggacgggcagagcctcgagggcgtctctagctccggcgacagcgcagggctggaggccgggcagggccctggggctgacgagccgggcttgtcccgcgggaagccctatgcctgcggcgagtgcggggaggccttcgcgtggctctcgcacctgatggagcaccacagcagccatggcggccggaagcgctacgcctgtcagggctgctggaagaccttccacttcagcctggccctagccgagcaccagaagacccacgagaaggagaaaagctacgcgctggggggcgcccggggcccccaaccgtccacccgcgaagcccaggcgggggctagggcgggcggtcccccagagagcgtggagggcgaggctccccccgcacccccagaggcgcagaggtgagccgctgtgctgtcccgttccggaggggccgctttgccggccgtgaatcccagacgaggcattgggcctttccacgcccctgggtggcggcttcctgtggtgtttgtggacgtcctctgcctgtgccctgaatccgctcctgaggctaagcgctcccaacgagaagggtccacgggaagccctcacctctgtaaacacaccctgggccagcgctcgcatccgaggggagccgccggatgtggaagaagactcggctttcctgcagccatttagtgccgccccatgctaggttatttgacattgtgcagtgtagagttgccttaaagtgcgtgatctgccagtgctttcttcaagtcacccttgccccgattcctcctgtttgcgctccccagggttgctcaagtggaaattttgtcagctgtttagccttttcgtacttggcgtgatgtcaacttcacttctaatctgcaaaagcagaagctgtttcctagtttacctcgcgtgtgtttacctatatggagtagctcgcagagatcacagaaatgcttgcagcctaaggcagggttttcagaccgtgggtcccagcccatttagtaaaatgggaaatcaattagcaagtggtcaccagcattacacagcaatgaagcagaataaagtaggccagaatgcatcatgtagtaaaggcaaatactgttttgtgaaacttttcacccatacatctaaatgtgagaactggttgcaatgtaagacatttcttgctgggaagttgtgagcaaaataagttgaaaacactaataaagatctgtctgtctgagcaaaggagactaaactccttgggct

SEQ ID NO: 339025 - DNA, 3362 bp, Homo sapiens
aggcgcagtttgccggccgccatcgcgcactggggctccgggcggctgggaccggcctggggtagctgcgcagcaggtctgtgggttctggcaccacctgagcccactgggcatctggtcatccctggcacctctcctttggagccaccttgtccctggctagacagtcacattttccagtgccgttttggaaagatgttgcctttggagaaggcgtttgcctcccccaggagctccccagccccgccggatctgcccacgccggggtcagcagccggagtccagcaggaagaacccgagaccatccctgagaggacccctgctgacctggagttctcccgcctgcgtttccgggaatttgtctaccaggaggctgccgggccccaccagaccctggcccggctgcatgagctgtgccgccagtggctgatgcctgaggcgcgctccaaggagcagatgctggagctgctggtgctggagcagttcctgggcatcctgcctgataaggtccggccctgggtggtggcacagtaccctgagagctgcaagaaggcagcctccctggtggagggcctcgctgatgtcctggaagagccagggatgctgctgggctcccctgcgggctcatcctcaattcttagcgatggagtgtacgagaggcacatggaccctctgctgctaccaggcgagctcgcgagccccagccaggcccttggagctggggagatcccggcaccttctgagacaccctggctttctccggaccccctgtttctggaacagaggagggtcagagaagcaaagaccgaagaggacggccctgccaacaccgagcagaagctgaagtcctttccagaggaccctcagcacctgggggagtggggccacctggaccctgccgaggagaacctgaagagctaccggaagctgctcctgtgggggtatcagctttcccagcctgacgctgcctccaggctggacactgaggaactccggttggtggaaagagatccacaaggaagcagcctcccaggtgaggttgggttgaattggtgttagggccgggtggggtttgctttttcttcagaggctgagggggcccctcccagcgccatcagccccagcaaagacctcagcattgactgcttcaccattctcccaccaccgtgtctgagtgaggcaggaatccagttacgtccatggtctcttgctgcatgacagaccaccccaagacttggtcggtggaaacggcagtggtgttagttgccaggatctgtgtatgactggtcccgggggtggccgttctgccccattggaggctctgtgccagcacaccaacaagaacacctagaggcggacttgggctggagggccctgggtgcctgtcgccagggggcttgtcgctggggggtttggccttagctattgaccccactctcttcgctggcagccgggcccctccctccaggagggtgcgctctgagcaggctctccttgcatcgtgcatcttgtggccaagctagtggccaggtggagacctccaaaggcgcggtttccagaacccgggctcagtggggctgtccttcctgtcctgtcggtggcctccgttgttggaggcctccaggtcccacatctgcagcagcaggcgcggggcatgcgctgcagggctgcctgggagggacagcgctgcttccaaacagccgtgagccccgcggggatccagagcccggagccctgtgcgctgttccggcagctgaggctcggctgggtcctcctctccctggccctgggcggggcgctcacgctagggctctgaccttgttccagaaggcgggaggcggcaggagagcgctgggtgcgcctgcgaggaggccgcccccgcgggggtgctgcctgagctgcctacggaggcgccccctggggacgcccttgccgatcccccgtcgggcaccactgaggaggaggaagagcagcctgggaaggccccggacccgcaggacccccaggacgcggagtccgactctgccaccggatcgcagaggcagtccgtcatccagcagcctgccccggacaggggcacggcgaaactgggaaccaagaggccgcaccccgaggatggggacgggcagagcctcgagggcgtctctagctccggcgacagcgcagggctggaggccgggcagggccctggggctgacgagccgggcttgtcccgcgggaagccctatgcctgcggcgagtgcggggaggccttcgcgtggctctcgcacctgatggagcaccacagcagccatggcggccggaagcgctacgcctgtcagggctgctggaagaccttccacttcagcctggccctagccgagcaccagaagacccacgagaaggagaaaagctacgcgctggggggcgcccggggcccccaaccgtccacccgcgaagcccaggcgggggctagggcgggcggtcccccagagagcgtggagggcgaggctccccccgcacccccagaggcgcagaggtgagccgctgtgctgtcccgttccggaggggccgctttgccggccgtgaatcccagacgaggcattgggcctttccacgcccctgggtggcggcttcctgtggtgtttgtggacgtcctctgcctgtgccctgaatccgctcctgaggctaagcgctcccaacgagaagggtccacgggaagccctcacctctgtaaacacaccctgggccagcgctcgcatccgaggggagccgccggatgtggaagaagactcggctttcctgcagccatttagtgccgccccatgctaggttatttgacattgtgcagtgtagagttgccttaaagtgcgtgatctgccagtgctttcttcaagtcacccttgccccgattcctcctgtttgcgctccccagggttgctcaagtggaaattttgtcagctgtttagccttttcgtacttggcgtgatgtcaacttcacttctaatctgcaaaagcagaagctgtttcctagtttacctcgcgtgtgtttacctatatggagtagctcgcagagatcacagaaatgcttgcagcctaaggcagggttttcagaccgtgggtcccagcccatttagtaaaatgggaaatcaattagcaagtggtcaccagcattacacagcaatgaagcagaataaagtaggccagaatgcatcatgtagtaaaggcaaatactgttttgtgaaacttttcacccatacatctaaatgtgagaactggttgcaatgtaagacatttcttgctgggaagttgtgagcaaaataagttgaaaacactaataaagatctgtctgtctgagcaaaggagactaaactccttgggct

SEQ ID NO: 339026 - DNA, 3259 bp, Homo sapiens
aggcgcagtttgccggccgccatcgcgcactggggctccgggcggctgggaccggcctggggtagctgcgcagcaggtctgtgggttctggcaccacctgagcccactgggcatctggtcatccctggcacctctcctttggagccaccttgtccctggctagacagtcacattttccagtgccgttttggaaagatgttgcctttggagaaggcgtttgcctcccccaggagctccccagccccgccggatctgcccacgccggggtcagcagccggagtccagcaggaagaacccgagaccatccctgagaggacccctgctgacctggagttctcccgcctgcgtttccgggaatttgtctaccaggaggctgccgggccccaccagaccctggcccggctgcatgagctgtgccgccagtggctgatgcctgaggcgcgctccaaggagcagatgctggagctgctggtgctggagcagttcctgggcatcctgcctgataaggtccggccctgggtggtggcacagtaccctgagagctgcaagaaggcagcctccctggtggagggcctcgctgatgtcctggaagagccagggatgctgctgggctcccctgcgggctcatcctcaattcttagcgatggagtgtacgagaggcacatggaccctctgctgctaccaggcgagctcgcgagccccagccaggcccttggagctggggagatcccggcaccttctgagacaccctggctttctccggaccccctgtttctggaacagaggagggtcagagaagcaaagaccgaagaggacggccctgccaacaccgagcagggtatcagctttcccagcctgacgctgcctccaggctggacactgaggaactccggttggtggaaagagatccacaaggaagcagcctcccaggtgaggttgggttgaattggtgttagggccgggtggggtttgctttttcttcagaggctgagggggcccctcccagcgccatcagccccagcaaagacctcagcattgactgcttcaccattctcccaccaccgtgtctgagtgaggcaggaatccagttacgtccatggtctcttgctgcatgacagaccaccccaagacttggtcggtggaaacggcagtggtgttagttgccaggatctgtgtatgactggtcccgggggtggccgttctgccccattggaggctctgtgccagcacaccaacaagaacacctagaggcggacttgggctggagggccctgggtgcctgtcgccagggggcttgtcgctggggggtttggccttagctattgaccccactctcttcgctggcagccgggcccctccctccaggagggtgcgctctgagcaggctctccttgcatcgtgcatcttgtggccaagctagtggccaggtggagacctccaaaggcgcggtttccagaacccgggctcagtggggctgtccttcctgtcctgtcggtggcctccgttgttggaggcctccaggtcccacatctgcagcagcaggcgcggggcatgcgctgcagggctgcctgggagggacagcgctgcttccaaacagccgtgagccccgcggggatccagagcccggagccctgtgcgctgttccggcagctgaggctcggctgggtcctcctctccctggccctgggcggggcgctcacgctagggctctgaccttgttccagaaggcgggaggcggcaggagagcgctgggtgcgcctgcgaggaggccgcccccgcgggggtgctgcctgagctgcctacggaggcgccccctggggacgcccttgccgatcccccgtcgggcaccactgaggaggaggaagagcagcctgggaaggccccggacccgcaggacccccaggacgcggagtccgactctgccaccggatcgcagaggcagtccgtcatccagcagcctgccccggacaggggcacggcgaaactgggaaccaagaggccgcaccccgaggatggggacgggcagagcctcgagggcgtctctagctccggcgacagcgcagggctggaggccgggcagggccctggggctgacgagccgggcttgtcccgcgggaagccctatgcctgcggcgagtgcggggaggccttcgcgtggctctcgcacctgatggagcaccacagcagccatggcggccggaagcgctacgcctgtcagggctgctggaagaccttccacttcagcctggccctagccgagcaccagaagacccacgagaaggagaaaagctacgcgctggggggcgcccggggcccccaaccgtccacccgcgaagcccaggcgggggctagggcgggcggtcccccagagagcgtggagggcgaggctccccccgcacccccagaggcgcagaggtgagccgctgtgctgtcccgttccggaggggccgctttgccggccgtgaatcccagacgaggcattgggcctttccacgcccctgggtggcggcttcctgtggtgtttgtggacgtcctctgcctgtgccctgaatccgctcctgaggctaagcgctcccaacgagaagggtccacgggaagccctcacctctgtaaacacaccctgggccagcgctcgcatccgaggggagccgccggatgtggaagaagactcggctttcctgcagccatttagtgccgccccatgctaggttatttgacattgtgcagtgtagagttgccttaaagtgcgtgatctgccagtgctttcttcaagtcacccttgccccgattcctcctgtttgcgctccccagggttgctcaagtggaaattttgtcagctgtttagccttttcgtacttggcgtgatgtcaacttcacttctaatctgcaaaagcagaagctgtttcctagtttacctcgcgtgtgtttacctatatggagtagctcgcagagatcacagaaatgcttgcagcctaaggcagggttttcagaccgtgggtcccagcccatttagtaaaatgggaaatcaattagcaagtggtcaccagcattacacagcaatgaagcagaataaagtaggccagaatgcatcatgtagtaaaggcaaatactgttttgtgaaacttttcacccatacatctaaatgtgagaactggttgcaatgtaagacatttcttgctgggaagttgtgagcaaaataagttgaaaacactaataaagatctgtctgtctgagcaaaggagactaaactccttgggct

SEQ ID NO: 339027 - DNA, 2474 bp, Homo sapiens
ttttttttttatgttgatgccttttatttctttggtttttaaccccactcagggtatcagctttcccagcctgacgctgcctccaggctggacactgaggaactccggttggtggaaagagatccacaaggaagcagcctcccaggtgaggttgggttgaattggtgttagggccgggtggggtttgctttttcttcagaggctgagggggcccctcccagcgccatcagccccagcaaagacctcagcattgactgcttcaccattctcccaccaccgtgtctgagtgaggcaggaatccagttacgtccatggtctcttgctgcatgacagaccaccccaagacttggtcggtggaaacggcagtggtgttagttgccaggatctgtgtatgactggtcccgggggtggccgttctgccccattggaggctctgtgccagcacaccaacaagaacacctagaggcggacttgggctggagggccctgggtgcctgtcgccagggggcttgtcgctggggggtttggccttagctattgaccccactctcttcgctggcagccgggcccctccctccaggagggtgcgctctgagcaggctctccttgcatcgtgcatcttgtggccaagctagtggccaggtggagacctccaaaggcgcggtttccagaacccgggctcagtggggctgtccttcctgtcctgtcggtggcctccgttgttggaggcctccaggtcccacatctgcagcagcaggcgcggggcatgcgctgcagggctgcctgggagggacagcgctgcttccaaacagccgtgagccccgcggggatccagagcccggagccctgtgcgctgttccggcagctgaggctcggctgggtcctcctctccctggccctgggcggggcgctcacgctagggctctgaccttgttccagaaggcgggaggcggcaggagagcgctgggtgcgcctgcgaggaggccgcccccgcgggggtgctgcctgagctgcctacggaggcgccccctggggacgcccttgccgatcccccgtcgggcaccactgaggaggaggaagagcagcctgggaaggccccggacccgcaggacccccaggacgcggagtccgactctgccaccggatcgcagaggcagtccgtcatccagcagcctgccccggacaggggcacggcgaaactgggaaccaagaggccgcaccccgaggatggggacgggcagagcctcgagggcgtctctagctccggcgacagcgcagggctggaggccgggcagggccctggggctgacgagccgggcttgtcccgcgggaagccctatgcctgcggcgagtgcggggaggccttcgcgtggctctcgcacctgatggagcaccacagcagccatggcggccggaagcgctacgcctgtcagggctgctggaagaccttccacttcagcctggccctagccgagcaccagaagacccacgagaaggagaaaagctacgcgctggggggcgcccggggcccccaaccgtccacccgcgaagcccaggcgggggctagggcgggcggtcccccagagagcgtggagggcgaggctccccccgcacccccagaggcgcagaggtgagccgctgtgctgtcccgttccggaggggccgctttgccggccgtgaatcccagacgaggcattgggcctttccacgcccctgggtggcggcttcctgtggtgtttgtggacgtcctctgcctgtgccctgaatccgctcctgaggctaagcgctcccaacgagaagggtccacgggaagccctcacctctgtaaacacaccctgggccagcgctcgcatccgaggggagccgccggatgtggaagaagactcggctttcctgcagccatttagtgccgccccatgctaggttatttgacattgtgcagtgtagagttgccttaaagtgcgtgatctgccagtgctttcttcaagtcacccttgccccgattcctcctgtttgcgctccccagggttgctcaagtggaaattttgtcagctgtttagccttttcgtacttggcgtgatgtcaacttcacttctaatctgcaaaagcagaagctgtttcctagtttacctcgcgtgtgtttacctatatggagtagctcgcagagatcacagaaatgcttgcagcctaaggcagggttttcagaccgtgggtcccagcccatttagtaaaatgggaaatcaattagcaagtggtcaccagcattacacagcaatgaagcagaataaagtaggccagaatgcatcatgtagtaaaggcaaatactgttttgtgaaacttttcacccatacatctaaatgtgagaactggttgcaatgtaagacatttcttgctgggaagttgtgagcaaaataagttgaaaacactaataaagatctgtctgtctgagcaaaggagactaaactccttgggct

SEQ ID NO: 339028 - DNA, 3516 bp, Homo sapiens
aggcgcagtttgccggccgccatcgcgcactggggctccgggcggctgggaccggcctggggtagctgcgcagcaggtctgtgggttctggcaccacctgagcccactgggcatctggtcatccctggcacctctcctttggagccaccttgtccctggctagacagtcacattttccagtgccgttttggaaagatgttgcctttggagaaggcgtttgcctcccccaggagctccccagccccgccggatctgcccacgccggggtcagcagccggagtccagcaggaagaacccgagaccatccctgagaggacccctgctgacctggagttctcccgcctgcgtttccgggaatttgtctaccaggaggctgccgggccccaccagaccctggcccggctgcatgagctgtgccgccagtggctgatgcctgaggcgcgctccaaggagcagatgctggagctgctggtgctggagcagttcctgggcatcctgcctgataaggtccggccctgggtggtggcacagtaccctgagagctgcaagaaggcagcctccctggtggagggcctcgctgatgtcctggaagagccagggatgctgctgggctcccctgcgggctcatcctcaattcttagcgatggagtgtacgagaggcacatggaccctctgctgctaccaggcgagctcgcgagccccagccaggcccttggagctggggagatcccggcaccttctgagacaccctggctttctccggaccccctgtttctggaacagaggagggtcagagaagcaaagaccgaagaggacggccctgccaacaccgagcagaagctgaagtcctttccagaggaccctcagcacctgggggagtggggccacctggaccctgccgaggagaacctgaagagctaccggaagctgctcctgtgggggtatcagctttcccagcctgacgctgcctccaggctggacactgaggaactccggttggtggaaagagatccacaaggaagcagcctcccagaaggcgggaggcggcaggagagcgctgggtgcgcctgcgaggaggccgcccccgcgggggtgctgcctgagctgcctacggaggcgccccctggggacgcccttgccgatcccccgtcgggcaccactgaggaggaggaagagcagcctgggaaggccccggacccgcaggacccccaggacgcggagtccgactctgccaccggatcgcagaggcagtccgtcatccagcagcctgccccggacaggggcacggcgaaactgggaaccaagaggccgcaccccgaggatggggacgggcagagcctcgagggcgtctctagctccggcgacagcgcagggctggaggccgggcagggccctggggctgacgagccgggcttgtcccgcgggaagccctatgcctgcggcgagtgcggggaggccttcgcgtggctctcgcacctgatggagcaccacagcagccatggcggccggaagcgctacgcctgtcagggctgctggaagaccttccacttcagcctggccctagccgagcaccagaagacccacgagaaggagaaaagctacgcgctggggggcgcccggggcccccaaccgtccacccgcgaagcccaggcgggggctagggcgggcggtcccccagagagcgtggagggcgaggctccccccgcacccccagaggcgcagaggtgagccgctgtgctgtcccgttccggaggggccgctttgccggccgtgaatcccagacgaggcattgggcctttccacgcccctgggtggcggcttcctgtggtgtttgtggacgtcctctgcctgtgccctgaatccgctcctgaggctaagcgctcccaacgagaagggtccacgggaagccctcacctctgtaaacacaccctgggccagcgctcgcatccgaggggagccgccggatgtggaagaagactcggctttcctgcagccatttagtgccgccccatgctaggttatttgacattgtgcagtgtagagttgccttaaagtgcgtgatctgccagtgctttcttcaagtcacccttgccccgattcctcctgtttgcgctccccagggttgctcaagtggaaattttgtcagctgtttagccttttcgtacttggcgtgatgtcaacttcacttctaatctgcaaaagcagaagctgtttcctagtttacctcgcgtgtgtttacctatatggagtagctcgcagagatcacagaaatgcttgcagcctaaggcagggttttcagaccgtgggtcccagcccatttagtaaaatgggaaatcaattagcaagtggtcaccagcattacacagcaatgaagcagaataaagtaggccagaatgcatcatgtagtaaaggcaaatactgttttgtgaaacttttcacccatacatctaaatgtgagaactggttgcaatgtaagacatttcttgctgggaagttgtgagcaaaataagttgaaaacactaataaagatctgtctgtctgagcaaaggagactaaactccttgggctacataaggtgatcttttcattgattgcatttattctcaagattacagtatcattcccattgcctgcgcataaacttaactgctccctgcgcataaacttaactgctccctgtagatacagaaactggtgcctctttttctgtcactgtgtttgagcaggcagtctgttgtaatgacccccaaatcacagagacttagtaagtacttattcatgggccgggcgtggtggctcacacctgtaatcccaacactttgtgaggctgaggcaggcagatcatggagtttgagaccagcctggccaacatggtgaaaccctgtctctactaaaaatacaaaaaattagccagctgtggtgatgcgtgcctgtaatcccagctactcaggaggctgaggcaggagaattgcttgaacctgggaggcggaggttgcagtaagccaagattgtgccactgcaccctagcctaggtgacagtgcaagactccatctcagaaaaaaaagaaaaaaagaaaaaaaaattatttactaacagtcgattgtcctgtgttggtgttgctgttgcttatatattggtttgcactctgctccatacagtgattcagggatccaggccccatctctgttgtagctctgctcttcactgtacccttggagcatgtagggaaggccgaacctgttcacctgggagatgacacacatcacttctactcacaaatccttggagagaaatgatcccatggctccagtcacttgaaagggcctgtgaactgtcacctggagtgcctgtctccgcaacagttacaagcttagttcccctcttagcctatccatcttaagccccaagctgagtgtggttctggtaagaaaaaggctaaaatggtctgggcacggtggctcacgcctgtaatcccagcactttgagaggcacctttaaaaaaaagataaaaacaa

SEQ ID NO: 339029 - DNA, 2664 bp, Homo sapiens
aggcgcagtttgccggccgccatcgcgcactggggctccgggcggctgggaccggcctggggtagctgcgcagcaggtctgtgggttctggcaccacctgagcccactgggcatctggtcatccctggcacctctcctttggagccaccttgtccctggctagacagtcacattttccagtgccgttttggaaagatgttgcctttggagaaggcgtttgcctcccccaggagctccccagccccgccggatctgcccacgccggggtcagcagccggagtccagcaggaagaacccgagaccatccctgagaggacccctgctgacctggagttctcccgcctgcgtttccgggaatttgtctaccaggaggctgccgggccccaccagaccctggcccggctgcatgagctgtgccgccagtggctgatgcctgaggcgcgctccaaggagcagatgctggagctgctggtgctggagcagttcctgggcatcctgcctgataaggtccggccctgggtggtggcacagtaccctgagagctgcaagaaggcagcctccctggtggagggcctcgctgatgtcctggaagagccagggatgctgctgggctcccctgcgggctcatcctcaattcttagcgatggagtgtacgagaggcacatggaccctctgctgctaccaggcgagctcgcgagccccagccaggcccttggagctggggagatcccggcaccttctgagacaccctggctttctccggaccccctgtttctggaacagaggagggtcagagaagcaaagaccgaagaggacggccctgccaacaccgagcagaagctgaagtcctttccagaggaccctcagcacctgggggagtggggccacctggaccctgccgaggagaacctgaagagctaccggaagctgctcctgtgggggtatcagctttcccagcctgacgctgcctccaggctggacactgaggaactccggttggtggaaagagatccacaaggaagcagcctcccagaaggcgggaggcggcaggagagcgctgggtgcgcctgcgaggaggccgcccccgcgggggtgctgcctgagctgcctacggaggcgccccctggggacgcccttgccgatcccccgtcgggcaccactgaggaggaggaagagcagcctgggaaggccccggacccgcaggacccccaggacgcggagtccgactctgccaccggatcgcagaggcagtccgtcatccagcagcctgccccggacaggggcacggcgaaactgggaaccaagaggccgcaccccgaggatggggacgggcagagcctcgagggcgtctctagctccggcgacagcgcagggctggaggccgggcagggccctggggctgacgagccgggcttgtcccgcgggaagccctatgcctgcggcgagtgcggggaggccttcgcgtggctctcgcacctgatggagcaccacagcagccatggcggccggaagcgctacgcctgtcagggctgctggaagaccttccacttcagcctggccctagccgagcaccagaagacccacgagaaggagaaaagctacgcgctggggggcgcccggggcccccaaccgtccacccgcgaagcccaggcgggggctagggcgggcggtcccccagagagcgtggagggcgaggctccccccgcacccccagaggcgcagaggtgagccgctgtgctgtcccgttccggaggggccgctttgccggccgtgaatcccagacgaggcattgggcctttccacgcccctgggtggcggcttcctgtggtgtttgtggacgtcctctgcctgtgccctgaatccgctcctgaggctaagcgctcccaacgagaagggtccacgggaagccctcacctctgtaaacacaccctgggccagcgctcgcatccgaggggagccgccggatgtggaagaagactcggctttcctgcagccatttagtgccgccccatgctaggttatttgacattgtgcagtgtagagttgccttaaagtgcgtgatctgccagtgctttcttcaagtcacccttgccccgattcctcctgtttgcgctccccagggttgctcaagtggaaattttgtcagctgtttagccttttcgtacttggcgtgatgtcaacttcacttctaatctgcaaaagcagaagctgtttcctagtttacctcgcgtgtgtttacctatatggagtagctcgcagagatcacagaaatgcttgcagcctaaggcagggttttcagaccgtgggtcccagcccatttagtaaaatgggaaatcaattagcaagtggtcaccagcattacacagcaatgaagcagaataaagtaggccagaatgcatcatgtagtaaaggcaaatactgttttgtgaaacttttcacccatacatctaaatgtgagaactggttgcaatgtaagacatttcttgctgggaagttgtgagcaaaataagttgaaaacactaataaagatctgtctgtctgagcaaaggagactaaactccttgggcttcacataaataataaaactaattattaatttaaaagtttttatatattttagtgtaattgtttttttatttagtctattaaaaaatctttgggggg

SEQ ID NO: 339030 - DNA, 3636 bp, Homo sapiens
ttttttttttatgttgatgccttttatttctttggtttttaaccccactcagggtatcagctttcccagcctgacgctgcctccaggctggacactgaggaactccggttggtggaaagagatccacaaggaagcagcctcccaggtgaggttgggttgaattggtgttagggccgggtggggtttgctttttcttcagaggctgagggggcccctcccagcgccatcagccccagcaaagacctcagcattgactgcttcaccattctcccaccaccgtgtctgagtgaggcaggaatccagttacgtccatggtctcttgctgcatgacagaccaccccaagacttggtcggtggaaacggcagtggtgttagttgccaggatctgtgtatgactggtcccgggggtggccgttctgccccattggaggctctgtgccagcacaccaacaagaacacctagaggcggacttgggctggagggccctgggtgcctgtcgccagggggcttgtcgctggggggtttggccttagctattgaccccactctcttcgctggcagccgggcccctccctccaggagggtgcgctctgagcaggctctccttgcatcgtgcatcttgtggccaagctagtggccaggtggagacctccaaaggcgcggtttccagaacccgggctcagtggggctgtccttcctgtcctgtcggtggcctccgttgttggaggcctccaggtcccacatctgcagcagcaggcgcggggcatgcgctgcagggctgcctgggagggacagcgctgcttccaaacagccgtgagccccgcggggatccagagcccggagccctgtgcgctgttccggcagctgaggctcggctgggtcctcctctccctggccctgggcggggcgctcacgctagggctctgaccttgttccagaaggcgggaggcggcaggagagcgctgggtgcgcctgcgaggaggccgcccccgcgggggtgctgcctgagctgcctacggaggcgccccctggggacgcccttgccgatcccccgtcgggcaccactgaggaggaggaagagcagcctgggaaggccccggacccgcaggacccccaggacgcggagtccgactctgccaccggatcgcagaggcagtccgtcatccagcagcctgccccggacaggggcacggcgaaactgggaaccaagaggccgcaccccgaggatggggacgggcagagcctcgagggcgtctctagctccggcgacagcgcagggctggaggccgggcagggccctggggctgacgagccgggcttgtcccgcgggaagccctatgcctgcggcgagtgcggggaggccttcgcgtggctctcgcacctgatggagcaccacagcagccatggcggccggaagcgctacgcctgtcagggctgctggaagaccttccacttcagcctggccctagccgagcaccagaagacccacgagaaggagaaaagctacgcgctggggggcgcccggggcccccaaccgtccacccgcgaagcccaggcgggggctagggcgggcggtcccccagagagcgtggagggcgaggctccccccgcacccccagaggcgcagaggtgagccgctgtgctgtcccgttccggaggggccgctttgccggccgtgaatcccagacgaggcattgggcctttccacgcccctgggtggcggcttcctgtggtgtttgtggacgtcctctgcctgtgccctgaatccgctcctgaggctaagcgctcccaacgagaagggtccacgggaagccctcacctctgtaaacacaccctgggccagcgctcgcatccgaggggagccgccggatgtggaagaagactcggctttcctgcagccatttagtgccgccccatgctaggttatttgacattgtgcagtgtagagttgccttaaagtgcgtgatctgccagtgctttcttcaagtcacccttgccccgattcctcctgtttgcgctccccagggttgctcaagtggaaattttgtcagctgtttagccttttcgtacttggcgtgatgtcaacttcacttctaatctgcaaaagcagaagctgtttcctagtttacctcgcgtgtgtttacctatatggagtagctcgcagagatcacagaaatgcttgcagcctaaggcagggttttcagaccgtgggtcccagcccatttagtaaaatgggaaatcaattagcaagtggtcaccagcattacacagcaatgaagcagaataaagtaggccagaatgcatcatgtagtaaaggcaaatactgttttgtgaaacttttcacccatacatctaaatgtgagaactggttgcaatgtaagacatttcttgctgggaagttgtgagcaaaataagttgaaaacactaataaagatctgtctgtctgagcaaaggagactaaactccttgggctacataaggtgatcttttcattgattgcatttattctcaagattacagtatcattcccattgcctgcgcataaacttaactgctccctgcgcataaacttaactgctccctgtagatacagaaactggtgcctctttttctgtcactgtgtttgagcaggcagtctgttgtaatgacccccaaatcacagagacttagtaagtacttattcatgggccgggcgtggtggctcacacctgtaatcccaacactttgtgaggctgaggcaggcagatcatggagtttgagaccagcctggccaacatggtgaaaccctgtctctactaaaaatacaaaaaattagccagctgtggtgatgcgtgcctgtaatcccagctactcaggaggctgaggcaggagaattgcttgaacctgggaggcggaggttgcagtaagccaagattgtgccactgcaccctagcctaggtgacagtgcaagactccatctcagaaaaaaaagaaaaaaagaaaaaaaaattatttactaacagtcgattgtcctgtgttggtgttgctgttgcttatatattggtttgcactctgctccatacagtgattcagggatccaggccccatctctgttgtagctctgctcttcactgtacccttggagcatgtagggaaggccgaacctgttcacctgggagatgacacacatcacttctactcacaaatccttggagagaaatgatcccatggctccagtcacttgaaagggcctgtgaactgtcacctggagtgcctgtctccgcaacagttacaagcttagttcccctcttagcctatccatcttaagccccaagctgagtgtggttctggtaagaaaaaggctaaaatggtctgggcacggtggctcacgcctgtaatcccagcactttgagaggcagaggcaggtggatcacctgaggtcaggagttcaaaagcagcctggccaacatggggaaactccatctctactaaaaatacaaaaaatgagccaggcgtggtggcaggcacctgtgatttcagctactcaggaggctgaggcaggggaatcgcttgaaccggggaggcggaagttgcagtgagccaagatcacaccactgcactcctgcctgggggacagagcgagactccatctcatt

SEQ ID NO: 339031 - DNA, 1744 bp, Homo sapiens
aggccattgccttgtccgtgtcctctgcaggtctgtgggttctggcaccacctgagcccactgggcatctggtcatccctggcacctctcctttggagccaccttgtccctggctagacagtcacattttccagtgccgttttggaaagatgttgcctttggagaaggcgtttgcctcccccaggagctccccagccccgccggatctgcccacgccggggtcagcagccggagtccagcaggaagaacccgagaccatccctgagaggacccctgctgacctggagttctcccgcctgcgtttccgggaatttgtctaccaggaggctgccgggccccaccagaccctggcccggctgcatgagctgtgccgccagtggctgatgcctgaggcgcgctccaaggagcagatgctggagctgctggtgctggagcagttcctgggcatcctgcctgataaggtccggccctgggtggtggcacagtaccctgagagctgcaagaaggcagcctccctggtggagggcctcgctgatgtcctggaagagccagggatgctgctgggctcccctgcgggctcatcctcaattcttagcgatggagtgtacgagaggcacatggaccctctgctgctaccaggcgagctcgcgagccccagccaggcccttggagctggggagatcccggcaccttctgagacacgtgagtgcccagctagcctggcagcctctgctgggccttaggtggggtgttgggcagaggcctgtggttgggagagggcagaagggcagccagggagtcaggggctccatggtccatgctatcattgggacttcctcctgtagtttctctgaatgttagacattgtttattaaattagtcttcagagattatgcagatcatccatacttaccacaaatagtgaagaaacatcaatacataaagaaaagaatctcccaacccccgaccatgaaccctctgaaaataaagggtctcaagtgtcctgatgcacgtcccctcatgtctccctgcacatcacacatgcataatcagggcctggggtcgggctctgtgtgtgtggtgtgctgtgtctgagtgcttgctgttcgaggggtgggtcccccaggctgtggttgggtctggttctttagttgcccagcatcgcgtgctcagcccatccccatcctagaggtgggctctctgccccttggagtgaagctgccctgacacctcctgacttgtgtgcccatatgtgaggctctgggcactgtgggtggactcctcaggaccactgggcaagtggtgtgtgagttcgacatttcacataaaatagaaacttccatgtggttttccagaagttttgtggctgttcattaccagcacggaaggtgcccactggcctggatacagcccagcactatgtggtgttgctttttaggatttccacgaaggccaggcacagtgcctcatgcctgtaatcgcagcactttgggaagccaaggcgggcagatcacttgagcccgggcattcgagaccagcctgggcaacatagggagaccccatctctacaaaaaatacaaaaattagccgggtccgcacttttagtcccagctacttgggaggctgaggtgggaggattgcttgagtccaggaggtggaggttgcagtgagccaagatcatgccactgcactccagcctaggtgacagagcaagaccctgtctttaaaaaacaaacaaaccaaa

SEQ ID NO: 339032 - DNA, 2812 bp, Homo sapiens
aggcgcagtttgccggccgccatcgcgcactggggctccgggcggctgggaccggcctggggtagctgcgcagcaggtgggtcggtcccggggatgcagcgcgggggtcagagagcgaccccaacagggtagacggtgaggacgcctcagtgggcagcgttagggaaaggggccagggtgttcccggggttggggtgcgagcccccgctgtgcgtccaggaggccgagggtctggcatcccttcgcgtggagtgcggggcaggggccgggtccccccggaggtggctgagatccagatcggtgaggggccctgcaggcaggtctgtgggttctggcaccacctgagcccactgggcatctggtcatccctggcacctctcctttggagccaccttgtccctggctagacagtcacattttccagtgccgttttggaaagatgttgcctttggagaaggcgtttgcctcccccaggagctccccagccccgccggatctgcccacgccggggtcagcagccggagtccagcaggaagaacccgagaccatccctgagaggacccctgctgacctggagttctcccgcctgcgtttccgggaatttgtctaccaggaggctgccgggccccaccagaccctggcccggctgcatgagctgtgccgccagtggctgatgcctgaggcgcgctccaaggagcagatgctggagctgctggtgctggagcagttcctgggcatcctgcctgataaggtccggccctgggtggtggcacagtaccctgagagctgcaagaaggcagcctccctggtggagggcctcgctgatgtcctggaagagccagggatgctgctgggctcccctgcgggctcatcctcaattcttagcgatggagtgtacgagaggcacatggaccctctgctgctaccaggcgagctcgcgagccccagccaggcccttggagctggggagatcccggcaccttctgagacaccctggctttctccggaccccctgtttctggaacagaggagggtcagagaagcaaagaccgaagaggacggccctgccaacaccgagcagaagctgaagtcctttccagaggaccctcagcacctgggggagtggggccacctggaccctgccgaggagaacctgaagagctaccggaagctgctcctgtgggggtatcagctttcccagcctgacgctgcctccaggctggacactgaggaactccggttggtggaaagagatccacaaggaagcagcctcccagaaggcgggaggcggcaggagagcgctgggtgcgcctgcgaggaggccgcccccgcgggggtgctgcctgagctgcctacggaggcgccccctggggacgcccttgccgatcccccgtcgggcaccactgaggaggaggaagagcagcctgggaaggccccggacccgcaggacccccaggacgcggagtccgactctgccaccggatcgcagaggcagtccgtcatccagcagcctgccccggacaggggcacggcgaaactgggaaccaagaggccgcaccccgaggatggggacgggcagagcctcgagggcgtctctagctccggcgacagcgcagggctggaggccgggcagggccctggggctgacgagccgggcttgtcccgcgggaagccctatgcctgcggcgagtgcggggaggccttcgcgtggctctcgcacctgatggagcaccacagcagccatggcggccggaagcgctacgcctgtcagggctgctggaagaccttccacttcagcctggccctagccgagcaccagaagacccacgagaaggagaaaagctacgcgctggggggcgcccggggcccccaaccgtccacccgcgaagcccaggcgggggctagggcgggcggtcccccagagagcgtggagggcgaggctccccccgcacccccagaggcgcagaggtgagccgctgtgctgtcccgttccggaggggccgctttgccggccgtgaatcccagacgaggcattgggcctttccacgcccctgggtggcggcttcctgtggtgtttgtggacgtcctctgcctgtgccctgaatccgctcctgaggctaagcgctcccaacgagaagggtccacgggaagccctcacctctgtaaacacaccctgggccagcgctcgcatccgaggggagccgccggatgtggaagaagactcggctttcctgcagccatttagtgccgccccatgctaggttatttgacattgtgcagtgtagagttgccttaaagtgcgtgatctgccagtgctttcttcaagtcacccttgccccgattcctcctgtttgcgctccccagggttgctcaagtggaaattttgtcagctgtttagccttttcgtacttggcgtgatgtcaacttcacttctaatctgcaaaagcagaagctgtttcctagtttacctcgcgtgtgtttacctatatggagtagctcgcagagatcacagaaatgcttgcagcctaaggcagggttttcagaccgtgggtcccagcccatttagtaaaatgggaaatcaattagcaagtggtcaccagcattacacagcaatgaagcagaataaagtaggccagaatgcatcatgtagtaaaggcaaatactgttttgtgaaacttttcacccatacatctaaatgtgagaactggttgcaatgtaagacatttcttgctgggaagttgtgagcaaaataagttgaaaacactaataaagatctgtctgtctgagcaaaggagactaaactccttgggct
